United States Patent Application Publication US 2014/0057251 A1 - sequence listing, part 24

SEQ ID NO: 25126 - DNA, 3320 bp, Cannabis sativa
gctaagcatcgtagcaacaacttcttcgctcgctccatcgcagccgctaagccgtaaaagcaacgcctcgagctcttttctcgaaacgattccgtcgttatctcgatctatgagtttaaaagcttgattaagctcagaatgagtatcggtcgagtaatctgaccactgatcaggcaaaacgctggtcggagtaaccgaaccgacggatttgagattatgcgaagttgaagcatctgatgaagatgatgatgacgtggatgaaccggatccgaatgaaggcggatcggaagttgacgaagataacttgttgctatcctttgacgacctgaaaagtcgctttgggctgagcttgagatttttgacgaatttcatggcggaaaaagaaaaagtagagagagaaagaaaatgaagaagaagaagaagaagagttgttggtgttgttgaggagaaataggaaggaaggtagtgtgcttaaatggtggatggagtgaaggtactgcctctctgccatggtagcttccacgaagtttcgttatagtgacttttttgagaaagagaggaaatgagtatttatatctaatgtaaattttctccttaatttattgatatatatatataggcagacttgtaatttcacttcatgtattctatgtacgttagatgggtctcgttactatttttttaactctaattactcttagatcaacttcaaataactctcctatttaacgaaatgagacaaaatcatatccctatatatatctatttattttggtaagaattttttttattaaatttataaaagttaatatttaaataatttattttacacgtttataaaataaaaatatttaaatatttttttaaggaaattatctcatataacgttttttttatttttttttttaaatttacagtttgggtttctaaagtggttttttataatttttttttgcgatttaagttgcagcactagttacaatatgagtttttgtgtaaaattttgtaaaaatacaaaaacaaattattttaaagtgtaaaaataaatatgtttctattttttatcgcatattgaaatacataaaagtgcatcagtgcacctttagacatttttaatagggataatatttatagttgctataatacacacatcgtactaattttttttttttttttattttctctctcattcacctaagaattgtcattttctcttccaaaaatactaacaactttaaaagttgtctagttccacgtcacattgaaattaataactttttcaggtaaaaaattaaaatgttttaataaaaaattaaaaaatatcatgtagtcattgtctatattgagcaatacctcacataaaattactcttgaaaaatagacgacattgcatatgtggtaagaacacttcaatggacaatccccattagagatgcttttattattgtaaaattttctaatattatttattggcgattctacaatgcatccctaaaagagatccatcgatgcatctcatatctcttttagcatccaagaaaaaaaaatattttatttttttttcatagtcgtgtacattacagttatttaagatatcctacaaaattacaaaattttgaaataattacaatataaaaaacagtgtacaaacaatctattatcacataaacgatcatgaaaaaattaaattaaaaaaattatcacaaatgttgaaatagatatgagttacatcggtggaactcttttagggtgcaatattgaagcaccctttaatatttatttatttatttttattcaattactaattaattattattgaaaaattttataatgcacttatttaaaagggatgtactgatccattgctatttgtttaagtatccaaaataattttttagtcaaattttttatcttggtcattaaattatagttatttaagacatctcgtaaaattttaaaaaatttaaaaaaatttaacaaataaaaggtgtatcagtacattcttaagaaaatacattgtagattcactctattaaataataatatctgtgggtagtttttgtcagtaatgaatgatttagatttgtattcggtagtcattttcaatgggattttcaatcctaccgttgattatacaacacaactctcatatcttatcatttattattattattattcatggcaaaaaataaatatttattattattataattattgttttacaattgttattagtattattatttttgcaacaaattagtattttacaactttataaccaattgtacttataatatgtggtattgttaggtcatttcggtattatactaacattttaaagtatctccaactttaaacactaaatttggagcatatatactatgcactataacatacacaacaaaataaagcaaaatttgataataccttggaacaagttggacactaaattttttgttttgctgtgtccttgtagatgctcttaaaatattatcctataattagagtaataacttgtgcacttaaaatatagacctatgcactaaattttgtgatatgtgattgcttttttaaatggtggatctcgtctcaattagatgttactggaaaaatattgtcatgttattgagtgcaatactttgtgcatatttgatatgtacataaataataatttattgtaactacagtgtttcagctatattggaattgctcttaactcacatgttactagtggtgttaatattctcattaattgtgaaagaagcttaacgctctttttcttcttatgtagattggattagaaatttatatagtaaataaaatttcaaattattgacatttaacataaacaaggttgatcttgagattggtaggtcttataaaaaatatatattgttgggcctatgtaaataatgtggtattttcaaaaattactaaacattatttacattttttaaaaatattttctctttcaaatcttgagatttagtttgtctttacttaggattagtcatacatgaacattatttgtaatgagaaatgttaagggagaccataaggtacaagcaccacaagacgtggcgtgacatatcgctattgatgtattttaatatcgggtctcacacattttagtttaataaatgatatgaaaaattactagccaattataaagtggtactttagtgttttacccaagattagccatacataaatattgctccaaatgagaaatgttaaggggcatcttaaagtgtcaaatatcacaaaaaagaagtggcatatcactattggtgcattttaatattaagtcccacatattt

SEQ ID NO: 25127 - DNA, 2964 bp, Cannabis sativa
tgagctcttttggctaaaagaatacagatagaagatacatcctgccctttgtgtggggcaggtgaggaatttatggagcacatgttcctctattgtaacattgcatttcacttgtggagatcttctcatggggcattatgccagtacttatagagtcagatggccgtgtttgggattggattgaatttttttggggtcttaaggccaagggtgtcaatgttcatgaggtgatcctccatgcctcagttgtggtagatacgatacagcatgtccgaaatgataaagtacacaacaataatctgaatagcatcaaacattatattgactcaatcattcattgttatgcagattataactcttatttgtttcctactccgccagttgtcatgtctttcctttggtccccaccctaaaatattggatcaagattaattgtgatgtgaaaatagagagtggggctatgtgtgtggcgacattagctagagatccctgtggaacggttttgtgggttgctaccaacaggcttaatttctctaatccccttatcggcgaagctgtgacatgcttactagccctggaaaatattttctttgaagcaccattttgtgatacttgtgaatgaatctgagatagttgtcaaaattctgaaggagacatgtcctgtttggagtattgataactacgtgcagcaatgtaatagactctgtaatttgtttttgagaaataacttctcatttatttctagaacttgtaattttgcgatccataatgtggttgattgggtgtttgcacagaatttaactggtattattgaggtatcaacaattctggcgaaccttatttataatgaccataaagtttaacttgttttctttaatgataagcgctattttttttttaaacaaaaaaaaaaaaagtagattaattttttattaggataatataaaaaggagttttattttcattccacaaaattaaagtacgctgaatattatttttttaaaaaataacataattaattatataaaaaaaaatactttatatttaataactatttgaattatatatatattttattttattttattttaataaaatttatttaagtattttgtattaatatttgaaatatactttattttattttatatatttatttttaagaatgtgaaaaggaaaaaaaaataaaaaaaaattaatataaattaaaaacatatatttatatatatataaaaaaaaaaaaaaagatacatttataaatttttaaggtgcatataaaactctcgtagtttaatttaattatgaataaagtgatagactcaaaaacatcataacttgtctttaaaacacatggatagcattttctttatatttatttttaatatgattttaatgagtttagtttatgttcaatgtaattagtattttttattgaatttttattaagtacaattccaatgcaaaaatttaaatctaatgttaaattaacgcaaaatatattatacgttaaattttttttcaattctaaccacaaatactaaaaattatgttctttattataatattattttagtaatataataacaatatttacttaataaatgaattatttaattattaaaaagtaaaaaaaaaatattgtggtttatagtgccaactattattagtggaacactgtaaagcattttataagaaaaattacattatatatgagtttttaaattatcattggagatgacttaagtttcaatttactttttaattgtaataattatttaaaaaaaatagggaattagtaattttaaaacaaaatcaaactaaaatggtgtctaaagaactgattttaaccattttatgactaaagagttttttttaataatttctttaaaccaatggtcaatttagttttaacaaaggagattttttttttcttgtactatcttttttttttacaagtaattattaatggaaaattctacaatacacccccttaaaataggcttaaaataggtgtatcgatgcactcttatctgttttggtatctaaaaaaatatttagttcatttttttatggtcgtatacattgtaacattttgaaaaatttgaaaaaatttaacacgtcgaaaacagtattcaaagagtctgttgtacgcatgatttttttattttatacgcatgtgaaatagacggtttaaatattgatttctatattgtaaattattctgaatttttcaaaattttgcaagatgtcttaaataactataacgtacacgactataaaaaaatttagattaaaaaattcttataaataccgaaacagttggggttgcatcagtacactcattttaaatgggtgtattttaaaaacaccctatattaataatactgaaatttaaaatcaaatattacaagggcacaaaaagaatttgacagaaatttacacaaatatcttttttttttttttaattattaataatcataagaaatagattgacaagcttgaaatgacaaaaacaccactcacactacacagaacaacacttttatgaattataggggaccatagaacttgaatacccgttaccaaaaatccgtgcaataataataataatagagtctcatacaatatgaatacacgttacaaaaaattcgtgaaataataataataataataataggattagagaaacattttccatgtaatctaccctaaaccccttggtaaactctttccaaaaaaaaaaaaaaaccctttggtaaacactaaatatgtataaattagagtattgttattgaatactagtggtgcttaggaatgggcataaattgatccaatctaatgacaacgaccgccaaatattaaatatttaattgtgatcggatcggatcagatcgcatgttatttttgaatatccaattggatcggattggatgttggatggggtatccaaaaatccaatacatc

SEQ ID NO: 25128 - DNA, 2221 bp, Cannabis sativa
tgtaaagggttttatttagggcacaaaacccaacaatcacatcctttctttgtcagttgaacagagaaacatcatccgcttgaccagtgtggacaacttttggatgtatggcttgtacctcctactcttggggctacgaagtgccagctactgatgtggcctactttggagatgggcaaggccctgacttgcatgatgaagaagtacttttgttttgtatcgtacagaatctggagaggagagagagagctttccgtaggcccctgcctgcggaggtctagtaggtgacgcttgacttcatatcgggcctagaagcccaatttttaatagacctacatgcctcatgcctataggtaggggtaagggcaaggctgtagttgtgaactctgatagcttctcttctgacgatgatggtatttgctagattataacacaatgcttttattcttgtgttgaatatttatgaatgcattctgacttcactactttctttttgcaggcaactcttccaggctgagaggtctcgtaggtggccttcagatgagcgtactggacgagtgagggccaaggtgactgggacctccgatgtgtaactgaccatcactgcctccccctccactagggcctggaccagccgggtagcctatggtttggcctgctgaccaaggtacacgaaggcctagtagaggagcggggtcaattgctgatcagaaggctgctgagtcagccactcgacgtatagagaaggctatccctttcttagatgaggctttgaaggagctaggtgacagtgtggctgacaggctatactctgccggacttcaggacctttctttggtgagttatgctttcaggttggatgatggtgtttcttgcatgtggctggtcggccttgggaattcacataagggtctggccggccatagcagtccaaggaggggactggccagccagggttgactatttgatactaatgttgttttgctttgttttaaggccctgatgaagttgagctcagctcgtgatggctcaaaggggccttcagacgctttcaaggagcgtgtgaaggtctcggaggcatcttttatcgcagaagacaaggccaattctgagcaggaggtccttttagcagagagacagagaatggtctctagattagaagtcatgcttagttctaggaacatcgagaacaccaaccaggacactctcatctctggattacaaactgatcttaaggatcacaagaagaagttgtaggaggctcttgatggccagcaggccattaagaaagattacattaacctgtcctctgaacttacttatgagttttgcctgcgcaatcctcgagccaaattattgtacatgggcagtctgacctttgtggaaagaacattggctcgtgggaaggcattgttcaagagttgaatggagatagaccaaatcgtttcttattgagaggggtcatcattgggtacacattgcaaggtgttagccgacccactagtggaggaggtggttggccaggatgctgtccaccaggctggctagcattgtgatgatgggctggcctgaaccctgtggatctcaacctggcggctccaaattcagctcttactgcccctgcacacatgtagattggaaaatttttattagttagtattcagcatccatcatgtttgtagtattatattatagactatgttttcatgttctgcatagcctatggctttttatggcttgtggcattttagctttggaatattactcaatttttcttttcatgtggcctatggcctttttgaaactttatgtcttatgtggcctggagcgtttttagaacactattttcacgtcctatgtggcccgaggcctttttagaacattactttattttcaaccccaagaacttcatgtccctatctctggccataaaccttctattttttaacattactagtatttgatcatgttgctttcttatcatggattgtgtgactgaccagacagtctttaatcctggctatcttcttatggccttgacaagtacgggtctgaatttactttgccaagcctaagtatgcatggacgacttagaggcaggtttagtatgttatattaatcgttaaaatttcactacataagttctatgtgctagttcgaagcgttgtacagtatgggtgccccccaagtgaccatgcagacaagtctcttggtcacttgc

SEQ ID NO: 25129 - DNA, 5828 bp, Cannabis sativa
atatagtctgcaacaacactattcagacacccagtataaaaaatgggagtgaaaatcaaattgccagggatccaaggatcagttgcacagctgatactaaaaccattcccaactttcttcctaattccttttttcagtaattctctgccccagcagatcccttgccaggtgagagaagaggcaccacatgttgcagcagagagaaaatcattcctgggaaagtatcgacctttaagtacacggaatagcagagagttatgattttggaataacctccaagcttgctttgctagaagagcttgattgaaatggataaaattacgaaatcctaagccaccttccattttagaatggcacaaaaatttccattgtttccaatgaatcttcttcttatctgtagtcgtgccccaccagtaatttgacatcatactctcaatttcccgacaaaatttaacaggaagtttgaagcaactcattgcatatgtgggaattgattgaatgacagccttaagtagaacctccttaccaccaacagagaagatcttatcagtccaagcatgtaataatttccaaatacgctcctttatgtgattgaacatgttcttcttatcacgttcagaataagctggtagaccaaggtatgactcatgacaatcgcatataggcatgcctagaatgtttcggaaagagtgttttgcagcctcagtggtattaggtgaaaaggacatgacagacttatcagtattcaattgttgaccagaagctttatgataagtgtccaaaactcttttgattgcaccacaagatctatcatccgcctcacaaaacaacaaactatcatcagcaaagagcaagtgagaaatggacggcgagtgtcttgagatagctaaaccttttaagcagccaatagactcttcatattgtagcaatcgagacaatccttcagaacagatcaagaatagataaggagatagtggatctccttgcctgagaccccgttgaggtttcacattgcctgaaattgcaccattgacaatgaaagatagttgagtagtttgtaggcaattcatgataagagctacccaacgaagactgaaccccatttttcccataacagagccgctatgaatgagaccccactccactcgatcaaaagccttgctcatgtccagtttgagcgctgaaaaacctttcctacccctagttttgtgcttgaggcaatgaaccaattcaaaggcaaccaaaatgttatcagtaatgagcctattaggcaaaaaggcgctttgagtttctgagataacatgaggaagaattgttttaaaccgaatcaccaaagacttagagattagtttgtagacaacattgcacaaactaattgggcgaaaatctttcattgattttggtttcttgatcttgggaatgagagtaatcagagttttgttgagagcttcaggactaccccctttgttgagaacatgaagaactgcctgtgttaccaagtcaccaacaatatcccaattatgttgatagaataaagcagacattccatcgattccgggactgccatcaccattcatagttttgagagcctcaaagacttctgtagcagtaaagtctttcgaaagaaaagcattatgttcagctgttacagtagtaggaatgacattaagaacatgctgtaaagcccaatggtcttcattttgtgcttgaaaaagattctcaaaataagcagtcactaaaccagatatttcatgttgagaagtgtagacagatccttcctcatctgttaacagtttgatcttattattggagtatcttgcagaagctttcgcgtgaaagaacttggtgttacgatctcctgattgcaaccaatctattctggcacgttgctgccagtattgttcttcagtggccaataaatcatcaagaacagcttcagctttctgaacttgctggtaatgtgaagttgctggtgtagaggtgttagaaagggctgtaacagtagcttgtgccaaagagatctgagatttaaggttcccaaacttatccttatgccaagatcgaagagaagcagcacactttgataaattgccattcagaacatcaatcgggtttcctgaagaaaaattccagcattgagaaataatctgggaacattcagcttccttaagccacaatttttcaaatctaaatctcgatcgatactggacagcagaggtagtagattgcagattaattacactaaggacagctctatgatctgaaccgtagtaatccaggtgagacacatgtggagaagccaaattatctttccaaatggtattaatgaacacccagtcgagacgttcttgtaaagctagtggattccgtctattcttagcccaggtgaaatcaggacccgtgtgagagagttcaataagagagcataagtcaattgtggttcgaaatgccatcatatgattatcagaacgtaaaggaccagaatttttgtgtgaatgtgaaaaaatctcattcaaatcacctacaagcaaccatggatccattggagagacatcagcaagtctttctaaaagagtccaagtgtgcttcttattagatgcttcaggaaaaccatagacagccgagaagtgccaacgaggaccatcattaaaagagatataacaatcaaaatagttagagttcattgataatagagttacatttacatcatcatgccatagcaacattaaaccacccttaagaccagaacgagggacttctaaaccattgttaaactttaaacattgtctaaaacgagaaatacaaccagaaattaacttagtttccataagaaacaacaagtggggagtttgctcacgaacaagcaaacacagacgacggaacgcactcggattccccaaaccccgtgcattccaacttacaacattcatgatgaaaagcgggattgctgagcaatcaccgctgaaatgtcctctgaaccagcagaatcatcacaagaggtagaaactggcaggttggcagtcgcttcaattgaggaaggagaaggactagaaccatttgatgcacgacatctcttaagagttttccttagtgaaagactatcaaattgtctcttaaaagctttgtttggattggtattttcctggtcatcaaaatcatccatatcatcaagatcagaatggggctggtgcgagacagtagtagcagcaatagctttcccagtctttttggaagagatatccatagtaacattttggcatatttcttcacgagaaaaattaggaataggaggataagtggcaaaggtgtgatcaacagggaaaggaccaatgttgggagtgaaaacatcttttagatgaaccactgaattatcgcaaggaacagttttaaggccaggagaatggcttgcaggaacggcagcagtaagtggatgctgaacatttaaaccagcagtaacagaaggctgcattttttgtgtagtagagggagaaatagtgcgagtggttgtaggaggaagatgattcttattagtattggaggattctccctgtaggagaggtcttggatgtgaaggtggccgattgttgatctgtggaattgtagcagagagtgttgatcgtgctagtcgagttaagagtggccacgcacttcctttagaaaaatctgatctatatcgatcataactagatgtaggcaaaggagcacccttcagactcggtcgataagccagttctgattcaatcccattatccatattttcaagatggaccagacacttattaaaaacatgtccaattcttccacattccatacaataatcaggcaaacgttcataccgaaattccacccaaaattcatctttgatattgggaagagaaatcattttccccctaagcaatggcttagtaatgtccaatcgaactctaaaccggagaaaaggaccccaaccctcaaagcaagaatcctggaagacttcaataaattccccaattagatttcccaaagccttagcaagcggttgagtcttactgagaaaagggagtcggtaggcttgaacccaaaaaggagaataaatcatctgttgaggagtgattgagtttaatgcagatggctcaagcaagacaatatggtggccctggaaatgccacggttccttctccagagcacgaattttgtcaccaatgcagccaaaggtgatcaggaataaatcagagtggtgttctgaaataacagctttgaaccttccatcccagtgttgagccatctggttctgcaatgttgacaaccaaacctttttaggagaaaggatgcgcacgaccaagactaaatcaagtctttcactctgatcaggtgcaccatcatcagtaatggccaccactgatctctcatcatcagttaaagagatcgttgatttcattctgtcaatgaaaggatccataacaaggaaaaccaggaagaactgggaagcaaatcttgagaaaaactgctagaaaccggcagaaaaatagagagggaaaagaagaaatcataaaaatttaaaaaataactaccaaaagaacattaactgccacagagcacaaagtgggcagacctccatcatacagtgtataatggtctcaaaaataaaactctaaaatgaaaaactcaaaaataaaactcatatctaacgaactttgtatagcttggattgtgattaaattatgtgactctatcactacatcatgtggccctatttactcaacaagtttcttaaccccaataattttaagtgcccccttcaataatataagccatatttaaataaaggaaattaaggtatatgtactcgtacgttaacatatataggacaaaattcatatgtcactatacaaatatactctttttgttgggtttttattatttaaacatgtataaaatgagtggaatatactttgaacccaataaacacaactcttgtttgtccaaattgcacgtgggtaacgtgtttacctagggttatcataattaattattaggtgcatgcatgtatatatacatatgtgtattcacatatatattgatggaatatatagtggattttttctgtatccatctagattttttgtactatggaaaaaataatgtatgctatttcatcatcttattataatttataaaatttaaatttttatatttaattaaaaaaataactcatttttatattatattagctggaattattttatccactgaaaaaaaattaaaattgagtttggtttaatattttatatataaatatattttttgatatagtataaactagtttttgatatttttttaagttaaatagttaaattaaaatataaaaaattaatttttttttactattcgtgattgatacaatgcttcgtcaaatgttaacaaagaaaaaatctttaatccttaatttgtacactttattataaccacatcctcttaactataaattaattaagaatattatatctatcactattattatttttgtaaaatatatgttaggacatataatatataaaatatatattttgtcaaaatattttctaatgtaatctttataaatataaagaaattaaaaaaatacgtataaaataaatataacaatgaattcattcttttattatacatataaaatatgtatatatagccacttctaaaaagcacacaaatgtagccgcaatagttaaaaaaatctcaaagattaaaatctcaagccctattacaaaaattaaaaaataagaatatatcaactaattaaaaaaattgaacatacatgtattacacttaacatcacttaattaaacctaatt

SEQ ID NO: 25130 - DNA, 1257 bp, Cannabis sativa
ggaaataattagtcatatggatcacgatcttctttttcatcattacaatataagatataaatttcacattcacataatttattaaaatcaatactcttatccaaacatttgatatagaaaaattctttcacttaatatttctatatgaattcctcaattttttagctttaaaaaataaataatgttgtgacgacccttttctagctttcatactccattcatctttcgccacacctttgtggcgaagacatttaaacaacaccacaaaacaaaatataaaaattttcataagtagtagttaaattgtttcttttattaaacaaaaaaaaaaaaagtcataatcttttaaaaaataacttcattattactcaaaaaaccaaattattaaattttaaaacagttaattttttttatttattttatcattcacatgcaatttctttgttaatttcactatttttaatgtctaccacaaaattactattttttttatatattttaaaaataataaagtataattgtaatttcaatactattactttattaattataatacacataaaaatgagattatatcactgtgtatgagtacaataaatatatataaaaaaaaaattatgaaagttggacaacgccgcacaaagtgaggcttaattccttagttacataatatttacaaaataaaatgtcattttaatagtatatactttataaaaaaacaacaatgtgtttcttaattatatatataaaaaaatgatttaatgacatttatataattggtagtagtataattgagtaataattttaaaatgtcattaaaatcatttataatattagaaataatgattaaatgatatgtttacaaatgtgaataatatgatttagtaataattttaaaatgtgactaaaattattttaaaatgaaaaataattatataaaatattttaagggacattttcaattattactaaaatgtactatttaatgacatttttgtttagctcataggacaatattgtacattttctacagatgttataaaaactataaatgtaaataaaagtgtataatagtgatatttttagatgttactaaatataattttcggtgtagtaatatatatatataaacttatatatatttgttaaaaaaaacaacaaatatatatatatatatatatatataaatattcacaccaaataatgatgaatatgcctttctaataaatttagaaaaaatttataatactccttaaa

SEQ ID NO: 25131 - DNA, 1873 bp, Cannabis sativa
aatctagatcctggtaaaatattttcaacaggtatgactattggtttttatcaaaattttgggacattgttggaactgatgtgtgtaaggcttgcttgggttttattgatgggtcggcttccgcttcttctatcaatgaaaccattgttaatttgattccaaaggttaaatcccctaccctcactggtgaatttcggccaatcagcctctgtaatgtgctgtataaaattattgctaagatgcttactaatcgattgcgggaggttctgggggatgttatttcgaaggagcaaactgcgtttatcccgaggcgcttgataactgataacgcaatgattggttttgattgtctcaacgctattaaaaggcacaagaaaggaaggaaatggtttctggcttagaaggctgatatagccaaggcttatgatagggtcgactggtcttttctgaatggtatgttgattaaactcgggtttcatctggttgggttgggttactcatgccctgcattacttcggtgtcttatgctattaacgttaacggagaaattattggccttatctcgccatctcagggcttgcggcaaggggacccactctccccttttctatttttggtgtgtgcagagggtttgacttcccttattaagcgtgatattggacgaggacaatctcagatcttcaatgtggcagaagggatcctgtgatttcacatcttttgtttgcggatgaaagtttcttctttttggaagcatcggtggctagttgtgttcaatttagagaaactttaaatcagtacgagaatgcttcgggacaacttgtgaacttgtgaaaatcagcggtatgcttctcttctagtattcctcttaatttttgtgagtatctggcccacattctcggggtcccgcttgttccttgtcatgataaatatcttgggctgccttgttttgcgggtaaaagtaaaagtcgtctgtttcaatcgattaaagatgagatttggaataaactttttggctggaggtcaaagctcttctcctctagagagcgtgaagtgttgttaaaatttgttatccaggccattcctacttatgctatgagcttgtttcgtttaccggttggtattattaatgagattcaccgtatgtgtgccactttctggtggggtggggatgatgataagaaaaagatgcattggtgtacatggcctcgtctctgttggcataagaatgatggtggtatgggcttccgggacatgtttctgtttaatcaatctcttttggctaaacaggctgctcggttgtataactcgcctgactccgtggcagccaaggtaatgaaagggttctacttctgcagtggctccctattaactgttgaagtaacaaagtgtgcttcttttctgtggaaaagtatcttatggggtcgggatctctggaagaatggttgtcggtggtgtgttggctcgggtgagtcaatcagaattcgtgaagacgcgtggatcccaaaggatcatgtggggcggacgtattccttctcgggtgggccgaacctacagttggttagtgacctcaaatttgattctgaaagatgggattcttctcttgttgaggagtgtttcgacgtgggggaggcttctgccattttgtctatcccgtgctccttgtttgatagtcaggataggcatatttggcatttctctgacaatggttctttctcggtaaagagtggatattggagtgcaaatatgtgacacgtgtgcaaacttatggtttcgatccccggccacggcgccaaaaacttgttgtgaaaaattgtatacgcaagtgtacgcaatcgtaacaagtaataaagtgataaattgagtatcgtctcca

SEQ ID NO: 25132 - DNA, 4651 bp, Cannabis sativa
ctctctctctctctctctctctctctcagcgggaccttagccacgacctcagccagacgtccatttctccaccacgacctcaaacttaagtcagacctcccacacactcaaccaacctctacattcatttttctcactcaaaagcaatgggtaagtgattttatacaaaatattgttagtttttgttgtatttagtgtaagttgtatgaatctacacattgttagttgtattttgtccatttttattctgaaatgaaagtagactatgatccattttttgtatttttttctaggtttttcattttgttgtgatgtttaaacgcgaatggcaattttgtgcaattttcaccgaagttagaggttagggatgaatctatgcgacatttgaacgatgctattgtgatttggtgcgatatatttgtccagccaaaatcaaaatttttggacgatttatgggcgattttttgtgcaagtttattttgttttgttttttttttaatctttttcttgttgtgtttcttgtgtgacattatgcgatattgtttatttgtgcgatattattttattttttattattttcttgttgccttttgtgtgtagttacctcatcattattgtggttcaaggcacaaaatagcaacattcaaaggtctagtttgaaacttttctctaatagtttcttaattatctatcttaattacaaagttcgagtttggattagatatatgtgggaaaaatttgatgcatgtcgtatgccgtatcaaatttactattatttttatttcaatacttccaattattttagtataaatataagtaagggacgatcccacgaagactatgcttattaaattattcaaaaattagttagaagaattagaaaaatggggttttgattacgagaataaaataacataaattaaaaagcaaattaaatgtgatgctatgatatgaaataaatagtcaaaggttattctccaaccccaacaatcattcataatttctaataacaaatgtaattttagtcaatcaaactatttatcctgtagataatattgaagcagtcaattatctcaatttttctattatatgtaatcaaggcaaaatcctcaataattaatcttttacacaagcagtaaatccacgaagcatgcaatttatttaacttagataaagctttatgtttaatggagatagaataatccatgcaataaattaatgaagcatataattcatttaacttagattctcttcttcgtcacaatttagaatgcctttgataatattagaaattgcaatttatcacaaacacttataatattcctagactattaggtgaatagtaatcttaagatgacaatagattaaagtaaaatctaatttagcgattgtctcaataagattaaaaaaaataatcatgttattaaatataggagaatagaagaaattcgatataatagaaactagaaattaacattcatcaatgaaattaaaaactcatgtcttagattttgaaataacccttaattaaatagaaactattcggaactagacattataatcaaaattataataaatagtaagagtttaaggagaaaaaaagaactatgatgtagaacactagaagccgcaatctctgtctttttcttgctctctctttgaatttctctctctatttcgtagctaaatggtccctaaaaatagatcctaaaagtcctatatgtaacccctaaaaatatcccgtttgaaaaaaagataaaatttgaaatctggtagaatacgcgccttctccgtggccatgctgaggctcaccgttgtagcagcttgctactgaaaaatttctgtcgagtatttagatttgtattttggacataacttcttcaatacaactcgaagtcggacaattaaagatctttcgaaaagctgaaaatgagatctaaaacttacatgtttagctccaagtacagttttacttccaatgtcattgaaatttgcaattaagttttgccttgtaaaattgagcttgcatcttctactatttttcaccaaaatgtggtaaaatccctccaaaggactccaaatacatgattagtcttaaaaatatcctaacaaattaaaatcatactaatcaataatttaaaaaattaattttaaaatattaatacataaattgaccatatttataagacaacatattaacttttattagttgtattgttggttattgtttaacaggattgtgtgaactatattgaatttttaacagtaattatgtatttttctaaatgtttttgagattttgtgctatatttatgcgatgtttgtgcgatatcttttctataattcagttgactgtaaatattttttacgatttacaatttttgcaatgtttatgcgataactttttacaaaatgggcgacctttgtgcgattttattttccatgattcatttgactaaatatttttcaaattttacaatattttttatttttatgcgatatcttttgatatttgtacgatgtttttgcatttttattttccataatttgccaaaatatgcgaatttaggtgatatattcttacaattgtgcaatgtctgtgcgaatttatctcaactatatagaagggtaggcacgaccaaattggtagacatagaagggtagtttatctcaactgtgacattctaaattgagattattagcatttgatatttatttggtcagatcaaatgctaacattgtttgaaaactcaatgctttaagtacctataattagttctagtagtttttgttaatatgcgattaaaaggtaattttttccaaaatttataaaatatgtgcaaaaatactagtgtcataaactagtcacaaaaaatatactatgcagtcaactatcaggtcaaattctggtaaaataagtccacacactacctatgtttaaaggtgggtataacatgctcaaatgaacgatccaacatgcattgcttaatgtatttaatgacatacattccacaattgccactacaaattaataaattggaaactattagaaacaaataagttaagtaattcctaaaggactacaaaatggcttccaaattctttttgaaacctatgttgatattatataaatagaaaatgggagatttatcttttttccgtctgcagtacaacttaagaggtagctcttctataatgcatcagcaggagttgattgagatcacctaaattaaccataagtacataactgtttaattgaaaataatcactaccccccaatacggatgtaaataactcggtataaggcttcaaatatgacttcatgttctcctcagttgtggcactgatatcacagtcatatactacaatctcagttctcaatatctacctcaacagccacctaatggtgcttagcaggaaggttcaacacaaagtagatatgatactagttctcccaacacgacaagtatctatggtctatccccaccacataattaaaaatcgcctgatcccatttgaatcctgtcaccatcatgataattctagtacatttaaaataactatggaacatatgtgcccaaaaccacacatttttgagtgtacacatcaggaaagagcttgtgtcttcttctcaacaagtgcatcatggggtcaatttaatgcattgcaaataaaaaaaagttagaaaaatgtctcacaaacgtcgtacataggtcgcacaaagatcgcacaaaactaattattagagtgtaaaattacacatctattgcataaacatcgcacatatatcgcataaaaatcaaattaattacacagaggtagatcgtataggaatcgcacacaaattgtacagaatttgcacacattaaacattggcacatttagcaattttttttgcaagtttaagcaatgtatttgtggttcacaaaccacatcgcaaatgcataggttagatatttcaaaaactcgtaaacatgtcgcataaatataaatataaatatatgtcgctcaaaagtttaaaacaccaaatttgaacagttaagaaataacttacaatatcatcaatccattctctttccaccatcaacttcacaaaccaagcccgattggcactgccagtgtgaacatccctaggatggttgtagtccgtcaagtaagtaatccacttttgaaaaaatttgtacagtcgtgagtctgctggcctcaaagtatctactttaactggcccagttcgttgtttcttcttcccttttgtgcagtcatttaagaaaattggcttctattttctcctagccctagaaaattctactccaggaggtgccatcatacccttgcacatcctaaaactgtgtatcactgatggcaatcatagcagcatccactagagtagaaggaaccttatttacattgggttcccaatcttccagatacacatcatcctcatcacaatcgtctaccgattatgatggttgtgtcggctctaatagctgtgtcggcgttgatggttgtgatggttgcttctgtaataaacttatcacagtcccaatttgatcgatgataagattcttcatctatttctaactactcttaaatgtagtcttcatctcagtttgtgcagccagaatcacaagttgtgggcttcgaccttctc

SEQ ID NO: 25133 - DNA, 1306 bp, Cannabis sativa
  modified_base (67)..(70): a, c, t, g, unknown or other
  modified_base (1090)..(1096): a, c, t, g, unknown or other
tatatgtgtttaaattacattgttttagaaattcatatttattatgttaaataacatacatggtagnnnntctagatcctggtaaaatataatccaacacctagttgctcagcttgtcgatagatcctccctaatctatcaactagtcttccttggattggatctttgatgagattctgacctcttccattggttctctgattgaacttccctatcaagtcattgacctctctgttgcggtgatccaactctgcctggtgagatcaaaaaatgtactcctaatcatccatccatccatccatctcaagaattcgtgtctctactaagagaatacatcgcaatcagctatgcatggttctttagttaggtcggcctaacaaacaacctctctcagtatggcgaacttgagatcttctcccaagtttacatggggcttgccaatgcctggtcctatttctctagcatagtacttgagacgagatctggttgttgttcttgggggctgctccccaagggtccttccttcagtgtgaggtgccagtggagggtcctccctcaaaggcaagggcctactgttcaaatccaccaagatgttcgcattatcctggtcagctgcagaggccagattcaaggtgcttgttgtggtggtaggattgatcacatctgctatgttcatgagaattctagttgtggttggaacatgcacatcaagatctacatttaaagggcctccaggaaggtctgatgatgtagatggtgcaaccagagttctcctcgtgttaaccatggtgtttgatcagattatttgacaatttgctctcaatgaaagcaacaaattgttgacttagaaatttgccaaccgatagcagagttgaattaatgctggtgcttgccacgtgttacatgattagaaatagaaagtaaaagaacacaaagattttatagaggttcgaccccctaagttagtgggtaatgacctactcccctttagttgtattaataccgagagataatactattcagatcattattgagggatctaatatagctctcttaaagttacaatgtaggaatcaaagatggcaaatcnnnnnnnttgagagatgctatagtgggcgtgtgagagagagagtgagaatgctattagactttgagtttggtggctcaatggcttggaagctagaattagacgtaggttttcagttttgagttaaggctctttctataggagagcttaaaccctaattaactgataaaataagtagatatttacatattaaattgattaaatacaaaagactaaaat

SEQ ID NO: 25134 - DNA, 10712 bp, Cannabis sativa
  modified_base (6566)..(6572): a, c, t, g, unknown or other
tggtaaaatattcccaacaaggaaaacccgcaaccaaaagaaaaaggtgattagatgtttataaatttgtttaaatttttactgtgtatgtatgttttttatgtatatatttcatttttgttattttttgcaggctgggctagctaatacccatgtttcgaagcaaccagtacgtcgtgtaacgcgttttggcgtgaaatttatggcttcgaagggtactagtccttcgatttatgaagaattgattaagaaaaccacaagtttttctaatgtggtaagtatttaaagtttttctttttacatatatatatttttctttttatgtgtattttttatttatggaaccaattattttttaatcatgtttttgttattcttttgctgttagttatttttttttcatttgttgcattgtctaaatctttttataactggttattttgcagaatgtttacttgaaaatgaaaccagaacatcgttttgcaagtaaactacaaatttggaataaccattgagttattgatgagctaaatggaaatctgaccacttctcaaaagacattatttatgacgatgcctttttctcatttctaaagatgggcagtattaagtggatgattttcttacctcaccttgctttagtgagggtggttcatcaagagagggaggatattgagaagtggtttctcattcgcgatcgagttgtacgctttgggttggaggagtttgttttgattactgggttaagtccggaagggccttccgatttgaatgaatttaagcagaagatgtcattcaagaagaagatgtttcatcacctgactattaaggttgttcaagaagaggttaggggtaggtttttgtgtggcgattttgatgatgatgttgatgcggtgaagataggtattgtttttcttttaagtcattatttatatggttatgagaatgggaagaaagttggtaatgagttgtttggttttgttgatggggagctgtcaaatttaaaaaatattgcatttggaaaactgttgtaggacaggacttttcatcacatgaacttggcttttaaggatggtgaaaatatcttctttaagattgagaaggccaaagatgaaaaggataagtgtcattcttttaaatttcaagattttccatttgcttttcttatttgtttgtttgagatactgccaagccttagtcctaagtactgcaagaggattgctaatacatatctcgattgctgaactaggagagtataaacaagaagaaaattggaggttatttcgaacttgtgtcggagatttttaacaatcctgaggtacttttaaattttataactggttttttttttccttattgatttataattggttttttaacttgttttttttttcctattttatcaggtcactgtgaaggatttctatcctgttggtcatgagcttaagaaatctgcaatgtaaaaccttaagttcgaaccagtttatctaccaaagaaacctccaggtttcgatgggaatgtatgttttctttgtgtttgtgtttatgttttgtgctttttagtttgttgattttttttgtttattttatttttagttagtttttctgatttttttaattttgttatgttttttggttgtttgttttctgtttgctaaggtagagtctgctttggtttgtatccaagaagaccagaagaagattatgttgtattaaaagtttgaccgatgagtttagtattaagtttgatgaagttattgagctgttgaagagtaagggtgggtcgtctgtgcccaaagatgtggatgataaggttgaggattcttgttctgcgaatcttaaagtcgatggcaatgatggtgacttaccggatccattgtccccagaggtattttttcttcattttgttgttgttcagtttttataactggttattttactttccatttagtttttgattttttcagttttttttatgttgtagaaccggttttttttagtatgttcttttgttttttaagtgtttttcttttttagaaaccagttatggctatgtttttctattttttaggtatttttgaaatctaatgttcctgattatgatgatgactctggtggactgcaattgtcgattgtacgggaagataaggtggtttgtttattcgttgttattagtgatgtcattattataactggttatttttagctttttatgtttttcttattcatgttttttttttttcaggttcattttggttttgttgaagggaatgatgagggctttgtgtttacttatgatcgtgttgatgtcgaccaattcattttggatttggttgacaacctcactcgggcatatgcgtcccctgatgggataaaaaatgatcgatgggagttattttccaattcctgaatctgcatcccctcctgttgatgatgttgaagtattggatgtagtacccttacaatctagggttgctgtcaagaggcaagcaaaacctggagtgcattgtagatctccgtttgtgaatgagtttggttcttctgaaccaaaagatcaaaagaaggacaaggagccatctggtgaagaagaggtcgatcataaggagatgtttctgtttgtacgagagattgggatgaacacaaagtctgaagattgccaggaatttattaggtggattgaaggtgctcatttattgcagaagaagtatgaataatattttctattattgttctttttttgtttcttttttttttagttactgaattctctttttttaactggttttttttacttttggattgttttgttgtaataacaggaaaaatgaaaaatcatctggtgctattgagcctcctttagatttcaacatggcgtaaattgaagacaaatcttggtttgtcattttacaaacttgtgggcaaaagttattttatttggtacgaaactagttatttttcattctgtcattttttctgttgtttagttttttgcttgtcaatttttaactagttattgtttttatttattgtgtgcagtatttgaatgtggcattctattatcttaggcagagcattttattcgatgccaatgtgaataagagagtgacgaccacatgcacctatttcgatgcaacactgaagggagtttatgatgattttattaaagctaagcgtgatcccagtgttataaggtatgacaacatggttaccgactgtattttgggccaatataccttttgttttcaacattgagttggtgtggatgatgttgtcggtccctatcacgttactctgcaacaacattggattttcctacacttcaacattttgaggaggaaaatctttgtctacaattcaatgaagaatacaaagacaaatcaaaagaagattttaccagatcttcttgcgtattgcgagttattgccttatttcctagatttcttaaatttttatgatggtaggaacgatattagcttggactcaggcccttatgctgtttcgaaggacaccccaattgcttatgagtttgtggacaagcttcccactcaaagctcaaggtaagtaattggttattttttatcatgtcacttcttcaatttttagtgattgttttttttttctacttaaataactggttacatattttaattatttttgttttatttttagtgattgtggcgtgtttatgattaagtatgctgatttatttattcggggaaagattcatgagatttctccaaacatgaatgacatgatagcaaattatagggatgtcatgacagtaacattgtataactatggccagaaaaagattaatgaaggatattctaccgaagatatctcaaagggaaagaagtcgaataggaagaactaagagtcttgttaactaagtgacttgttattagcataggtataatttttgtagttttattttgtgttttttttggaacaatacattatgttatgtttatattttagttttatttttttataacaatgtttggaaccaatttcatatgtttatatatatacaatattttgtatttttctttggtagtacatatttttatgattttacaatttccatgtaaagtgttttttacattatatttttttttatatattgttttctttaattataaccggtttttttatgtttccttgactggcgaaggatctttgaatatttgaccgagtgtcgttttatatttactaagtgacttctttgaatcttttattaacggttcattgtattggtttagaattttgccaaagtttcactttttatttttattttatataactgatttcattttagttaattttttttataaccggtttcatttcagttaatatttttcttttctaatgttgttttttattctgaaccggttaatattttagtagtcttttatgtatattgtttaagtttattaacttgtttttctttgtatctattatatagaacttgtttcatttttattgattatttttgttggtacatctttaatatatctggtttcatttttattgaataattttattggtgcatgtttaatataaccagtttcattattttttttaatttttttttctaaggcaaatgtttgttttgaaattttttatttatttaaaattaatactggttaaagatataattcatattgaaaaatattaaaattattatttgaaatacaaaatctaatatagtattttttttattgaaattgtatctttttcttaaataatgctcttattgttgttgtttctttgctttcttgctccttggctgttttacttgtttttattttggtggtagagctagattagtgcatgtctttctgttgtggcctgtctttttataatgtccacactttatttgttcctttgactctccttttgatctcattcttcttctcctaggtctccctgcttgcttttttgtgtctggtggtagaactaacatttccaagcacttaggcagtgtccattcactttcatttggtaatgggtttgctgttgtgtcatatgttgcttttattttgtctattttgtagtagtctgcaacatagtcataaactcgcagtcctcttttcgagaatacaactattgcatgagcacatgggatttcatcttgctggaaccggttacattcacatgttttgtccagtaaattgacaatgaattttcctttctctagcatattcacttggtggagtattgttgtaactggtataacttgttattttaaactgaaaaaattagtttataatcggttattttatactgttattgaatctctctaatatatattttctatatatatatatttatgtttagtgtgttacctcatattttcttacttgaataaagttttctctcagtatttttctgtcacttttgaaacttttgtgaatgttccatgtgcttcattgctgtttgtccaaacttatttttgtaccaaacttcgaagactctctatcattatagtgatgggcagtcttcttgtagcaagcattgctgaatttatcgactcaactatgttggatgtcatcattgtgtaccttctggtcaggcagtggcatctacttcaatatttgtatcatattctttccagataaggtctgattcttttgtctattttgtcaagttctgacatgtaaacttcaaatgatttcatgttgtatgtttttatggctttaacaaagtttattgtaagatcttcctcgtgtactctaaaattgaccttaatgttgttaagcaagtggaatatgcatgctccatggaatatgtttgggtagacttttgttactgctttttctatgcttttgtgcctgtttgagatgattgtcatgcatgcaagtcaatatttgtcaaatatcagtttatgtctgttttaaccggtttctttgtttttattttgaaaccgattatttatgttaagtctaacaataataggaaaactcttacactaaagatgatgtattacctgtaaatttttgtttgaaccaatttcttaccttctctttctctgaatgtttctcttagattgttgaaaaaccactcccatgatgaatcattctccgagtctcctattccaaatgccaatatgaatatgtagttattagcatccattattgagactgtaaacaatgtccctacatatgttgttttcaagaatatgccatccaccacaatcactggtcaacaatgtatcaatcctctgattgaatttgacaatgctaagaacatgtacttgaatcggttcttcttgtccgtaatcaattcagtaactgtccctggatttgttatttttagcatatgaaggtatattggtagttgttggtatgagtcttctaactttcctcttgacaattctagagcattttctcttgttctccaagccttttgataacccatcgaaaccccaaacttatgtagcaagtccttcattatgtcattcggtgcatgcttcttgtttattgagtcctatttcttctttactatttgagcaatagtattgtaacttgcttgcctatgatcttccattatgacatccaatgagcnnnnnnngttgttgacatattttctaatcttgaacgtttgtgtttgtttcaattttgaagcgcgcagaaaccagttacaattttcatcaacacatgtaaccatgtattcccttggttcagatctcttcgttctaatttgaaagttctttatcattgcatagaatccgattgctgctttcagtatgttcttgtcactgtatatttgtcattcttcgatctcaagcaccatgtaatctgtgatgatctccatttcttcatcccttctcttttttattgcttcatttggttgctttattataaaatctgcaacttcttcagccattgcaaacatgtttggagagattgttatctaactattatcatgatttaaatcttgtccttcattatcaaattactggttgaatggttcattatgtatttgtagaaccagttcctccactgtcttgctttgctctagtattggttgttcaaaagattgattttccactgtttgtatagctatctcttttgtagttgtgatgcatagtggagaatcagttactctagcctgtgttttcttagctcaatgtagaacttgagggaattgtcaatcagtagcttcattagtgtcgttcccggtgatatctagtacgatatgtctatgctgcttctattgcaatttatttttgtttttatcagctccatcaagtatactagtgaagaattggtttgaattagaattccaatcattgtgtagtcatcataatttgtattttctctccattgaccccatatttcatcacacatatgatttgttccatacctagaattttaaaggaaaagtaatattagaatcttattttaattttttacttggaaccggttttatttaaattatatattattgttttatttttagttttttactggtttttaactgatttttttcttttatgtttttttttgtcatttatgtctttgattactttcttgcatttttaaaggaaaattattattagaatctaaatataattttttatttggaactggtttctttaaaattttatgcatgtttgttttatttaagtttttaactagttttttgaccggttttttttttgttatattttgtcagttatgaccttcatacctttttgtatttttaaaggtaaagtaatattagaatcttattataatttttatttggaaccggttttgtttaaattttatgtatcaatgttttatgtaagtttttaactgattttttttttcttgatatatatttttttatctgttacaactttaattaatttttgcatttttaaaggaaatgtattattagaatctgattataattttatatttggaaccggtttcgtttaaattttgtgtttgatttttttatttaagtttttaactggttattttttctattatattttttttttgcctgttatgactttgattatttttttcttgttgtttattttatttattattctttatatcctatttcattaatattatttttaaccggtttttcaatattgttaaatataaaatcatatttgttttatatataaggttgttcttagtttttttctcttgaattaactggttctttttgtttttttatattgacattttttattattttatgtatgtattctaaattgcagagttttatttattttttagatgatatatatattcttatataattattagaatatataattttgattattgagtttatatacctgttttgtttatactgagaattgttgtcgaaaatttgttactgtgtataatttggtttgatttttcattttctagtatgtgatttatgagcattgatttttaggtttacacagctgaggaagaggatcaaaaccaattgaagaacttaacggagctagagaagacaatcggagatgacgattgttgctgcaactttgttgtcaatcgatcaatattctggtttgtgagattgatttgctgtgtgaaatacttgcgtttgagatcgaattgcagactttaatggtcggagaagatcgcacgattccgagagtgaaaatcggagagaaaatacgagagagaggattgggaattcaggtgcattattttagaaaatatgagtttttttaagttgtctattgatatactttttggttttttatatttttgccattaattattttttttaaccatatttttttgaattatttttttctgccataaaaaaagtaaataacactaaaaattccaaaatttatgaaaatccctcaaaattttattatcaaagtacaaatgtaaaccttgaaaaagaatggtctactatttccaacccagacatgtggtctaaaccaggcccaaataataatggaccaaataatgtacctgatagtcaaaaactaagcccagataatattgggcccagtccaaacctcgtcaatgtatatctagggactagggttgggttatcctcttcacttcacatccttgaatccctatataacgcctttgattgtccaaagcatcatcatcgatacggcgcgcagcaaaggggagtttttcgattacttttctcctttgtctttcgtctgctcacttcattgtttttgattgttgataatcattatttgttctccttgaatttctgttgaggttttggataatggattcatggttttggttgctgtgattataaaaattcctcgtactgaatgctatagccatggcatgacagacacttttacacccatagaatatgagcaccaacaactcgtttttttatcaattattgcaatatttttagtacgtgctatgcctaatttacaggttgattttagatatattgggtaaccatgaatattattcatttgacaatcatggagcatttagcaatagtgctttgtgctcgaacagctcttcatatttttgataaaggtggtttttttaaaccccttatcttttatggcataagatcttcgcacacctccatattattagattcacatataaatttattattaaatcgatacgtgcacatagttcttcctggagccaaattagaaaatggtttctaggattttatttgtgcctataatgatgttatttcgttctgcttgagtcttctccttcaatctgtggagatgtctccaatgtaaacgaattacattttactttctaaatttaaagtatttgttacttaatttgttaagtaagaccggcgggctgctgctatgattataaaaattcctcgttctgaatgcgattgccattgcatgacagacacttttacacccatagaatatgagcactgcaacgcccaatactataatagcattttcattcttgatgagatagatatatttttattattttttaattgaggaatgccgaaaaagaatactatatcataacatcaattagtaatttttttctttgaactaagtaaaaaaatttccgaacttttgtctagtaaaaaattctaatttaaggggcatgatttagtacaaaaagttcacgacacgggtaaatatcattttgaactctgtattttacaaaagtttattttgttaaatgacaaaatggactatgtattttttaaaattctacaatagtacaaataggacctttaatttaatttttgacaagtttttttttttcaatataactaacttgaaaatacgaacaagtatagaatatgtaaatagttttgtcataacacttattattaaattatttaacaaaatagagtattcaatcagtaacttttgtaaaatatagggtctaaaataatatttatccttaatatatatcgaaataatactattatattattggaaaatttacatctagacccgtaaaatacatctcaattacacaaatgacttagcttctaaaattatcaaaattaccgttgtagttgtaccgttttcatactaattagtttttttttgtttataagttgctgagtgacctcacactgacactacaaggtttagtgtggtttttgcactccacacctttattatctctttgtaatgcacatttttttatttttactttttgtacaatatatctcaatgcatgtattaattattttgtcctacacacattgatttgttttttaactttagatatatgtaaaaaatatttagat

SEQ ID NO: 25135 - DNA, 2228 bp, Cannabis sativa
taaatatatagagaagttgtatggcttaatgtattgtaaaagtgtgaagtaaaataaataaataaataagaaattggttagataatttaaaatatagagtggaaaaactaatagatattggatgaggtatcaacatgaaatgccaaccaacaatcttttgaagaaactgtaaaatctatcaataatcatattataccttacttatgttgaaattgaaataacaaaaaaaaaaaaaaaaaaaaacatgattaggccaatcagatgacctgcataaattcataattaatgactgaatctccttttaaatgctttcagaataaattttagattattaatggttgtttcattggtcgatcttgccattagatttagagcattatcaagtggccattgtcctatatatctatgtgaagtagttatttgtccaattgaattgttgaaatgttataatataactttgtaataagtgagcaactacatcctatgtatcctatgtttgctttaaaactctggctttgctctgtttggttttatgagtttatggacaagtatgtccaaggatgatctagggtttttcaaatgaaaaaactttccaaaatttgaattcatattcgctaacgaaacttaataattaataataaaatatttataactagaaatgttaaggcaccggtaatgctcatcattattatgaaatgtgatattgttataattaagtacaattaattgagaggaaataaaaacaaaataaattaaaaaaaaaaagaaatgaaataaaatttaaaatgtttaaaataaaatagtctttcagtttattttaatttataaaatttaatttatttcgattaattacctgcaacccaaactcaacgtctaatgatagtcaatagtattcattaacaattaaggtttgtacatgaaattgaaggcctatcttatagaagaaattatattatatgcttatttgatttttttattttaatttttatcattatttttatattctttaagatatacttatttttatagatgatgttcttattatatcccttaaattaatataaattatgtgctaaacttaagtggagggtaagagtatacattggacaactcattcacaaaagtgaatatattttaatgaaatataatataagattatttttgattaatgtatacaaaaaatagatatttctcaatttatctctggggtgtgcataaatcgatctaatctaatgagaactgaccgatccaattataatcggctgccaaatattagatatctaattgtgatcatatcggattggatgttattttttaaatattcaattagatcgaatcagatggtggatggagtgtgcaaaaatccaatacatccaacatttaatcgaactgattaatattttcatttagtttagatgagcaattagattttatattattatacgtaaaatctatatgtatatattcaaattaacattaaaattttaatctttatttcttggattgaatggatccagtccaatctaatacatgctagacttaaatattagatggatctaatccgatctaaaaataataggtctaaaatattagataaacccaaagtaaactaataaatatatatatgaaatatatctattgtatagaactgctccaatttaacatctactggatgttggatcaattctattactaaaattaattagattgaatctaaataaatctaaaaatattagatgtggtccaataaacaccttttaacagtatccctattttatatagaggggccgctatatcatttattgttgaaaataaagactattttgtattttccatgaaatggacttgtaataaacccaacaaccccaccatcattttcacacaaaggagcattttattctagtccacaaaaatggtttggaatatggacctactttactatatacttaagaccccgattgctacttgagccaagcccaaaactaagatgaacattaacctaacctaaacatgttaaaacaacccacgagctcttgtgatcacagaatttccatgaccctttttcctatttgatggtctttttcaatgcaacttgtacctaaaaggctaaacacactttgtttttttccttctttttcttacttaaaattcaatcgcacggaaaagaaaaagaaaggaagatacatgttaaatcaactttttttctttatgaggattacattattaac

SEQ ID NO: 25136 - DNA, 1384 bp, Cannabis sativa
acagttaagcgtgcttgacctaaagtaatttcaagatgggtgacctcctgggaagtttttttagaaagcgaggacaaaagtatgctggaaacactcgtgttggtctgtaggatcagtcgtcagtccatgaagcagacatagtgacgtactcgtgtataagagctattattccgtaggtgtaaagacccaataaaaacttgaagcggggacgttacaattaaacttttaggctttatgtgttttaattattgaaatttaaatttagatttttttttattatattgattattggctaaaattaattgtggcaatctcattaccaatattaattagtaataactaataagtcattaaataatattgataaattgatgattccacccgctttatatgtatagaaaatagtattgctaacatcttttaaacatgttgtattgtgattagttaacgatacttttttaaaaaatattacattaagttaaatgaaactcgttaattaattatatcaatagtaatattaacatataagaaattactaagcaccattaatatcttttaatattttacttatagaaaactctaatattatatattctctctatagattattgattatttattttaaagaataaataaataattattaagagtagttttttttttattattttttttttgggaaattatcccatatactattttttttaatttttttcttttaaatttacggtttaagtttctaaagtgtttgcagcgctagttgcaataggaatttctgtacaattttttattgcaatttaggttgcagctttagttgtaatatgagtttttatataaattttcgtaaaaatgtaaaaaaaaaactgtttggagtgtaaaaatgaatttttttttttatttatttttttttatatctgaaaagagtggttgataatatcagtgtagcggcacctaatttttggtcaagtcaaagaagttaaaataaaaacattattatcgttatcaaatcacaaactatatacaacacacacacaaagtatataaatataattggtcgacatttgaggagccgcaaaatcgcattaaattctgatgatagccataactacacacataccattcaaaatatatattttttacacacaatttaattttgtataatagtacatcactaaaaaaaattattctaatacttccaattttaacatttaagaaatttttttagtttattattttaataatattatagttatttgtattttgtatgattacatatacattttttaaaatttctcaatatataattacggtatcgaaagtttattacacgatcaattatttttttcatatatataataattattttttgatattataaattatt

SEQ ID NO: 25137 - DNA, 4557 bp, Cannabis sativa
aaaaatcttaattagcaaaaaaaatataaatcaatttacataattacccttcaaataaattaaaaatatattttataattgataatataataattttatatttaaaatttatacatcttctttctcctcagtaccaaacaacataacatagaggaaaattattattctctcggttccatcactctccatccttcttacactttccatccttccaactctcattcctctttaccaaacatagagtaaagattgaatccccttaaatttgggatgattttatatttttaattttttatgttcaaaaggacaatttgaagttttactaaccaattttttctttatcatctaacaccaaacaagacaaaagagatcaacaacaatcatctccatccctcattctccccaccctctctaacctctccatccctctcatcaaacatagcctaaaagtttattattcatctttccaaaatttgatttttttttttttattttttttggcaaaagtatttctaatatacttgaaagttttagaaataaaaaaaataaatgagatctaaatggacatataatcgaatgctctagtgtcataactgcaatacaatgaccaatcctactccataccattaccattccattattagttagccaaaattaaaaattaattcattgataacagtctatttgctttatggcaagttcctacaaaaatctagagcatacacaaacaaagctgacaacagtattctcaaagattcttcagcttcatgcccaaatccaccaaaatgagaattgaaagaagtatttactcggtacaaaaacacacgattagacgatgaaacctacatattttcacttcacctttcttccaagcgtcgtagcaccatctctgcaaagctttgttgcctatacggaaagaaaatgagcattaagacatgtaatcagaaactaacttcgcaaaattccttcaattgttgattattttaaggaaaaaataagtggggaacgtgatttactttcgctctctgtgctttggactagggcgagagtgcttcagatatccatcccaaggaaccttcttaagacctgcccgagcagatattatgtctctcaccctgcaaaaaagcatgaatggtttaaacaaaaaatcctttgtttcgaagatcgtctaagcaagacaccatcttctctaatgttccaagaacatgcttattagaagagatattcacctctcagcaaactcaatgggagtttcccctggtctaagattttggggctccaagtaccacacatcacaaactacagcccacgacgtcataagctgcagcagatgctttgtgaaggactgcctgcaaagtgcaaataagacatcttatatgtgcctgccaatgttttcttcaacataatatcagaatactgaaatcaacaagacaaacgtttggcactatattctgttggaacgagcaacctttttcaaatgtaagcttgcgagcaagaacactttcttttcttttctattcttttatcttgttttttttactttgatttttcttgtttggatcagaaacatataagcactgacaattgtctacatgcagagtctcgggttcatcagattctttaaaaacaaaagagaggaattttctgaacaaggaattgttcacaaagaaaatgcataactatcagtagatgtcaagatcagtattcaaaaattagctccttactttctgctattccaaaaagcatcaacgaagattttattgtacttgattgcaactgggcaaactgaacatccgagttcaaacgcaccctaaacattacaaacaaattaaattagagatcttatcaaataagtaaataatttattcaaactaaaagcccaactgcccacattaacatgaaaatttcacaaagtatacaccgagtcactgactactaagcttaaaacatgagactggagagagccacaattaccttcttgaacatcacagtatagtggttatttacacacgttccttcgggaaatataaggagagggttatcagcagcctgcacatgatcccttaatctgaaaaggtataaagacatattacagcaccatgaacagtattacgataaaactatatttatcacactttatacttacttctttgctacaatttcacggtccttcgactctgtacgattgaaccaaatacagcccacactctccaaaatagtgctttgcaatagtcctttacaaggagttcagagagaaatctttattattggatgacatttgacatcggcagaaacaaaatgtgaagcttagtcacgaaaacttttaaactggcaactagaagaaaaagcagtacttataagtaaactagtatatatgacaacaaaaagactcaaaaccaagccctaaactttgatgaatcttttgaaagatttcacctctacagctgaatacatttgcaagaatagtggtgtaaatttgtccaaaaaaaacacaatagaagcctcacttctaataacacacttctgtcactccaaaataaaagtttgtagagcacataaaatcttcagtacaagattccttcaccaaatcaaatatgtgtgcttaacttcactaataattgtattcagcaataaacttaccaacccatccagcatgcttctgcataatgactgcaaatgcagtcatctgttctaagataatgaaatcaatcatggaagtatgattggccacaaaaacctgcataaaagcatgacgatatagatcaagactgaatactccaaaactcactgaataagcaaatacagaaataatagtccgtgtctcaaagattaaagtgacagtcagaaaacctgattgggccgcatgctaggtcgtggtccgtgatatttgaccaccccagtccaggatgcaacaaagaaggtacaaatcaactccaccaaaaacctctgggtagtggatagaaataaacacaatcaggtaccctaaatctactagacgaaagacactagaaaatgagaatgttcacctctatctttttccttaacttatcatggcccttcaatagaatgtgcactggaatgtatgaagacaggaatattatccaccctatcgtcaacactataaccctgcaccaacatgaaataaactcataaaagcaatatccccaaagtcgatactaaaatgcagttacacaaccaatgtagttcttctgatacgtacttagacaagactaatgctacagtattttactgatgtatatacagatacataaataattatttacattattatatgtatattcaacagcaacatgatgttacaaaccaaaatgacaaacattaacattattgtcacagccttccatgatggtatacattcaaaatttaaggatagaaaatacactgagctaacatgtacagctcttgcatgatagcaacaatgcatgaaaatcatcattcttttcaacaaactacttcagaacttctaacctcacaggaaagagaatgaaataacgaacaactactccaaaacaccatagtggaaacaaatatatattccagttccaaggctccggaggattcgacttgaagcatcgtgtaaatgagtcctggtcatcaaaattcaaaaaagcaaaaactcaagattcttaaatcagagaaactcgattatccatatcaaacccaaaatgaacacttacatccacaatagcaccagcagcctcagttagagttggtgaaatatcaagcaaatcacgactagaaaacaaaagagagttaattgaagcacataagttcccgattcattccctatgatttttctcgagaaacaaacagaccataagatgagagaaagagatttacaggcaaagcttgccaataggttctggctgaatggaggttccagatgggagatagtcttcaatattgggtcgatccaagtccaattcggagcttgacgttttgaattttccagtactagtgatactcatcttttcaacttgcctaggcctgtttgaccatgttgccaaaaatagtgagaacaaactgcagagtttatagttttaaggaacaagaggtgtttgaaaagtattttcaaagaatatctttttcttcataaatgttcaacttattctattatatttatacatttataattaaaatgcatttttgtaatatttgtgatttcttttcaacaatttagagcaagtactataaaattcctaatgcttaaacaaacttcagagtactagctccaaactgattaaaaagtaatcattactttactagacatcaatataaaagtagataaacaaaactgttcactcgtataaaaaatactccaactaacttgtattatactgtggcacatagtatttcttaagcgatctcaactcggtgccacagttccaactaatttattagatgaatctcgtacatatcttcactcttgtctactacctaccttgtgtttgttgcatactctcaatattcaacatcattaaggtcacaacaagaattactaatctgatcatacatcatcaatctccatatttaaat

SEQ ID NO: 25138 - DNA, 2089 bp, Cannabis sativa
  modified_base (1704)..(1709): a, c, t, g, unknown or other
aattggcaggattgcatattaaatacagaatacacttatcaagggatttggatagcttgccatatctctgtgatatgatcccaaaattatagggatttcttctgcgactcatgatgtgagtgttgaaactactaagtgttggcgtgctattcggattactcactgcctgaccaagaagacttcgtccgtgcgactatatgcgatgctttgtttggcatatctcgtgcgaacaaatatgtaaagtttattccacgtgtcaccatcgtgtgatgccatgtcagagtgcaaaattttggataacaacaatgataaaccaataagtgtttatctcaaaacactgcttaacagttacaaagaacaacctagggtttcctaccaaaccctgcagttcaaatacactaaaataaaacttatattttggctttaaaacatacaccatatgatagagctcattgcaagctttgaaagtgtatatagaatgtccaatacggacacccgagtaaaaaaatttggcaaaaatatgattcccaagttctcgaggcagcccggcgttaaacggttaaccggtttgccaaaacctgttaatcagttcccaaccggttgacctgttggtcagggatgagaaatgtaattttccaagtttacgcactcactaaaatgctatcggaacctgtccaaaccaccccaaacttcatagggcacatctataccatacatactaatatacttttataatagaatctaaaatcgagcccttatttggaaaacgccactagtgttcggacttaagatataaaaagttccaaactcaatttctaacttaaaatcaccacaattttagcaagaaagcatctaaactagtcccacgagtacccgagaacaatcctataaggttagaaatttcatgactattctaattcgtaaaacccgtatacaaaaccaattgttttaaagttaaaaaggaattaaatcttaccttaagctttcctgctatgagaatttgccatccttctactatcgaagcttagatcgctaggttttgggctaaaaatcaaagaaaattaacatagggggagagggtttcgtcgaaaggaaaggatgaaggtacgttctatttcgttgacctattatacacttataaaatattatatgtataatatactagtgcgttattaatattaatattaataatataaaaatattaatattaatgttgttctcccaatttttgtactctgacgtggcatcacacgatggtgacacgtagagtcgactctgggtacctgctcgcaagacacaagccgaacagagcacctcatacattcactcagacgatgtcctctagaccgagcagtgagcaatccgcacagcaggacaacacttagcaaattcagctttcgcatcgtgagtcatcaaggaaatccctataactttgtgatcagattacagagatatggcaagctgtccaaatcccgcgattagtgtattctgtatttactatgcaatctttcagcttatatcaattgtaactagaagggaaatacttcctctcccagcttatagccctataaatagtgattcatactcactgggcaaaagggtcgagagattttatctaagaattcatattcagagatactgttgtaagagctctaacaacatgaaccattttccttgttcttaagtcaatacaaataacgaggnnnnnnctattaccgaactgctcgaggctgaacctcttcaaaattcttgtgtctatatttgctttattatatttcattcatatcaaactacttgtcacttacaaaattagactcattgtcgttggctaaaagcgaggtcaataaatgtaatattattaataattatcttatcatttcttagtcgttaagaagtctatacttctagggctctaagtcaaatcccacatactcctaaataatccaataactatattgtcaactaatcgcaatattcccaccaattctatcaattaaacccattatgacatttctgtctcctgatcgagtctccaaggtcgccaaaccttaaaatatttttattccacattgttgaccgaggttttcgg

SEQ ID NO: 25139 - DNA, 5327 bp, Cannabis sativa
  modified_base (1422)..(1432): a, c, t, g, unknown or other
tggtgcctctgtagctttcaaccttgacaacattttcagctacgaattggcctcaaacaacccacaaaaaataggagtttaacttcaattatttatattctttagggctataattaatgagttattttcttatttatttaatgtataataaatatgtgatatttcctaattttaagggatatcaacttctatctttggtaagctctctcctatataaagagtactaggctagacctaaaagctattaagttctcattgctaggttctcattactaggttctcattcctaggctattgagttcaagtacttgaaaccctagctctcactctcttctacacgccattagcattgtagtagagacaaagttccctaatctcatctacttgagaacggcctcacattctcactattgtaatacataaagagacactctagaactcacaacacttgtgatctaagtggtattatctctcatatcaatacaactaaaaatggagtaggtcgttacccgcctaggggtcgaacctctataaaattattgtgtcctttgtatttacttattctaattgtgtacatgtagtgatttcgatcataaatatgactctaccgtcagttggctaaatttgaggtcaacaatttggtacttttattaggagcattgtctattgatctgatcaatcaccatggctataacaaggagaactccgactataacttctacctcatagggtcttcctcaggacctcatgattgttaatcctgatgtttgtgttccagccaatactggagtttccacaaaccaaacagatgtagccaatcctaccaaccctgccagcccagcaaacccaacaaacttgaccaacacaactggtctagttgaccctgctaacctggctgatcccaatgaccggtctctgttgcccagggtagatctgccattggcatctcatacatagggttttatcaatgtggagcagcccccacacactatgaataactttggtccctaatatcatgttggggaaacgaggctgagaattgttcaaccagtaattggtgagcctcacgtggacctatgagaatactttgagttggccagacttagagaggttgtatccttgtgcggtaaagttattatacctacataattaattacaagttatgtccattaaggtgaatttttaattagtatataattttatataattaaagatgttatagctactccctaattatttaaaattatattttttatttagacattaggtattgcgctctacttaaaagcaagtttgttattaacacaatagacaaacattgagattagggctcctagtgtggtcatttgaagatcattaaaaaccgttctagatttgagcatttgtcttagtttcatactttcttatgtcaaaccacaaaannnnnnnnnnnttattcatattttattcattttatgagcgtttcgtgaatattttatgaaattttatgaaaattaatgtgctaaataaaatatcaacttatatatctagtactatatatagaatgtatatacaacatttaaaatatataaattttaattaattgcactaataataaattaaatgataaattccataatttgtaattaatgacagataatttttaaaaataaataatttaaataacaaattacttgatttgataaataaatataattattgaataacttaaagttttaaagtcaacacaatcattaaaattacatgtctaaataaaattatgtaattaattactaaattatatttttccaattttaatttatattaagtaacatataaattctaattttatgtttctaaataaaaatgaaaaattacataaatgcaatttattgatcaagctaacaaaaataaggaaattaattaatatttcaaataaatgaaaatttatttaaaaaattcaaattttttttttttttttgaaaattatacttctgaaaatgacatgtcatttttcacggtatgtggaaaatgacttgtcgtatgaagtgttctccttcctctgtaatgggttgtcttcacccgattttctgcaagtaggtcaaacggacccgtttcaaaactcggcctaaaaacaccgcttttgacactaattttcatgtttttcattccagattgatgaaaaatgaatatatgaagagattcaacacatttttaagctaaataaacatgttaaatttaattttaattttttaaaaaataactctcattttactaatgtatacctagattcaaaagttcaattttcatgtattttgaacctggttactcatgcataaacatgagaacaataactggaatattaatattataaatatggtaaaaaataaataaaatcaaaacttcaaaatcttaaaatacaaatttatattataggattattaatgtgatatataatttgaaaaataactcttaataatgaagatgacaaataaaaaaaaattggccaaactactacatcaaccaatatatgaaatctcaaaatattgaacatatttatatattatgttctcaaagatttattttacataaagaataagaaaattatactattcctaatgatgaatatactttaaaaaaaatattaactagcaaacttttgagcaattcactataaataagatttcattaattaaacactaataattaaatatatgtaaataaatcaaaataaagataaaatttgctctgataccaactgtaagatattttatgaaaaaaaaatacaacatatgaatgtgtatattaaatgtaaaattaaatgaatatttacacgatataactaaatgatcgaaatacctccagccattaattctttgagcttcaattccacacaagcattagatctgcaaaagaaaagaaaactaattagtgtgggtaatcgaacgtccaaactttctctactctctttagatagatttactattttcacagaatgagtagtgagcttggggaccgagaccctatatttatataagtaagacaatctatcaaaatttctaacaaatttaattgtcaaaatattttaacaataaattaggaaataaattaattagtaaattgtaaaatgatcatatttagaatatttactcttatcacattttaatttgtgacgatagagtgagtgaaataaaacaaaatcgatttaaataattttgtatatttaaaatattctaatatccacttcctattttaataaggcaaactaatattcttcttttatctatatgatagcggattataaaataatttatattctgaatataaaagttaaattatgtgacagacataacacgtataatcagcattaacaaatagttcaaaagttacacaagccacaaaaatatttttattttgtgtggaaaacttatgttgggtgtataaaaattaaggaggagttgcatgtagagaaggatggctatgcaaaagaaggcatttttgtaaatcagaccctgaggaatgaaaaagaaaaggacaccagatggtgacaaatcttgagacagcctttcatattcagtatcatgcaaaatttcgaagcccactccactgtctactctcaaacgaatctcctctgttccaaatggacccccctctccacacactttttatttcattcttaaacaaaataaaataaaataatccaaaaactcaatagtttcgtgaacttggagcgtttcgctagctagtctgtgtgtctacattctacagtctagtcttactttttaaagagagaaaaagagagagagtaaggaactcatgaaaatcaatttagctctctctttccatatttgattgtttctccaaaacactcaaacagtctttcaaacaacaaaaggaagattttgctatcatacataaaaatccaccatttctttgaatacatatatctatctgaatatctctttttaacctttaccttctctagtttcagacacaaatataggaaagtagggctttcttatataaagctttacaaagccttatactgaagttcctacggccactctctctctttttatttaatttttttctcatttttacccttggccataaccaactttagtctaaaaactcatcatcatcatattctcactttctcaaatatttaaagaaagaaaaagaaaatgatgtcgctcactacttctatgttagtctttgttctagttctattctcgtccaattttctccactcctctcaggctaacattctcgccgaaccagtcagtggccacgaccagcctgtcaagcccggagagtactcaagcccaaacacggtaccggcttttccagtccagacccaagccaagacatgccgcctggacctctccgacgagcttttcggcggcgttagggaagcctgcggcagagacctcgaccgcagccgatgttgtcccgttttagcggcgtggctcttcgcagctcatgctaggtcggctcttgagctgtcttcggctgcgccggctccagctgaggtaggtggggagttgccgatgatgccggacgattctcaaaagtgtgtgaactcgcttcagagctcacttttaagtaggaatattcggattgcgcagcctaatgcgacgtgcgatgctgtgttgtgcttctgtgggattaggcttcatcagattggctcccttagttgcccagcggcctttaacgtctcaggtcaccataacgccacgcctactgctgccgttaagaatttggagaagaactgccgtaactcctcttattctggctgcactaagtgccttggtgccctccaaaaggtaaaacttaatttacttttacacatttcaaaccccaatacaacaaattattttacaaaaagtgaaaaagcactctttcttgcatttgacaaagaaaaaagaagcccagttttacgttgaaaaatctatgttctgcattgcatttctaccaagtgtccacttgtatcaaacttcaaatcatgaagaaattaattgattcagttttgctttcttgcttgatacatgcaaaagtattttctaattaatgcaaaatttggcttaattatgcaaaataattgctggatattttttttagttctgaaattagatggaatattatggtgatagtgccatacagactgtcatgagctcagaaaagtctaatgaagatttgatttaagcagtggaaagaaatctttacattttttttcccgacaaatcaaaccaaaccatcctagttgaccgtggaaaacgacctaaccaaaggacataatttttccaagtcccatgtgattttgttaacaaaatcatttttcaaacttt

SEQ ID NO: 25140 - DNA, 2220 bp, Cannabis sativa
ttttttttttttttgtgattgattatcattaaaaaatttcaagctcctataactttatatttaaaattctaattaaaatatgcattttaaaaatatccctaacacttttttagctatataattctaacaaattttttttagtttaaaattcattgtagacaacttttttagttgattgtttcttttaaaaaaaaaaaatagtgtatatgtttaggcacttttttttgttaaaatttatatcatagtaacattatatatagaagaaaagagtaattcttttgtacaaggatgaactatatatcataaacatatcaatttttgagatgacaatttttaagagtttctttttatttttactgtttttgttttgtttagggtagaaagcttacattatatgccctttctctatacatatctcatgaaattacatatatggtaaattgtatatttattcatattgtttttctacaagtcacaacttaattatttttgttctattttttaaagtaatactaagatatatatatatttatatataaaatatttatcaatctaagcctttcacataaattatcactttaaaatcgtatataccattgtgtaatgatttaaaagtatttatcataatcaaattaataaaaaaaatttatgataaaacatgtatataaataatatatactgttaggtttttattgactccagccatcaatttactttttattttttatttttgtttttttgagtttttttttttttttaaatagaatttttgttaatattattatacaagtattatatattagtggaattgaagaattttttttaaaaaaaataattattttcttcacaaataaataatagttattattatattaacatttttcattagtatctattataatatttatgtaaattaagtaccatttgaattaatatttaaattcaaattttattagatatttaatttattattttttattctactttttaatataatttatgattatcaaatttgtaaattttaaaaataaagaatttaactaaataattaaccataaattaaagggattaaaatgttcattaatccaaaaaaaatttcaccaactccaagagagtggaagttataatattaagaagacaactcttaaagaagacatgttcatcaacaagatgactattcaaaaattattagactgaatggagtgatacggtgatgaaagagggtgagatacgatattttaatgatacagtgagaataatgagcgagatacggtaaatatatagtgattggtgagatacgatgagagataacagaggatacacggtattgaacactctaatacggtaatgacaacggagatacagtattgaatgatcagatattgaaatgatgcattatatttataaaaaaaaacactattttttttttctaaaccatcctatttacttatttttataataataatttttttaacaaagtaattcaaaattatacatgtaatatatataaatagtataaatttaaattttataatattaaataaattaaataataataatcaataccaaataatattaaattttctataaatttatcaagtatctttttttttttaaatatgtgaaatattttcaatttatagtatatttttcacgtttgaggatatataatgatttttttcataatattattttatttaatgagaaaaaaaataaacaaaagtttattagaataattacttttattattaaaaaaattaaataaaaaatatcaatttttgaaatttgatataattttatgacttaattgttacaaccgtacgcgaaatgtggtttgtttcctagtctatatataaaggagaagtatgaggcgaggacatgacactctaaaaacactccaattaactctatctatcgctcatttaaagtaataaaataatactctaaaatcactttttatctaatttttaatttttaattatttttatatatactaattgaataattaataagaaatatatttatacaattcaaaaaaatttcaaataaaattaatactaatcgtgtacatatctcattttttaatattttttttaatatttatctattttttcctaattttttaaaaattattaatctatatatatttgattttaactatatatataatatacatacaataaatcaatagtacagtacaaaatttgtgtttttcatatc

SEQ ID NO: 25141 - DNA, 2925 bp, Cannabis sativa
aagttttttcatcattttcgtatttaccttaagcagaattatgctagcttactgagtaaaccaacattgtagtagtttctttcaatcaatcacccttttaagagtagaaatatgctttactttacctttcggttttttttggcagtgatcaggtcaaggctaagataggatcttcgcttagacgagtttggtcaaagcgtttgaaatggaaacgatcaagagacaatttttttcattcttgggcgaaaagcatagccgaggcagctaaaaccggaggacatggagaagaagagttagattgggaaagctacaacaaaataaaacaagaaatagttgataaacaatttcgtttggccgaagaaaagattaaggcgaaggagttggcaaagatggagaaagcatcacaagtgatggcgaaaaggatggaaaagcttgcccggatgagagaattgcgcgaagagaggattaaagagaagaaagaacaagaaaaagtaaaaagaaaactaaaccaagccaaaagagattcaacaaaaaagttgaaacttcaacagaaattaagccaggtaattttcattcatggtcataattttttattgtcatctataaatgaaaattatcattacacataactcaagcaagaaattattcaattaattggctttgttcaatagttcctttgtatgagagaatgtttcactatcttctaatatgacttgtaatattaggataaaagagaaagagagagattgcttcagcctctatttaagattttaccctcgaactattaccactatcaaatcatgctacctgaatttttttctattaaaaatttctcccgaattattcatagtgctgatatataagagtccatataggataaaatttgggagtaaaattcgctcggttatggtcggttttactaattttataaccgaccgtttagaaattataaccgtataaaactgaccgtccagtttttagcaatttttcagtttagcggtttatggcagttttgacagttttttggtttaattatttttttcaaaaaccaaaaccaatcccatgtcaaaaaaaaccgtaaccaaaaccgactatcaatttggttgatagcttggaaccaaaagttcaagtacggtctggtcagtttgatggttaattttgctttttcagtttttatgaacactcctaataaaaattaacaaaagttttatataatgttaatagttgagaaaaaattcaaatggcaggatttaggagtggtaatagttcgtgaacaaatatcttaattagtctactttaaaaaattatagtaacaataaaaaactgagctaatatttggactttgattgtcttcttatttgaaagtgaagaaagaacataaccatcatagcatatcatttagttcttcccttgtttcttcacatgattgagaacttcaatgcttctatacagattcgccagaagattccacttaacggtcaagtctctaatcgaagagacggaggagctactttgaacattccagcatgggagaaattggatttaaaactcttaaagagtgaagttttgcaaaaagaagtttctttcgccgaacagttaaaagccgcgaagaacaaaaaagtggaattttcaactacagaatctctctattagaatgctcattcattcttccatggttccaacaacatatatcatcattggcttgtttctaactaactcgaatcggtcttctaatcgccctttgcagcttactatcattctttaaagttaaagattagaatcggtttgagttgccattgctatcgctgctgctgctgctgtttcaaggcatcatagctcaccagagatgagatttcggttagagtcaaagttcacttcttgtaaattttttgtgtcgggcattcgctttcgagtgacatgaatgaaaagagttagacttggaaagttctgtttggttgatgagaaaatgtgttggccttgagtttgattatagatagcttatgtattatgtaatgagtttggccttgagtttgaatggtctttttatgtttcatttttcttttgaagccaaaaaaaaaaaaagaaaaatggcaagagaaaaaatgagggcaaataattttctttttcttcttttaattaaaaatttcattttggatacctttcaagattcaataatctcacttgtaacttttatttacttaggataattacttctattttaaagaataatgatatgtgaacaataatatttattagttagaataatttgtggtgtacatgcttaaatttaattttttctagtaataatatttaaattatatttttagaatttccgtagatacttgtacgttaagtaacaaatcattatctacgttttatttttttttattgatatatttaaattactttttaaattaaaaataaaagtttaataatttgtaccaatcaaaaagtattacgtggtcatgacacttaacgatcaagtatctatagaagttttaaaaatataacttaagtattattaacgtcaaaaattaaatttaaatatttatctgcaactaagagtaaatatatcgcaaattactcttatttgatatggacatattatttctttgacaatactaaaattctttatttacatcttactaaaatttgaacattaaattatcaccatcttatttactttctatacacttttactaaaaaaaattcattttgactttcccaacttcttttgtatttctataaaaaaaaaaattacggtataaatatttaaatttaatttttaagagtaataatactaaattataattctaaaacatctgtgaatatctagttgttaagtaaaattaccacataataatctcttatcatcattaaacttttttaaattaatttaattataccaataaaaaataacatgta

SEQ ID NO: 25142 - DNA, 3875 bp, Cannabis sativa
aattaacaaataagccctaaaattctatttcttcacaatcaagccatatcttagttagggttaggtgaggaaaaagaatgagatgaggggttttatatatgctcttgtaacttgaatttaatgtatataaatttttattttttattattcattgtagtcaacccgtgttcggttgattgccccataaaaggcctgacccatttccaacccttattatacgggttcaagatttctacactaattgaattttggcccacattcagacgagctattcaatccatttttcggtttcggtgtgctgtgttggtcggcctaacgggcttaatgctcagccctaactataaatgggaatcattgttaggtttcttacttatcgattgtctgattagataatgatagagatatatggatgccaagttagggcattgacttgactgattaggcaatgtgatatatgaatgctaggttagggtattggcttgcttgattatgcaatgtgatatatggatgccaggttagggcatcaaattgattcattaggcaacaataaaaaatggttactttatgaagtaacagacaggtttgtattattaaagaaatattggcatattatgtaatatttatactgatgttgattttaaatgagtgtctatattgacttggacttatgcatgcaagtattgtacgaatgttgattatgagaactttataatgtaatggatatgacttatattataagctcagtaattctatattactaaatatttttatactaacgtttatttgtgattgatattagtggtaatctggatttaattttatgagtaatgtgtgatcatttgatcttgattgtctgagtaaaaatgataatatctaaataataaattatatgattattgtttttacttttcttgctgagtccttatgactcataggtgctatgtgatgcaggtaatatgtagaaacgtttggaaaacaatgaattaggaatcttctccagtaagtgtacatatccgtttatttgacaagtggtgctaagttgtcaggaattgtatttcaattgttttgaactttttttaaatgtatttttatgataatattgtaatgtcatgtcttgtaatatttcaaatagaggatctccaatcataaaaaaaaaagactatgcttaaatttaataatttagattagttaacaaaaatttattaaattgtattttttttcttaactcctagcaaataaaaattaggtgcgaatcggcgcgaaagttttgccggcatgatatttcgttggtaaaccttcatcagggactcctctgccgacaaatcattcccggagaggaacttatggtagtaattcgccgggataaatagttttaccggcgagttatagtgttgtgcgcgcaaaataccttatgtcgacgaattattgccaacatcttttgccggcgtaaaagctcgcttgtaaaacaatatcggtgacatatgtatacttttgtcggcaagaaaaatcgccggcaaaatcctttttcttgttgtgattgattgattttatacttaatatataaactattctaataatatattaatgcatttgcggtctaattcaatttttatttcaaaagattattaaatatttttaaaataaataacaatagaagtttaaatatcaaaaaaaaactgtagaaatatatttttatttattttagtttttataattaaataattactatttaatttttttcaattttgaaattatttaataaaatttttattaaaagtggaaaattaatcaattgatatgtgtttgttttgtcaaatttaataaaatttgacgaaattaaaattaaaagctgcaacaaaaacatatgatgtattatgattaaaagctctaaatttaataaagccccgatgaatggcagcacgtattggcaaaaaatggttgaagtaggacacttttagagaccaaaacacattctttcaattcggccagagtgaatattctataccaaaagggtattcgtttctaagacctcctcttccgcgagtctcttgagatgctattatttggattcggttgaacttgcctaaatatagtattattatgtggttggcaatgattgatagattgaaaacaaaagtcagattattcaagtttaaaatggtagacgaaatacattgtatgctatgtggggatgataatgagaaaattgactatttatttttgaatgttcttttagccaaaggtttgttcaaatgttgaaagctcttcttgggtggaatgtgaatcgcaaccatctagcacgattaattaagtggattaggagagctcccatatcaaagttttggaagttggtattttcgactttttgggctgctacggtttactcaatttggcaggcacagaacattgctttgtggcaagaccaagtgaggaagccaaagttactcatacaggatattaatcggaatgtaaaacatagaatatatagacttactccaagaaaaaaaaaaaaataataaatagcataaataaagattggtttgatactttgtaaaagattctttttgtatgtaaaatatagtatttaatcccttaaaaaaatagtatataaatgtgtaaaactataaagatattacaaaaattataacacttgtaaataagtgtataaatgagcttaattaagtgaatgtttttttttttttcattatttaattaagtgaatgttaattggaggagtgttactgtcaatcttctgttacaacctcttagtcaacttttaccatgaaaacatatgtcggaatatattgattttgcaaaaaaaaattcacatgggtgttcgttatgcttacaacatcttcctataaatttttgaaaattttcgaatagtttacagtgctgaaaatacgttataagttttttgaacgcacgtggtaaactggaatatcaggaactgtgttttcggtacggtaaactattaagaatttttcaagaatttaattatagggatgatactgtaactataacgaatacggctatgaaaaagaatttaaaaaaaaaaatatttcggcatgtgattttggacgtacaggttgactaaaaagttgtaataggagattgtaattagtattccactttgattcgatggtgagaagttgcctaagtttaagggctctattaactaaatcactaactgaagtgttaattttccaaaccatattaaaccacaactagttcaacctaacatcccatttaacattaaatgttcgttaatattaggcgcagccgagagagaaacttcatgtcgaaataaaatgttgaaaatgtgattcatcatttataattttattttttcttcttctagcatctacacatttttattttccacatcttctaaaaaaaaattgaatacagaattgcataattttgttcgcatcttttccattttcatatagttattatttaataaaaataaaattatatttaacattctttattgaaaataatactaattttcctttttaaaagtgtgaattgtattatttcaaaattacttaggtttattttgctttgcttaaagaaaacgtaccatttataataaaaaaaaataattataaaaatacagatagcagtatataataatttgcatacaaagttgtaattgggttagtttggcacaactgtactgtggaaaaaacaattataactgtgttttgagaaaaaaaatagttgtaacagaattgtagaaaaaaaaaaataaattgagtgtttagtaaattatgaattgttaaaattctaatcataatgttataatctagttcattataataacaaatatatataaaaaaaaaaattatattgaataaaatttttatttt

SEQ ID NO: 25143 - DNA, 2921 bp, Cannabis sativa
ttttgacactatatttaaatttgtacattgaagatgccttactaatttcgttacccaataatgaaacaattaattctaaatatatcgaaaatataaaaaggtgcattggtgcaaaaatgagtgcaacgtggaattttggtgtattttagatataaataattggttaaatgataaatcatatcatataatataattaatattggtttgagtttcaaatgtgtttggttttgatttgatatagaagagtggacttgtgctcaagtgtagttgcatgtttgtttagacccaaaaataaataacacaatttccaacggacaagacaattatattattaatattcgtttgtttatttttaaaagttagtttagtttgacactaaataaatagatttaatattaaactctacttcccatccgaaaaggtcttttatttcttaataatttctttttagtgggatgtgatttaatgtgatacaattttacatttcatacctttcactgactgtcctccttctctaacctaatcaccattatatatttatagtgtaaggccttcacaataatagtaattttttacatttcatgtttagtatgaggtgttttttgttttgaatcctgaaaagttatttcataagactatgtttggaagttaaacaatttttataagaaagaaaaaaaagtaagaaaaatatacgaaaaaaaatgtggagaacaaaaaaataaattaattttttaagtttgaaataaaaatttttgctgaatcaagtgttattctatacaatttttctttctatacaaaatactattattattattttataatttctctatttttttttcttttctcattaaaattcaacttttaaacatagcttagcacatggccttgctaaccaaatggtcagttctctctttgaaacgcattgtaatgcctgggatctcttgtcaaggatatgttcaaccaacgcgatggagagttgatcattggcattcccttaagctcttcatctgtcgaagactatcggtcttggactggcgaaagatctggtgagttctctgtcaaaagtgcttatgatatgctgcagaatcaaaaacatggtcgtcacgatgcaaataattcagggttctggcataagctatgtcatcttaaaataccacccaaggtgaagaatttcatgtggagaactgtgacaaatactctacctacttgcctccaattgtatgccaaacatgttgacatatctcccaagtgccttgtttgccaccgcagtgcaaaaactgtctcccacatacttttgagctgcactcttgcaaccggctgctgggacaaagccaagctgtttgctccgtttgactccacaacaagtattggccactggcttgaccatttgttcaagaattatgatgaagatgtctattgccgtgctataatggtttgttgggctatatggacggcacgtaacacactggtttgggacaacaaaatctcttctccaacacaagttctcacatcagcatggaccaagtttaccattggcgcaaagctcaagataaaaactgtttattatccttgtctctacagcataaggataataacattgagcgatagattaaacctgatttaaatacggtcaagatcaatgttgatggagctctttttgagaaagagaatgcatatggatttggtgttgttgcgcgtgactcagctgggaatcttattgatttaactgtcaaatatcaaggtggctcttatgcaactgaagttattgaggctgttggcattaaggagggcactcagttggataaaaggcaaaggatggagtaaagtagaagtggagactgatagcatggttacgattcaaacaatctttagtaaacaacaaatgacttctgattttggtttgattattaatgattctagaattttactgtcagctttacacaatgttagtcttcgttttgttagacaattagctaatcgagtcgctcactttgtggctaggcggtctcggtttttctctgattgtagcattcatcggaatgttgtccctgatgatcttcaaaccctcttgtatgataaatgctaaatttcaatgaaattgatatttcatgttcaaaaaaaataaaaacatagcttagcataaaaaaaatatagtatctaaacattcttttcagtcttaatataatgggagtaaaatattaataattttaatataattatttgcaccaacaatttatgagatctatgtgctcaactaaataatataattcaacaaatagtaatatgattaaatatatcttatccatactcaaatacagttacaactatctgaataattatatattctattttagatttcacttaattaagggtgcgtttggtaattttttttaataaattttcttttttgtttaattagaaaagtaaaaatatttttcaaaaacatattctatcttttcatttttcaaatttttaattgagaatcaaaagtttaaaattctaaaaataaaaaaatcactttcaaaatttttttaaacagtttttttatcaatattttggacttcaactccaatcttgaccttgggacccgaactctagtcccggccgcagttccgagctcagatcacgttctcggccccagacctagacgtagacccgacttaaataaaactaaaaaatggaaataaaaaaaaagttataaaacacacttttattttctatttttaacatatgtttgtttttaaaaacacaaattttatattttatttttgtgattaaaaaattaaaaaaataaaaatattaacaagcaccccctaaattattttgaattaaattttcaatctatatacttatataatgttgttgttagggcatgtgaggtggcggattatatgagtattctttctatttttcttttttct

SEQ ID NO: 25144 - DNA, 2825 bp, Cannabis sativa
aataagttttcaaaatatataagtttttaaaataattttttttgcacattttttataattatattatttttattgtacgtttataaaaaaaaggcccttcatacaaacttcaatgaacaatgaatatattaagacataaatttgattattaaacgtgtctaataatctagaacatcatggacgtggtactccatactcactataacaaagaaaaaaagttagttttgttttgcctatagtaagtacctgatgcctatagttttgccatccggacgagccagcaacgagaactgcccatcgggtcccactgtttggtgggtgatcaccagaattaatcaagtttcggaataatgtgtgtttcgacgatgatgcatcaacaacactaattacgataatcaaaaagcttataattgtaacaccaacactatacttgccacccattgtgtgctaatataattattacggatcacctataactagctatgtatataaagaaaatatagatggatatattatatggtggaaattttaaaatattttatgtgttatttttcttttttgatgtagataaatatatttcaataatatcaacaaacatgcatcggctgatataactaagctttaacaaatttgggattaacataatttacaatctcgagggtttgaaaagtaataacattggttatttcatcatcttaaaatattataaatatgagaacgtatgtacgaaatgtgtagagataaataattaatgatgaataggacaaatctcttaaaatgtattttttaagttcgtgccaaacttcaattgaattaaagttttatttactcgttccatattccacaataagctcacaattatatatttatagtgattcacacattttggaaattactaataagcccctgtactatttcatagtgtaacactttcccacccttcaaaatcactttgtcctcaaggttgtaaaaataaaaagaaactaaaaatcaaacacagcaaaaacatacaaaatataaaacatctcaagcccacatttatttatttttaaagattagcttcaagcccaggccccaaattcttagggcagcaacatcttcttcacccgctacaagttacgcccctatttcttcatcttcttctcttctatttttttttttgaatgcttggaagcagctgacgatatgatctctttcaattctgtttatgtctctcttcatttcgatggttggaaataacactgtatatgtacatatattacctttacaaaagtaaggaaatatatatatatatatatatattgatatatttctgcaaacgataggagataaaatccaaggtcatcgtctctgcttcgatagcattctccaatccggcaggaccaagcttccgatcgtcttccagtgaccttttcgctccgttcatcttcgttaaagtttgttcagcgtcttcgattcaagatccattgacgtccccgatcaaagatcctcctccgatctttcagcggcgtgtgactcgattcccatggtgaaccaccattaacaccggacacaatctctcgtagcaccattttacgatccacaaacactccactaccatcatcttcttctatgtacacacaagacaatcgggttgcccaatcaaggggtggcgagattctcatatccccaatcttcgttcgagcagagtgcttttcctctacctccggcgaactgcgattcaaccttggcagttcttcacagccatctcggatgataccgataggatcgactgaagaatcatccattgaatccacctctgaaggcaccacatggctttcagtgagttctttgacatccacgaattcctccacatctgcagcaggagttgagctcagagtaggttgtgccgccacatataattgatcaaatttatcgttaatagttgcgaagtgttgctcaagcatagaagtaatcttctcaagttgagaatccaaagtttacttgaaaaattactccatagatttgaagagttgaacaatctcttcatcttccatggttgggagttcttacagtgagtgtctcactgtaattcctctcaatgaaagaaccaattgttagataatagtcctctttgagacaggacaaatctccgaaatgcactcttcaaaacagtgccaatctcctagttgaaccaaagttctatttactcattccatatccaacaataactacacaattacatatttatactaactaaacaatactaacaattactaattagtccctataccctttcatataacactccccaacccttcaaaatcaccttgtcctcaaggtggtaaaaataaaaatcaaatacaaaaagtaagcaaaaatataagagataaaaaaactaatttcagcccaaaatgcttttagcccaaatgataatagctctcttaacccatttgtgtgctaggcccaaatcccaaatccatagtaaagcctaggccctagggtacccgatatatcgtcttcaaccttgcaaccaccttttttttttttgaagccatgacagccagtgagatctccctcaattgaagcttcatctgcactcacaatttgaactacatatttatttgcagaaaataaccagtaaaagatgtatataagtatatatatatatattttatattttttttcccagcaaaccagtgactacacagccaggatcgtcgtcgcctctgtttcccattgtgctctctgcgatctgacgcgaacaggacaaatctcctaaaatgcactcttcgagtcagtgcacaactccaattgaaccaaagttctattttctcaatccatat

SEQ ID NO: 25145 - DNA, 5157 bp, Cannabis sativa
  modified_base (2733)..(2747): a, c, t, g, unknown or other
  modified_base (2796)..(2800): a, c, t, g, unknown or other
caagcttgggtttgagtgtgagtgcccatatcagtatttcttttataactactagttggataagtagtgatgaaaatttgacctgttgggacgggttatagggcggagattactcgccttaatgggtaatggggtggggtgtaattttatatacccgacgcgagttggagatagagttggggtgatactacctactctatattcgacccaaatatataccacttcaaatctgcaagcctcgaacacttgcatcaaacataactacatttagattatctttaactatagagttaattaaaagatagcatatgcatgatttgaaatgtattttgatatatgtaacaccaataaaaagtttaaaagcaagaagtcaaagtgaatacaatattaagttcacaattactactttggagtaatgaaaacaaatgagtaggaatggaaaattttaatgtgcattataaattaataaaattattattatttattatattcaaaaaaaaaaaaaaaaaaaaaacttaattttcctattattttataacactagtataaagctattgttaaaggtgcttcctttggtcattgtatatggttgggttgaaacaaaaaaatgcactaggatatttagcactatcatgaaatattataaataatcactaaaagaatttttaaaagcttaatagtgtgcttaattaatggaaattaatagggtgcttatagactccacctggtattggactctgttaattaatggtgtgtttaataatactttttaaaaaagtaataaaatttttatttaaaggtgtgtttgaaaatttgcagtaaaagtaaattgaacgtaattaaaaataattacataattacgtttaaaagtaattatataattacacataagagtaattatattctatcttaaaatacaatgtgtgtttgaataataattacactcaattcttagtctagtatatgagatcactcaataatctctaattacataattattgtgtaattacctagttaaataaacacattaaatcttataattactccttattacacatccttcgattatatgtataattaaaagtaattgaggagttctaattacattcactaattcttatgaccccatcaaaattaagtgtaattattaaaaaatctatttttttttgaaaaaaagaatgaaactttttattaaaagcaacaatcagcagccaataacggcaacaaatcagagggacaattgtcctctctaataatacggtcagggagataacaagacgctcttgcaagccaatgagcgactacgttagcggaccgttttacataacaaatagacacatttcttaaagacgccaacagatgacggcagtcatgaattacattaccatatgcagaaaacatttcaacagagctatgaatagctttaacaacatttacacaatcggtttctacatcagcttgaatctgaggatgtttcttgagccagctaagggcttctttcacgccaatcgcctctgccagatctgctcgcaccagtcccttgacacagcagacatgagcctccaccagtactccatcagagtcccgagccacgaaagaaaatccaaactcagaggtgctgtcaaatattgcagcatcagtgttaattttgatcctattttgcataggtttagtccaatgctcacccactctattagcaccattagcatttattgttaatttctttatttccaacatttattgtttctggtttttacatattctgtttgcctctatttttcatttgaatggtgttctcaattttattaatcttatcattgctaattagttaattgtttaaagtttatttgttttgattttgtactattaatcgtaatttttctatagtaattagttactttaaaaaatatataaggtaattgattgccttaaattatttatatatatattttaactttttttaaaaaaagaaaattacacaacatacattatttttatgaaaaagaccatatttttgtaaatttgccaaatgtatatatcatgaaaatgaaaattccctaaagaattattgcctttccaaattgttttgtgacaagttttacttaggcatatactcaattagtaccctgtatatacttttaacaatgtccatcttgtaatcaagtatttgaatttaaaactcatatagctgaaagtagtttagtcatattgataaaagtacaataaccctacaatttgaaattatatgataagaataagtattatttatcttttttccaaaaaaaataaaaaaataacactattaaaaaaatatgcaccaagtcttttaattttgataaaacacggtaacaacttcgtattcacttggtgtgttaaaaagttttgcaataatcgtcctaaccaatatgacaaaactaacaaaaatgcaactataataactcaacaaaaatctaaaccaaaaaatgaacacatacgatggaattaattttattctacctaaccaatataatccaataaaatttataaaattataatgttggaagaaatttttttatgcgaaatgtatgattaagttggtttgcccttgagacttgtaaatttctactataaatttttttacttttagtcacaataaaacttgtgagtaaaagtaaaaaaaaaatatgactaattataaattatcattcatatgttatgactaaaaggttcgtgactaaaagtattagtcacaannnnnnnnnnnnnnngtgactaaatgtgtttttagtcactatacttgttgtgactaaaactaannnnntgacaatttgtatctaaatactaaattttagtcacaagtaagtttttgctgtgattaaaagtcacatttacgctcaaaaaaattatattgtaactaaaaagttgtcactaaaagtagcagttttttgttgtatttgttggtgttcttcacccagtgtggcgagttagtgtgagaaataaagcttgagtgttttgatggttcaaggtgagaatgacaatgtggttgatgacattgtcaaccgaacaaaggacttattggttgaaaaaaaaaaggaggatgagtgggaaaatattgattctctagctaatgttatggggaagatgtcgatggtgggtagagttcttgcttcgagattttgtaagggtaactttttgaagaccttttttggacgaatttgggagagaaagattcggtgggatgctattagtttggcacaggaagaggcatgcacatgtgttggtttctacattgatgatgactggtacaaaaagaaagtgatggatcgattatcatggtctttcaatggggaattactttcgggggaggaatgacctaaatcggggttatagactgatgctaaattggattcagtgatgttcgattaggatgactaaggttcatatgaaggctctaacgatcaataatgtaacgcttttgggtgaactggtaggcgaagtggtagaggttaagtggaataatactcaattggtcctaatgaaaatgtaagtgagagctagaattaacttcccaacaaacaaaagtgccttcgttggacattatcttccagtggagggtggtaaacattgggtcctgttcaagttcgactttttgatattactttgttttaagtgtgacttctggggtcatgatcagaagatttgtgctaaagtaacagtgatggtggaggaccttttgggagatagaagggtgatgtatggtgataggcttaaacgagaggatgatagaagagatgactcaatctcagctgctactcatagtaatgtttgtattcttcaggtgatcaaaactcatactagctctcaatcttgaggcccctcggttgagagtcaaatggtggcagaaggggtgattaataccgaatttgatagctcagtatcctcatgggaaaggagaagtcaatgggacataagctcagaatctgaagttggcgggaagggtggttattcagaaagccacaatttatcaatagacaattgatcacaacaggaaagtctccacctgggttgacacgtacacctatttgaaattgttggttcaaagttggtgggccaacttatgttgagaatatggatttgaataatttgacaagtggtaatgggctggggtctttgggtcgggcagatgggctgcaaaaaggaattaattttgatctactatgtgttgggaattttgggttggcccatgctagtgataatatggaccaagaaaaccaagtgagatctcattagataagctaagtattttaagaggttagtggaatcacttatctcgacctaaaaaacccacaagctctcctaatagaaaggtttgacgatgttaaagggaagaaatgagagggggatgggatgcgttctgtgatggagattgatgatcgtggtgagaagaaaatcaatctgagttcttgaagagtgggagatgaggccggtgatggtgatcttccattgggtgaaggtgttggtgggtttcatatggttaacattggggtactccaagagaggaaaagactagcaagaaaaaaggattgatcaaggataaagcttgccatttaggtgtgggttgagggggctcgaagctagattgtggataaggtaagtctgatgggtttatttatggggttatttttcagggagagagtatttcaaaggattcttatttctcttctcctactaatatttctgaagcagtgagctttgctcagcaaagtcgtcgaaagcaataaaaattacactgaaactttctcgcctattttcactaaagattcattcagatttattatggttgtaattgcgcattttgattaagagtgcatcaaatggatgttaaaactacttttttgaatggagaattgagagagcacgtctatatgtctcaacctaaaagattcaaggaaaatagaaatgaaaatttggtttgtaaattgaaatgatcaatttataatttcaaactggcatctcgctaatggtacttgaagtttgataaggttgtgatattgtttagttttatagagaataagtttaaccaatgtatttatataaagatcagtaggagtcgttatatctttttattttttacgtggatgccattttacttgacagtagtgatttttcattactaaa

SEQ ID NO: 25146 - DNA, 2826 bp, Cannabis sativa
  modified_base (1387)..(1390): a, c, t, g, unknown or other
ggcataaaacccaacacttatgtcaattctagctctatatatacaattgattaagtccttgtttgaagataactaccagaacagatttgagagagagggggtgagattagattgagtgagagagttcaggagcaagtctccttcttgagtgatcaatctataatcactgtttttgatttatcaataaatattcatgagctattgtttcccggggatgtaggcacaagtcttattggtttggtgttcgaacctcgttaaataaaggtgttcattaaagtttttaacattcttgccatttagtttcatatgtagttcatgtgattgctttattttacattgttggttttagattatatttttaattctggtaattgtttgatgttctttgttgtgtgttcttggatgatgtgaatcgagatcaccacaaattgtatcagagcttggtgaagaagaagcttaacattcaaaaactgttgtaagattcaaagaacttaacttgaaaatgtcatcagcaaggttcgaagtggataagtttcacagggggacaaatgacttcagtttatggcgaatcaagatgaaagcattactttttcataagggtatatctaaagcaattgatcctactcaacttgcaaaaattatagatgaaaagattaagagagatattgagtcgaaggctcatagtgccatccttttgagtcttggggataaagttttgagagaggtcttagataaagcaacgacttcaagattgtggatcaaacttgcctccatttacttaaagaaatccttggcttgtaagctgtacttgaaaaagaaactttatgccatgaagatggatgagagcaaggaattgagaagtcacttggatgaatttaacaaaattgttcttgacttgaataacatataggtttcaagatagaagaagaagatcaagccataatcctgctaatttctctgcccaaaatctatgaacactttgtagatacgatcttgtatgagaaagacacattaaccatgtcagaggtcaaagttatactcaattccaaagaaaacagaggacaaaggagaatctaatggttatggtctgtacatagtcagaggaaggacatacaagagagaattcaagaacaaacatagaagtgatagccagaccaagacaaaatccaagtttaagagtggaaagatctattactactacaacaaggaaagacattttcaagatgaatgtagagctttgaagccaagaatgccagaagcaaaagtagagaaagaggtgaatcaaatgttgcagaagatggatacgaatctgcagatgtgttagttgtgaccagcaaggatcctgatgaagaatggatactagactgttggaacttattttaccagnnnntagatttactaacatgtatgttaattataattctataatctaacatcctaaatatgaatttcttaaaataatgaaataaacacataaaagattaagaaatccttacattgatggcaacagaatataataactatttccattcagatctctagcccttaattcctgtctatagcagagcattatcaagatatgattgtaacctaaataggtatccatataatcttacgatctcatgaccagttgtggcatccactagctggttgatcgatccttgaaagaagtgggtgggaaaaaacaatcctttggacatgccttattgaggttagtgaaatcgatgcaaactcgccacttgttgtttggcttgggtaccaatacgacattggaaacccaaatagggtagaatgcctcgatgatgaagttatatgcgcgtttacttttcaatttcatctttcaatgcttgtgctggctctttattcagtagcctctgtttttattgtacttgacgggagtttgaatctatattaagggcatgagaaattactgatggatcgattcccaccatgtcttcatgcaaccaagcaaaaatgttgaggttttccataaaaatttgatcaaatcggattttaattctagtgctaaactttgaccaattttgagttgtttggttagcatggaggggtcgatctccgcttcttctaattcttccaccgttccaaagctatttgcaggaccccaaagtgaggatctatgtctatctcctcaccttgggtagacccccaatgcctttggctgggctcactgtttgagctcttagtgggcaagtcttcctttttttttgctttggacagagcaatgttgtaacattgtggggaaaaactgtggttttcagatctactcgtttttttttgtttatgtctctcaatccctaagtctaatttttcttttgttgtatatgtgttattatgttcttatttctgtgtgtgtttgatttttggttctgtttgtgtgattgatctgtaagattgagtgaggttggaaccatagggtttcttttattgagagagacaaaggcttgagtttgagtctcgaactttttgagtgtttactcagaccctacctagggtttgtttcttgtgaggattcacttattgggctagacttggcctattggacataatggttttaaatttttgcatttctaagttgtggacacatgactaaattttagaagaataccataatatttttttgtgtattaatttttgtatcttgagtgttaggagctgcagattctaacaaaaacctcttgatatgttgttactcttagctttgaattgtggggctaacttccaaagagcgaagaacacacaatctgtaggtagttgattaaggctcaaatttgtacattttaaatctttatttatgcatattaaatt

SEQ ID NO: 25147 - DNA, 7102 bp, Cannabis sativa
  modified_base (1064)..(1064): a, c, t, g, unknown or other
ccatgaggtgactaccttctccaacaatgtacatattgacccaaccggcttgtgtgtcgagttgctaagagttgttttggactggttgtatctgctgtgtattttcattttgtgtttaaatacgttaacgcagattttcgttaactatatttgagcataaattatgataaacttgcacagaaaacaaaagcagtaaaggaaaaataagaacacaaaaggtttttacgtggttttgcagttaaaattatgcatagtccacgagtcaatcttattagatttctgatacagttctagggctttttctcttatgaatttttcgtccctttttcagtgtaaactgccccaatttttaactacataggagggcagttaattacagatttgattgatattttacaacaataatcccctgaaattgtgggattttattacatcccacgtaaaataaatacgattaaatatttgaaattcacacagttgtgattggtccgcttttactaggtcaatgtaaacgtgtattaaatacgttgtaaatcgtattgttctgggacgtctcgctgggaacaaagcaacaataactctagtagcgatctagagtttttcccacatcttttggaggttgataatgtaaatctcgtcgcttctacgctgaagacataacgctccatctggcaatcgcagttcttggtgacaaggtgaacttcaacagtcaacatcatttgaatgtcagcttctatctgagagaactaactcaacggagttgtgaatctcattgaaagatgtttggagctgattagtgaaggtaccacgagggtgccttcctatagcgagatggacgcctcgctattagttgtttgggtttacccgactgttataattagtttgtatactgtgtattatacgctaagtgtcttaacatttattatatcttgcctgcgtctcttcatgtgtaacaaggttgatgcctcgccttgcacatctagagtcgtatggtttctcgttaatgcacgaggcaacaatttgtatatctttatctcccgtaagaccttatagtcagcaagttntaaatatactctgtcaattctgcatttaaagagttattccattttcaaatataattatcattatattttttgattcttattcttcctagtttgacacgtgtcctcctctgaagtgcttgccaaatttcgggtataacacccttccttcaacatgaagtaatcaacatacataagggtgaaatggtcacaatccataaccctgaaataattcaacattccaaatgtctaactatatcgccctactatttctaaggtactaaatcatatctacgtgactatatatgccatacgtcgcgttctacttttaccgggcatataatatgaaaatcataaaattttacatacatcataattaatacacctagaattcaaatatatctccatacttacataaataataaataaaagtctaactctggaattaaatcttaattatctgctaattctcatattaaaactaagcggtcattataattatcccctcgttaaaagaatttcgtcctcaaaatctaacctattgagccctcatattagactccaactcccaagtggcttcctccaccttactatttctctagagtaccttgaccaatgttatggttttattctgggggactttatctttcctatcaaggatctacactggttgctcctcatatgataaatatgattagagttctaagttttcataactcaacacatgagtgggatctgagatgtatttctgtaacatagaaacatgaaatacattatgaattgatgataatactggaggcaaggctagacgataagcaacatatccaactttcccaaaaatttcaaaatgccctataaatctagggcataacttgccctttttcccaaaatgtttaatccatttcatcagagacactcgtaggaatacataatctcctacttgaaagtctatatttctgcgtttcaaatctgcatagctcttttgcctactctgagaggtgagcatcgtggccttgatcatttctattgcctcgttggtttactaaattgattctgaacccaagtactttttttctctagtttcatcccaatgaattggagatctacacttcctgccatacaacatctcatagagagccatacctatggtaatttgatagttgttgttgtatgaaaactctatcaatggcaaataattactctaagagcctctaaaatccattacacaagctcataacatatcttccaatttctagattgtccttttggattgaacatctgtctggggatgaacagttatactgaactttagcttcatacccatggctaactagagactttcccaaaacttagaagtaaacttcagatccctgtctgatacaaaggactttggagccccatgcaaccttactatttcccttacatataattctccatactaatctactgtgtatgttgttttcaatggtaggaagtgtgctgacttggtaaattgatccacaactacccatatggaatcaaatatacccgtggttctaggtaacccaaccacaaaatccatggtgacatcctcccatttccacttaagaagagtcaaaggctgcaacaaccctacaggtctttggtgtgtagccttaagctgttgtcaagtcaagcacttagatacatattccaccacatccttcttcatatcgcaccaccagtaataaggttttaaatctttatatatattggtgttaccaggatgcaacgaataggaagtggtatgagcttcatcaagaatttcctttctaagttctatactaatcggaacacaaacccaagttttgtaaagtagcattccaatacttgacattgtaaaatctttaaattggctagttaaaacctcttctcgaatttttattaattctggagccactcactaagcagttctaactttgtctaacaaatcttactgcaatgtcaaaatattaagttttcccactacaaaatcaatatccgatttgaccatgtcatctaccaactgaggtgaaatcataaccatattggatacttgcctggaacctttcctatttagggcatttgccactacgttggccttcctgagatgataaaagatttcacaatcatagtctttaaccatttccaaccaccgtctctgtctcatgttcaaatctttttgagtaaagaaatatttgaggctctttagattggtgtaaatctcacacttctcactgtagagatagtgttgccaaatctttaatgagttgggtatcgctgctcatactccttcaattagtggaaggcataacaaataaccctatcagcttgcattaggacacaccccagaccttatctggatgcatcacaataaactacaaacttttcctaatctgacggtagtgttaataccagagctgtgatcaatcactactttagttcttgaaaacttgcttcacacttgtctgtccacataaaccgctgattcttcttaattaactttgtaaaggttttgtaatcttagaaaacccctcaacaaattggcagtaataaccagctaaacccagaaagctttaacttcagtgaccatttttggcctcggccaattcctaacgaattcaatctttcctggatcaaccatgatcccatccttactgataatgtgccctaaaatgacacttgagatagccaaaattcatatttactaaacttagcatagagcttatgttcccatagccattataaaaccatccgtagatgttgctcatgctttgtttttgactgagagtatacaaggatgtcatcaataaatactataacacatatatcgaggaaatctttgaataccctattcaccaggtccataaaagctatcgaagcattgggtagtctaaacacataactaagaattcataatgaccatacttagtatgaaaagtaatctatggaatgtcctcctcttggattctcaattgatgatagcccgattagagatcaattttagagaaaattgtctttccttgaagttgattaaacaaattgtcgatcctaggtaaagggtacttattcttaatagttaacttatttaattcctggtagtcaatacacatgcgatcagcctgtgtaagagcaaacacccttgctggagcaacctttacctcggttttctgttcttctttctttaaatgtgggaaatctcttttatagcgtccagttacaccacattggaaacatccttgatatctacactttcccagatgatgttttttacagttagggcattttgggtaagtgtgtcagttctcagacccaccctgacggttaccatgaccttggttccctcaaaaccttttattttggcttgagccaccaaacacagatggaacttttcttttctgattagtggttgagttactaccacccctaccataaccagaggtaggaggagtagtggctccaccagcaatttgagtcccttgggactcctcaatacactcaattgcgccctcagcttatagtgtttttcccaccatattagcataagtggtggcatcatccgttgtaatcatcaggtcatgtctaatcttgggattcaacccatccagatacttttctttcttactaaagttagacactattctcgaggttaacttagccagtctatcaatctgtatcgtatactctgtaactgacatattttccttttgtgtcaattgcgtgaattattttctcttaacactacgaactgtctcattataatattttgcaataaacaactattgaaattcttcccaagtaattctggtgacatctcgagtgagggatccatgtcccaccaaaccagggcatcctcctagaattggaacgttgcacaagccactctgtcgtttctagtaactcccataaaatttaaaatcctggtaataatagttagccattgcttggcttcataatgttcaaacctcctagaaagactgaaggtgcttacttacacaacctttcatagagtggttccattcaattgacaacgacaacaaggcccacttacatgacaagggcaagagccatttgcacctcaggagcaagcattccaggagcaccttgctatctcagacgctgaatttcttcatcttgctcattaatcatggcttgcatttcagaaacctattcttccaatcctaggcagcctgtggtggattaacatcactccgaccgcgtgctctatctcttgggcctctgcctcgatcgctaacattagggggaaatttaattccctgactgccacttgattcgatcgaattatcttggtttctcgtgttctgcctggcgtccattctattagaacatcctacgaaatagtgagctaacctagttagatcgcgatcaagaataaattttaattaccgcttacttgagaaaataaaacatgcgcctattcaactatcaagctactaatatgcttcttattaggattttcttatcacttactaataaaacaaactattaaagcataaaaagcatactaaatcatgactcgagcttatctctaatgacgattatacatatcgtgacaatcttcaaaatataatctggtggctctgataccaaattgtaacatcctactagattaggcgtgttatcgtgatttaaatactaattgtgcaatctgttgctaatcaacggtttattgaaatatcgtggataattttcaaaattttcttaattaaactttaaacctaattaattaaaacattacataacatgggatcccatctttaaaatttacaactattttacaaaatatttagttacaaaagttattaggtagcgactaccaaaataaagcctcctgccttgaagattaaacaccctaggtctaactgcctcgatatgtacaatcttcattagctcgagctcactgttgttaagctttagccttgcccttatttacacatgtaaataatatttatgagtcgacagactgagtaagaaaagcataatcataacataacataaataagattataactaggcacccatacacccaattataaccgtatctcgcgtcccacgcgtactgagtctagaacgttcatacgatagtactattgaccataatatcatcctatacttagtactctagttgtaccaatgtgatagcgccaatcagtactttgtcaaacatatattcgtcgatattcagtgtaactctatgtacattaatactaccaatactaatatgttatctaacaggcattcaaaaacatgtaattatatatgcatattattattctaatcttaccttgattctgaatccaagtgtgttggtccacctaagtgaaaattgctgctcgacgatttacaggcccctaagtcacaacatttgaaaaactgataagtgagaccctaaatcacttttcggagacttaaaattaaaactagaagtttccctatcaatagatagcatggcaataccctaaatatttctacaccacaaaaaactaggattccaaaattgctagaaccagtaaaccagattcccaaaatggaaaatcggtttttagggtttcgtctggggaaatagttaactggttctataggactgactgaaccgattaactagttccgtaaaagctttaccatcaactcaattttaccccaaatagtgccaaactctccaaaccacctaattaggctataataaacatatttcaagcaataaaaatagatataaatctctgaatccaaatctaccattaaagacttaagtttgaactttaaagctaaaaacttgatctttcaccaaattaacacccaaaccagcttaaaaacaacttaaatcatcataaaacatcagcagaaaaagaaaataatccagctagtacataagcaaaaccctataaattcagtcatgaactctaactttttctcttaaaaacacaaagataaaagaagcaagagccttacctcaactagctgagacaacttgctcagaattaatcaagaaaacccctaaatttcttgcctcttgttgcagccgacccaaagagtgagagaaagta

SEQ ID NO: 25148 - DNA, 3028 bp, Cannabis sativa
ataataagcggattgacaattcttcgaagactatatcatcacttattttatctttcaagatatatcactaattatttttttttttctattttatctcaatatttatattataccacgaggcattaacatgattttaatattttttattattaatagtaattttactgtggcaattggttaaattaagataaatgctaaaagataacccagtggtgccaaagccacctttcctacatgttaatatcgctattggtctaattaagatataagttaatataatagcttttagggagtatcactagccaatcgcaaggcaacacgtttaaaggtactaagcactattggtgcccaataacaatgctcttagattaataagctttacattaattttaatttgcagtttatcttattagatatctattattaagctactgttggtggtagttcttgcagtactattctacaatcagcgaatggtgttgctcatatatatgacaatctctgctactaatttagaaaattatatttagataaatacttgtcctcgatttttgaattctcgtgtaattgtaaacttttattataccatgacactatatggacatctttttcaaaatacaccaccaatattttattttattttttttaaaaaaattaatatattatattctttttaaacatgcaatattaatatattattaattaaaataataaataattaaaaaatacatttaaaacaataaataatattatataaatatagaatatgaattaaaaattttaaaacaaagaaagagtttaatataataacttgttggaaaccactaaatttgctaaaaccacgagaaattagtaagcttaaatataggctgctcaacaatattctaaaacttttgatccgaccttctgactattcatcaaaaacgtgtcattttgttgacaaaataaaaagcaaagaaaaaaaaaaccaacaccaaaacacaaatattacccaacattttattctctgacaaaattataacaaaatcatgtctatgagatccatttctggaaagagggtgatgtcgtcgtcgagaattgaattagaaacattgatggaggatgaagaagaatacagctggagagaagtgaagcttccatctctgatcccagttgttccagaaccagaactcgagagagaaaccggtgagagaagaagaggccgagatatcatcgtagccgtcgatcatggtcccaatagcaaacacgcctttgattgggccctaatccatctttgcaggctcgccgatacacttcatctcgttcacgccgtttccagttatcattttttttttcttcttccctttctgatttctgttttttcttttatatatgtttttaaattatattgtcgttttatttgttgaaggtgtgaataacgacgtcgtttatgaggccactcagcggctaatggagagtctttctgttgaggcttttgaaatcgctatggttagttagtgctattacttattaattattacaagtttatttcggccttatttaaataattataacatatgtggttataaaagtaaattgaactatattttttttttctagatgcatgtcaaaatagataaaaagtgtgttagtgcatattgtgcattgtaaaagcagcctagtgtatattatttggtgttgtttattgtttgagagatattcatgtaattgatgtagaaacaaattttcgaatgaaaaaaaaaagaaacctatataaattgagaattaaaaaattattattaattgtctattgtaattgttggttgatgaatatttcaacaaaatataaaagtgttttagtatgtatgaagtaaaaagaacctcacatgggatatgaatttttatctacaagaatatatagagtgcaattttgatatttaagtttgggccccaaaagatactcagttttataaaaatgggtggagactcacacacttgacccaccacacgcgtaactaatttcaacaaaagttaataaggttgagtaatattgttatgagacacatgtagtctaacatcatcacatgattcaactccaacatgtgttgattaatgggtgtaatatatggcattgtgatccattgaggaagattaattgggttgtgtatatgtttaattattaaatattataggttaggtctgtggctcggattgtggaaggagagcctggaaaagtcatttgcaaggaagcaataaagcttaagccagcagctgtggtcatgggtaccagaggcagaggcctcattcagaggttattatctttctatctctttcaatatttatacagcaatgctatacatccccatcaccagcactctcttgagccacgtggctctttctgattagttgagcaaccaacatcagctttgtaggcctctacacttagaaatatgttaagtagtatcttaaagataccatcacaataaggggctgatatattactatgagcttattctaatatcaatcttgatatgaaatttgaacaatgaagtttaaaaaattagatatgacctaaatttgaccacctcctggaataaattagcctaatcaaactgcctagagttagtttgttacacttgtgctgtgggaaaaaacagttgtagccgtgatttgagaagaaaaaaaacagctgtagcataacacttttttaactgctatctttcataaattcttcaataagctattttttaactgtttactaaatacttttttgtcacaactttttggaaaagtaacttttagtttttctaaaagttgtgccaaatatgtcctacctgcttctttccaaattaagcaagtaactccactttgagtattccttctaatatcaaatccaattaaactcaataacaatacaatttgctagtcaagggaatttccctctttctatagttctgtagtgttgagcacataatacacttatactaagtattttcttattattaacataaatatatatgtggaattggattgtgttcagtgttcttca

SEQ ID NO: 25149 - DNA, 2962 bp, Cannabis sativa
atatacattacacatatatggatggtcctttctttccaaaattacaagcaacatatatcatgcataaatacgatgacttcattagttttgagttctttttctcttcatgttaataataaccagaagtttgctctcctcgtagactgatgtataacatataaatagttaacctatttaagaaatccctgttgccagaaaataaatatacacagagactaagaagattagcaactttaattaaacacgcacacgaatctgtgtatttatggagatagtgaaataagattatacatagtactaatctgtctcgtgagaagagatcaatgaaaacagttgaacgaactgctgcgccatatataaatatatatatatatataatatataatatgtctagatacgcttttcatcgttctaattaatatataaatatgtataattgttcaccaattataatttataaatatacgttgaaccatcatgattcatatcaatcttcaaaagtcggccataaaagaacaagtgttaatagggaattattaatttcatagtaataaaataaaataaatgaatttatgtacaatctacatcaaaaattacaagccatgtacactagtacagtagtactataactataggcctagggctttctagcttgttttctattaaatcctcatctccaacttgtacatatatatatttagaaaaaaccgatattagtatatatatatatatatattaataaatatatatagtagttatttgtgtgtctgacatataatttcggatcatattcaaaggacctaaaaatatcaagaaattagggcactcctaagctatatctctcttatatatataaatatttatatatcatgatcattgatcacaacgagccaaaacttaaagagaaatgaactttggaaagtatatcaagacaaaatgctataaatccaaaaagtctgtctttcataataatttcatcttgcaagttggcaaattacttagttaatagatgttatatatatagagaaacaaatcaatgagatgaaaaactaattaaatccattttcgatgactaacccaaaactaactcataaattaataattaattagcaccatattaatttatcgatagacataaacattacttatatatatatatactagcttctcataactatatgatagatatctacacatattaggactagggcaagttactttatacgttacatgaagagaataattatgagttcataatatcaaaaaagttttaggcaaatactctagagtgaaattcttatttatatatctatatatagataatgtttcagtttgtaaaacctaatatatatagatgctaatatatagctcttggaaaataaaacttttatttcctgaagataaaagagaagaaaaaaaaggggtaaaaaatatcttcatatatgcgtccctggattttttccagagtcttcggtagccagccatgacagccaattaaaaaaataaaaaataaaaaaattactattatatatactttttcgtacgtatagaactcataaataataataataatattacttaaaagtaggtatgaatatgattgcagatttgcaggcaaatgcaagttggataacacagcaatctttaacctttattcatgacatgctcattaatttgttccctccatttttttctatatttcaatacacacagtatatttatttaattatcaaaaataaaaaaaaatgaaagaaagaagagagatacgaagaaacatatttcttgtttatgcaaataaatttatggcaaacgtacgagagaagggggtgggtcccatttggataaatccataaaaaatatttacaatttttctaacagagaattaggatataaaacaatctaataaagaccagaccacatatattaattaattgagagattcattcagttccaaaatggaaaaataataacaagggagaataattaatagaagataagctaattaattaaacaacatgatatcgatggttatatcactagagaccatatatataatttttcatttcttccaaatacaaattatactgaaatgggaaaataataatgcatctgatcaactagcacatatatatatatacatagatatatatatatatatttaatttacatcacagctagcatcaagggtagctgatctaataacatcaagtacttgaggagagtcataccaaacattagatggaaatatcccggataagctatccatcatctggggcatgaaaacgtcgtcgtcaaacatctcataataagaagctgtattattattactagttggtgtagtagtactagtagtagtcgtacttgaactctccaccacaagatcaacgtcatgatcttctgatcccatcttggccgttggatcttcggtaccatagtcttcttctttgtcggcggcctcaaacttggtggggtctgggaactcagcatcttgcccagtgagttcttgaaccaaagccctaaactcagaggcactggtcttcaccttcattggattcgagatataaactactttgaccggtggcttttgcttgttgatacttttcttcgttttgttgggaaattttgttgattttttcccttgatgagctgtatcactactactgagtagcttatggatattattttccataataataataataatatatttccaaaaggtaatattagaaaaataatgagagataaattcaactcgagagctatttaaggatgagttcttagagatttcatttgagaatatggtttttaaaggaaaagtgggtttctcggaaagaaagagagagaaagataaaaggagaaaatgaaggaaaaacccaaagctaagaacaaattgaaaataaaaagaaatagtgtacgatgtgacagtaatgtccaattcgcatcactcgcgcgtgttatttct

SEQ ID NO: 25150 - DNA, 5166 bp, Cannabis sativa
aaaagttcagggagcatgatttgatacatgtcaaagttcgggaagaaaaaatcttaattggtcttttattttcacaccgagatcatagaatagcattgcagtggtatattttattatttagaagtcatgctaatgtttgtgtaaataatttggtactaaaaagtgtcatatagaaaatcttgttgggtcaaacaaagtaatactgtatattcatccaaaaagaagttgatccctttctactttttacaattttccattactgtacaaacacacaacttttttttctactaattaagttaaaaacgaatgactctttttttttttgcatacatgtatttatatcatatctaggttatacagttgagtttgttttgagaatcaattaggccgaattatttaaccatattttctattacagtatttcgttattgttgttgggtaagtaaaaataataatctttgttcgttttgttttctatttggatggaaattatgtgtcttataaggtcctaaaatattaatacccagttaatgacgggtaagtgataatttgttttactttatttatttatttttgttttagtcgaaaaaaatataaatcttttgttaaaaaaataaaataaagactgtcaaatggctaaaatacgcatatgaagagtaacttttgacttttttgtaccacgatgtactattattttttattcaaacgcttttgacactaaccattaataaactataaacagataattgactttgatttagcttattaattacataaatagttaaatgtagctcaaaatatatattaaccatttttaggtgaaacatgaaatctataaaaaaaaaactttttttttggtgggaaaacaaacaatacaataatagaagagttacgaagctttgagttttgacgaaattttactggttattttcaaaattgatttttttttaatatttatcttaattatatataaaaaaaaaaaaaaaagtttgaaagcgcgtgtaccatattttacagataaccggctactgtccgaagcggttcgcagcaccgtataggccgtacagataggacaatctattaaaataattaatctcttagatcctctggatgcacgctcaccatcaaataacaataatcagatttttaattggctaacaaatttgttccttacagcttgtatcgaatagaattattacacgtgtcggagtcagatattattgggcgcataggagcatgacactttcttttgtagtacggcattagcgctgtattggtgggacccccacatggaacaattcagggttcactatccacacatgcccaatccttaatggtggaatcacacgtggggaggagatccacatgtgcggggcccactggaatgatcggatgggctcaaatccattttgggcctacgtacatatacgtacgacgtgtaattatatagtttatcattgacttaatgtatttatttatataataattaaggaaaattttataatatgtataaataggaaagccgacaaattagtcattgattttgatgcatattgtcctgtttttgaaattggtgtacagattaaacaagttcttattctttacttcaattgccttttttgacgtacaaaaagttaaaatggctaaaagatgatgtggcaaaacaactcttctttaaacttcactaactttaaacataaaacaaattattatgtaaaacaaccttttttttatatggaaaaacacaacataataaacataaaaagtgtgaagagagtgaaagatatagaaaagaacaatgatcaaattgggtggaaaatgtagaagttacatttcattattgtggtttctatgaaaataattagaagaataaaagtaatgagataatgatggatattaattaagagagagttttataatgaagaaaaatgtgttaatttaaatttctaattattaaatgagtgaggacataatgatttttgggaacttattttgtaccccaattttgcatttatttatgttgccactatttccactactaaaaagaaatcatttaaaaacaattacaacatacataccttgtctttatctttctcttgttgattgagactaatttcttcatatttaagtggcgtacgtatacgtatatacgtaggcccccatgattacaataaccattaatttatgtttgtccttttttttttatataattttcattgattcttttctttttcaatatattcatttttttaagggaaatgaaaagtttatatacgtatagctaagctattttagtagaattctgaataccaaactatacgaatatataataaactatgtttggttaggtggaaagaaaattagaaagaaacaaaataatgagggatagaaaatagaatagatagaaagagaagatagaagatatttctctaagtttggtagagaaaagagaatggaagggaaaaaaaactgacaaaaagtataattacaaactaatataattatataaattaatttaatgaaaaataagtaaatactctacaaatttattaagcacctattttaatatttttattttatatgaaatatatactctcaatttatactagttttttttagaaaaacatttttcttctcatattcttaaaaaaatataaatagaataaaaaataaataacattttaaataattacataaatttttcttagaataaaaaaattagggtatttcgacaatgcacctcttaaaatggatgcacaccaaagcacccgtatttattttagcatctaaaaaaactttttactctaatttttttttatagttgtgaacgttataattgtttaagacatcttataaaatttcgagaaattcaaaataatttatgtagtctatttaacacgcgtgtaatagatagtttaaattttatttttaacgtgttaaatttttctgaatttttcaaaattttatagcaggccttaaataactataatgtacacgatcataaaaaacagttggactaaaaagtctcttagatactagataggggtacatcgatgcatcacttttaagattgtacattctagcattttccaaaaaaaattataatttcaaagaaaaaatgaaaaataactaaaataaaatgaaaaaggaaattttaaaaaaattattaagcctaattctttaaaattaatttaagtttaaattatttaatatttgaatatacaatacttataacttagtcgggtacaaataaaactcaataaattttatccaaaaatctctcccacccatttttctcctccacggctccatccctttttctttcatatcaaacgtataacattttcttcttcccttcactttttccttttaacttttttttttctccactaccaaacatagttttagagtttagattagatcctaatattcctcaaaagctacgtggctcaaaagataatcattacttttgatattaaagactttgataaccaaaaaaaataaataaatagtacgtgccacattattgctctagaaacgtgtacaattattgagcaaaatgaataaatattgcaaatccacgtacacgatatttataaggtctctagtactgcttgtgattagctgtcttaggtgggtagtttgcatacgatatacatatgcatatacattcataaaataaataaatagttcactacatggtgctactaccaccttctctataaagtcttcaagtacaatcatgggaaaatgacacccactgttcaattgaattggcttaagactattcaattgacattctactccaaacatatttctttgggagagaggtccagtcttatgaatttttcaaccttatctttgaaataactaacttgaataactctttatctttgaatattttaatgttgacagaagtatgtcatttttttttttgatttatgcgtttatatattacaactatacataatttgtgactcgaactcaagacctccaacatacacgcactctcctatggcttggtcagaattatagcatttagtaaaggactagtattattttgaattcggtaatacaaaagttattcattggactttttgttttataaaatgacacattaaatcatgtattttttaaaatacaatagtactctcgagttcaattttcgataattatttttagtatagctaacttgaaaacaattttaacactaacaaatataaaaaaatatatacagttttatcataacaactctaaatccaattattactagcttttattttgacaaaaaataattcaagatactatcttttatcactttgaaaaatataaaattcaatttttcatttaacaaaacagataatccaattaataacttttataaaatacaaactccaaatttaccctataataatctgagtttagattttcagagccaaagtcagaaaaccaaggtgaacaaattatttttttatgtccatagtctagatatttactcgggactaacgcccacaaatttgagttcattttcaaaactttacgggaaaagtttgtgtatgccaatatttttctctcctaaaagttcaacataattttaaaatctggtttgagactagaaaattatcaagcaatagagtttatatttctatatacagagagagtgagaatcatcacagcgtgtttttacacaaacttacattgaattaacacaaaggccaaggagaagtggtatatttaatatatgagaaacttgtaattattatgtatgtatgtatgcatgtgtagtgcgtgtgcctgtgactgagtaagcaatatcacaaccagaacaatatgaaaaggtgaaagatatcaatgctgctgcagccactcctgaatggcagaacgaagagcgtggttgggaacaagattgcggtgttccagtgtaagatttgtcatcggagatgtgtcatgtccgctatccagccatcctctcaaagcctcggcttcgtatgtaaagccgtctgctgccacgtgcggatcttgcattacttcctgcaggtttggaaatccaaatgacttttcatcacaaaaaatttacaacagaatagagttggggagagaatatacataaattcctagatgaagtgttggacttagacctacaactagcactccttgttgcaagtg

SEQ ID NO: 25151 - DNA, 2028 bp, Cannabis sativa
ttattttacaatgagtaagaaaaaaattactatttttcctttgatgtattttatctttaaaatacttagctccttataaatgatattttggtaaactaataaaaataccgaaataagagctcttctatttatatcatttagccaagctctaacaaaaccatcgtttcacttctaaatagttatagaagctatatattccatatctatgattacgctcccactcaattgcaccactatgttcccaagatgtacctatgtgttagtcctatgggtaagctggtagaacaagtcaaagaactcatatagtacaataaagctagagctttatcatctcaggattgagatcaattgagctaaaattaactaaggttgcgtctggttggaggtaatgaaatggaatagaatggaaaggaaacaattttcattccatttctttgtttggttgcatattaaagtattagaatatcattccaatggaatggcgtttccaccattttagtagaatgactattccatttttaaatggaaggaaagaccattccattacatgatgagaaaaaattcaataatttttttatcaatttttttttatgcattttaaaatttattccattcccttccattcctattcctatttccattctcattcttattcctatgttttcattcttcccaaccaaacgcctaagtgacattaaccattgacttagaaaagatataatggtaagtttatgatatattttccactgtcaatatcgctccattctaatgtatagccaatacatccgatacaagtttacttttctaataccctggaaaagacattccacttatccaagtgtaagcaaatcacatccttaattatcacgtcaatataaatccagcacttacaaattataggactaaaaagttcgaagcatataatcatgattattttccatcgtgttaacaacactataatatgagtaactatatgtttgagatttattagaatttatatattaaacatagaattgtgaaagtaacatgtgaatcaagtaacaaaaaatgatttttgatcatttattaattagtaaataagattataataagatggattttatttagggcattaaacccaacttcaccatggcaaccaggaggtctaataagcttaataaaaaatgaacggaaggaacagtaggaggaggtaggggtgggatagctcctaaccctaaaaaaggtgatatccctgcaactctaggggtgccaatacaacctaacaatctagcagctaggtagcaatattacaagcacattttagatgtaaggaagaagagtttgatagagatcgataggatggaccatttggaccgatagtcaacaaacaagtagagaataaagaaaatccagtggtttctaatcaaaggatttgagcctatctatgaatgattctagaaataacacccaccaagattcgaaagaaaagttgatccaatggaagcagaagaatggttgggaacaatatagggaatacttgaccatatgggattggggaattgagacagaatatcatgtgaagccattttatgaaaaaggatgcaagaatttggtgggagattttcacgaaaatttgggatgttgctaccgtgactttggaggaatttgtgacaatattcaatcataagtattgtggtactgtagtccttgaggtcaaggtagatgagtttgtggcactgaaacaagaaggtattaccgtgacggagtatgcttagaagtttcatcaactggccaagtttactttagagatgattccaattgaaacactaagggttcataggttcgtgaaatggctaaaattgacaatttagaaggacataaaatttttggacactgtgacaatctatggagaggccctagaaaaggccttggaagcagaactgtgtgacgaaaaaatctagaaggaagtagctgcaaagagggaagctaggaaagctaatcaaagggagttcaagaggaagtcccaagaaaacaaaaatagtggagggg

SEQ ID NO: 25152 - DNA, 1393 bp, Cannabis sativa
ttatataaattttcatattccaaatttccaaagaacttcattcctgcaccaccatatatagtatattatcgctactaatgttactgaaaaaattggcgctgaaatttattcattttcgatctatgcaatcactgtagtagcctcaaaatcgatactactgtaattgcacaattcaaccacttttttatttcagccaatactaactcaagtgacaattgaagaataaatactctccggtttctttacccatttcacaaattgggcatttctcatctaaacatatattatacttgaataattttgatttgaatctcaatctatccaaaaccaaaaaaaccagaagatgaatttatatttcggtatggataatttattccaaactttcccttgccaattacaaaagaaattgaagaatgtacatttctctgaaaataaattgaatgagggaaaggaaattatatggtgtttggttacaaaataaaaatggaatggtaataggaataaaaatttaatggaatgaaatttctattcttttatttggtaaaaattatgaaatcaatagctaaataagaattgttatatttagaaaaggatggaatagaatttttattattttcaccaaaatacccattaatttttcttctaaaaggatttttgttttattaaattactattattttacaaataaataatatatttatatatcactaatgaaaagattcagaaacattttaatataacctaaaaataaataaataagcatatttcagtataatatatatttattttttattatatccacatataattagtttactttgagcacctttaattttaaaaggtgctagcatgtttattaaaaaaaatatatgaatcaattgtgttgtattgaattccatcatttatttactaaattttggaattgaaaaaattagtaagaccacacaaattaaggaaaaaataaagaataacaattttcttttttaacttaatttaattaattaaaaataaaaagacaaacatactctttaaaaatctataaataataaatcatttcatcatacatgttctaacaatttaattaaattaaaacatttcgtttatgttttataattatatgaacaaaataaaatgattttgattatctttttaatcaatttagtaagcaacataataaagtattatttttaattattttatattttaaaccaatttattgcttccattaattattctaattataattacaattttctaaatgtgcatactggaattgtctttccatcgaattttgagcggaattttgtatgaaaggaaaaactactcctatctaatttatcaagcaaataatgaaatgtacttttatggcatatttacttataatcaatctttt

SEQ ID NO: 25153 - DNA, 2893 bp, Cannabis sativa
cttgatctctaaatatttgttcttggtctcagttattaaacagaaagtatgtcaataatagtaatataaaaaaaaaagtcttttttttttggaccttcttcttccctaattggaccacatattacttctaaagtatagattattttattttattttatttttctgtttctttttattaaataagcttagaaacctaatcctcaattaaacactatatatgtcaataataaataatagtaatgaaaagaaaaagttttttttgaccttttaatgatggattaaaattttactttgggcacatatgtatattgtatatgttgtaataaaatttgatacaaaattaagtgaacagttatgttatgagtatcgaaaaagttttaaattatcataaaaataatgtgtaaatatcataagttaatttataatttgttagaccatctccaataggagacatctccaataggagatgtaaaaattgtgttatatttagtacaaaaagtagttttgtggtaaatttacaccaaattttagctttgtgctccaatgcacaattgcaaaatttgatataaaatttaatatttaattaatgttttattaaaaaaaaaaatctaataactttacaatcaattttattattattttaatatgtaagaaaataaaaaaataatataaatgtttcataatttaatgtgatagttaaatatactaataaaataataggtttaacatatatgtaaatgaaaaagtagtgcatttattgtggtaaaaattttatatcatagcaaatgttgcgctaaatttagcacaaaatttgctatgagccaaatttacatcactttttggcacactattggagcatattttttattaaatgagctatattttagcttttcatcacttatttacacttctattggagatgctctaaggggccaaattataaatattcaaaactcattatataatgagcctaaggtagtagtgcacaagtttctgtattatctcatttcccattagaaaaaataatatagagaaatagtgtattctaggaagatcataatcttctctgcaatctccaataatgactttaggttagtgcttctgcttatcttattatcatcatcttcttcttttatttagtaaagattctataaaatttaatttaagattttctctattaaagtactttcaaaaatatgattaaatttggtttttgtatttttttttttttttgagtattttataaatcttattaagtggtgtcagaaccactttatgttaaattaattgaaaatttgatgattttgattataaaatttggaaattttgaaaataaaaattttgaatcttccattatatatattgatagttgtaattgtggatttagtaaatggtatcggcatatgtttttcattcaactataatctatatatgtaattgaagctcaacctaatatgttctccgttgtaaatccctacaacaaaaactcaacacacaaatatacacattgcaatgcatacaaactagataataaaccagaaaagaaatgaacaagaatttggcaaaaacaatgcagaataacagagaaaaataaaagagtgagacaaagaaattatcctggtaatgtgagtcctattctagctctccccaaaggattttctccactatgcaatgtagtttacaaacaccaataaagagttcatcaatcagagatacacacagagagatactgcctctcaaacctccatgatcgagcagtttagaacaccatgaatgccatgattctacacctccaagagtctccaactttggctctctctctcaactctcttctctgatttttcactcactctaatgaactttctctttgtttcaaattacataacaattggtgtttaactaagccaactaacataactactttaacgaactttcttaactaacttccaagaatagaaagctcaaaaccaaaattggttttctatgaattacaaccacaatctccaccttaattcatagaaaactactgaacaaaatgcttgggggagtgaacttaaaaaactacacaggtccaagtttgagcaagtccatgaaatacctgaacttgctcattggcagcaccttagttcctgcatcagtagggttctcatctgagggaactttctccagttcaatctctccaaattctatcttgtccctgatccaaaacattctaatatcaatgtgtttggatctctcatggtaaatagagtttgtaggaaattaatacttccaatttccctacacacagcaaaagcttagtcaagtcaatggtcaaatcagacctattacccagtcaaagctattattttcttttccctgcttttatgcaaaagacaaccccttttattgaaaaagctataggtcgttttttttttatatattatattcaaaccctaaaattgcatcatacatatatatcctttttcttacaaacacacatacacggcctccactatgaaaaccctagcaaagaaataaaagcccccttcttcttcaatgttcttccatgaagaacatgaagaacaacaaacacaacacccagaaaaattacacactgcccagaatttttcctttctgcccagaaaacaaccctttaacccgagcaccttcttcgttgttcttctttgaagaacacgaagaacaacaacaataaaaacacagaagatcaagccaaaaacagtataagcataacagtaaaatgcagaaaataaaatggagaagaagacaccgattttatagaggttccccaaaattttgcgagtacatcctcttgagctcgcctcagatgcttgtttccactataaagatcaaagagttacaattgttgattccaaatcacaggtacaatctg

SEQ ID NO: 25154 - DNA, 2562 bp, Cannabis sativa
acacgctatatcagatactctaaattcgcattctactatatcaaaatcctttaagtactaaaagtgttccattaatttctaaaacaattaataatcttttatgggatataataataataatttatttatagactttcattgtttctcttttttttttttttgtgttaataattaattaatgtaggtatgtttgtttaattaaaaaagattgtaagagaagaaagagagtaagtagtataccagtagccaacaggaggaggaggaggacaaaaagagttgaaagagagcgcatgaagagccccatattatatatattaaagagagaaagagaatgttttggtgatgaggagaatggatgtggaaaacaataagaaaataagggcccttatatagagatagagacttaataatgtctcaatattattcaatagcaaaaagtaaaggtaaattggatcaaaaagaaaaaaagaaaaagtaaagattttggatataaaattatttcgttcaattttactctatgtactaaattgtatcttctaaactttgataaaaatacataaatctaacaatctcaatataaaaaaactttaacaacctgaaaaaagttcaaaaattatactataatacatgttaaagtttgagaacaaatattctaattaatcaaaaagtaaaaaaaaaaaattctatttgcatcccacaaaatgataaataaactttaattttttaaaaagttaacctttaaataattttttaaaaatcatttttaatatttttttttaaaaaaaatctcacattgttttgtgttaattttaattattattttcttttttttaataaaatttcatatattttttatttaattttttttgttatcgtattaaaattataatttatttttgttttaaaaatatattttttaagaatataaattggaagaaaaaaaaattaatacaattaaaaataaatattttatataaaataaaaaatattaaattaatgtgtatttataaatttgtagggttaataaaatttatgaaagtaaaattatggagtaaaactacattattgatattaataaattaattacgtgtaagatataaagattaaagatagatggatggagccacaaaaagtcatttgaaaatacacactactaataaagctgaagattatatgtctatattatgtgcatcagattggtgtctaatattttggtcagtacaattatattataggtataatcaaatatgagattgtatatgatttaaaaaataattttttaaaaatattacaaattaatcataagtaatatttataaaaagtattggatacaaagagcattgttattagatactaacggtgtgcctagcaagacgtgtcatcttgcgattggctaacgatattctttaaaaactattatattaaattaaatggcaccgatacttaattagacctacaacaatattattgatacgtaaaaagaaaaaggagataacaacgtaccaaacatgtatatgtatatgcatatgatatgagtcattacaactcagtgtcagacgatgatgatctgcaattgtgacaatagtcacattactactcatcacttacttttgctttttctgtatacatttgtcggtttccttttccattcaaatctcatttatcatatttattatccaactttcactttgtttggtacagtaaatgaaacaaagcatagaaaactagggattcatttttttcataattaaccaaaaaaattataaaaaatactaccttttttccttcctatttagtggattgatgaaaaaaattgagaaattgttttatttttttaaaaaaataattgaaatgactaatttttttagaaaaattacttatatattatttttttaattttttttttaaaaaaattacagcttgaattgttctgataatttttatgtgggttgttatacgaattttagttacaatttaagtttattgttaattgctacagaaatttttatgtaaaatttcgtaaaaatataaaaaatatatatttttaattgtaaaagtaaaaaaaaaacccttttttaatattattatttataataaataataaaaaatattacttttttttaaactaaagaaaatttaaatgtactttctctcttcatacttgatgagtgtgatagttcatatttttatatattacttaatatttttatatttaatttatgttaagaaaatgttgtttaatgtgttcggcaagtggttctaagttagttttggagaggttccatgttttttttttttttttagttttgattttgagctgtcttttaaatgatgttttgcattgctttgagttccttgtgacattggctttatttatttaattttttttttgtggaatattcttttttattcaattttaagtcttaaactttttttccatttgtaatattagctgttatttctatgtaaaatttgtgcaattttatttcggtctaacttttactgagttttgtcccttagtaatcacattaataaaatttcatctttcattaaaaaaaaaaa

SEQ ID NO: 25155 - DNA, 3719 bp, Cannabis sativa
ccaataagttagacttatacttctatttggcaaacaataatttttgttgaagataaaaacaaagaataacaagaaaataaacttaagcaataaaaatatattaaatcaaggataagaaaatagggaaaagaatcatgttcatttaaatacccaattgttaatgctaattaatattctctttctcaatgagaatgacaaattataaaaaataacctaattctttttagattttttaggtcctaaaacacatgttatctaatcatctcttaattagactaacatataatcagcattaagaaataatctcaatgtcacaaaggctatgcaaatactttcgtttcacatcaaaacctagtttatctaattttggcattcccaaaactcactttttagattttggattaggatcataaagcatgcaaaaggtgatcaatcttaaacaagtaattaaacacaaatatggataaattcacaatcaagaaatgagaaataacaattatcattaacctaagaaataatgtcaatcaacattcatcatctccccaaataggagtttagttcataatctccatagtcaaatccataattaaaatttaaacagaaaataacatagaaaaattaacagaggagaaaaaaactagttgaagcaatctatccaggtcgccacaagccgctcttgaagtcctctcctttgtttctagggctccaatccttaataatcatataaaattacgagttaccttttaaatgagtcgagttttctctttaaaatttgtgaaattatgaaactacccatttttttcatcaggaaggcttcgtcgcgacaaagcctattccccgtcgccacgactggagcactctcaacttggaaaactttctaccaagttccgttgcggtgaagcttattcaccgtcgcagtgaaggattctgcccctcgcgacgggctttggcagaaaagaactttgtagattttttcctcaactttttcatatcttgtcctctattcttgtgaatacttcctttaaacatccggggacctaaaacaaaagaatcaaacgtaaaattgccttaaaactagaaacaaaagtaaaaaactacccaaaatttaaactaaaattagccttacatttatcaagtaagaatttgatttagccaaattttgagttaataccacttcaaaaggatgttgatcttcaatagtaggttcattctcttcgatgtattcaactaataatgaaactacttctcattaattcaaaaaactctcataactttcattattggagttgttacattctgaatcatgagtcatgaaattatctcataaggatcttaccatgtccgtgaagcgattaatctctcctagaagtgatagtatactcttctcttcttcagttggttggggtgattttgggcaataaggaggttattgatgaatccaatcctgaagtgatggatcccaatgccagtcgtaattaaaatttggcgtatcattcaatagatttattacatcatagcctctccttaatagaggcgctctagttaccgctgctccataatcaacccagcttaacccagcttcttgtcttcttgtttcatcattgtttcatcattttcatcatcaattcatcatcaagtcatcatcaagtcccatcaagtccatatcaagtccattataagtccattataaaattataaaagagccaagtaaaatacccacttgagaaattagaataacatctcttttcgagctatttaaatctcccctaagcagaatagaatggctcattgtattgttggacaaaatccacaaggaatatcatctgaatttatacctcttgtgcaggtcaaacatcagtaaaatattagtaaaaataaaaagaaaccaaattagaacaagatttattttttattaatattaactaacaatcctcaacaacaacgccaaaaacttgttgtggtattttcagcacgcaagtatacgtaccgttaacaagtaatagactctaaaagagtgaggtcggtcccacaaggattttagttaagtactttaaaattaaacctttacttctatctggttatgtcaaaatcaagagaaaattaaatttattaaaacaataaagaaacaatgaaaataagaagcaaataaatcaataaggaaattaacgatgattaaaagttagggcttttgatttcaattgtatctattgattatggtttaacatgattctattcctattactaaattattctatgcaataacaggtttactaaggtaatttatagtcttttcagatatataaacctcaattacaggcaaattttctactctcgtgataaattaaacatgtaaaaggcgttaaatacaaaatccctataagctatccaaaccatataggtactctcgtcatatatcgaaatttagttctatttcactatagcataatcgacactcacttctcagatttttttatcaaaatcataaaaagataattgatggctaggcaattaaacgaaattaagtacgaatgaaatagaatacataaaaattgaggggaaattaaatcatattaaaaccaaaaatcaatgtcaaacaatatccatctaaaccctaatgaactgtttagctacgcatgttcatcgtagaaatttcacacacattaatttagaatagaagaagaaaatcgagaaggaaagaatgctaaaaactctggcgagaaagtcttcgatatcaattttgctctccaaaattcgagaaatccttaattgcatcatgaaaactattgaagtcaacttcttttatagttaaaaaaggataaaagaagataaaagacgctgaaaaacctatttctttctggattatgaggggcgggctgcggcatggaaatcctatgcctaggcatagcccccctttatttgggcagtgaactttttgctatgtcgactcatagtatattagctataactctttcgatattgctcgtaattggacaattcaagatgttccggaaagataaaagagagatctaaaacgtttgtgttttgagtttttcaaaaatctaacagaacatagttgaattcatgcttgaaatttagctttattttttttacacaattttttctatttttatagatcattttttttttaaatttgaccaatttatacattcaagtgttggaacctaaaattaaagaaaacaagcataattctattctagaaagtgacaataaagaagaaagttaactctaaaaataatataaataataggctaaaaatatcctaacactactccgaacacatcctcaccaatgtcaacttcaaggatgttattttcctttggccactgctcgatcaacatctctagaaaattcaatgtgacacttttctctagcagtgtataatgaactattggaagcttattcgaccttcgagggtgtttcaaaggttgagtcagtggaccaaccatattacaattggattaatccctctttgcccttcacctatacaacatattttataatgttaaaagaaattatatttttcaataattagaaatcaaatcaaatatataagaatataaaaatatctacatttacctgtgtctggtgtgcaccatcaatcttgacaaatagaattggctaggctacataggaattcaccacttggcctaccgtggtgaagctttcttgtgtgacagggcatgggagccttgcatttt

SEQ ID NO: 25156 - DNA, 3031 bp, Cannabis sativa
aggattaattaagtaacagttagtcaacatttgacagtcagccaaaatcaaaacattatcagaacctatttaagagactctaatcaaatacttaactattcagcaaaatatatgttctttcataaaattccaaaagtaaatgatttttatacaaaaagaaaaagaaagaaagataaatgcagagagaaatttgacttgtttttaggtgcaaagaaatcaacgactttgatttttccatgttgttccagctgtggtgtgtgccagctcaggatattgataaaaggttaggcaaaaagaagaccacaatataataaagggaagcctcttgtctcaaattgggactaatttattgccccctatatatttaatttaattatttataattaaaggttatttaagattttcgtctcgagctattattattattattattagatcgtgtttcataaatatttcgttcattaaaatttttctcaacaaatcttctgatcgatttgtttatactaacaaaatattgatctccttcccaaaaaaaaaataaataaaaaacaaaatattgacctagctctttagtaatttttttttttgaataaaagatggtgtttattcaataattttcagtagctacaatagtccttaaatcaaaaggaacatcagtctcattgaaaatacaatctgactttaagcaagaccctcttgctacacaatgagcggccttgtttgcatatcgttttacaaacattaaagaaatattatttaagatagaaagaagttctcgacagtcacgagcaatcataccaaattgtgatggcatatttatcgaacttttgattgcctgaacaaccatcaaagcgtcggtctcgatcaccacatttgcccatttctttctttttatccaacttaaagcctctttgaccccaattatctctgctacttctggttgaaccaaaccaatacggctcccagaaatagctttaataagctgtccattatgatcccttgccacacagccaaacccaaacttattctccgcttgaaaaatggcgccatcaacattaaccttaaccgtattcaacattagtttcttccagtgctcattatcattattaatatcatctattaataatgcccccattttttgtgattgaccacttaaccattggttaaggactattctagccgaccgcaccatatcatacggcgaacaagttttgtcattccacacaagatcattacgaactgcccatattttccagcttaccatagctgcttctcgaacaacatcagcaggttaagaggccgttaaatcaaaaaaaactaggtgttgaaatcactgtaattcgcaccagcaatgttcaccactgataaattccagcatgatctactaaagctacaaccgagaaggatgtggaatattgtttcagcagaaaattgtagaaaggacacatcatttcaatattcacatgcttagtattcagttgtaccttagttagtaggcatcccgaatattgcacgccataaaaaatgttgaaccttttgaggaatatcaagctgccatagctttttatacccatctttgttctgaacattatgcacggttgcagtattctgatgtaggtaagagtatgcactcttaattgtgtagaagctcgaagaagtcttgttccaaaacaaagatcatcttccaccgaatcactgagttgaattgatagaattagctctttatccctctcctcaaatatgtcattcaacacctccatatcccaactcttctgctcaaccgagagtagattagataccctcttcccttccaatgcaggatgattggaaataatgtaaggattttggtgatgaggaagccacggatctctcaaaatgctaacagagttcccacccccaattgatcttcttgcaccagcacacaccaaacccttggcttcaaaaatgcttctccatatgaagctggaattctgaccaatttcagcagtgaggtagctaccagtagggtaatatcttgctttataaatcatactaaccaataatctccatccttgtttaccaagaaaagaaagattataattacgaagatctcgaaagccaataccaccctcattcttatgacgataaagcttcttccaactcatccagctcactccctcactagtagaattggtttgagatgtccaccaaaatttagacatcattccttcaagattagagcaaatctcttgagtgagtaagaagacgctcatagcatagcatggcaaagcctgggcaactgatttcaataagacttcttttcccgctttagacaaaaatcgactatcccaagaaaatattttcttttgcattttttccttgagaaaaccaagtattgcattcttgtttctacccatagtacatggcaaacccaggtacatgctgttttccatggcttcattcattcccagaacattacacaatctcacccgagttccctcattggtatttttactgaaaaatattgaggacttggcctgattaacttgttgacccaaggctctttggtacacttggaggagctgcaacactctttcagcctcattatcattggccttgcaatacacatagctatcatcagcaaataacatgtgagaaacacgaggtgcactccttgcaacttgacatccagtcaaccatcgattatgctcataatgtttcaaaagtgaagacaatccctcagcacaaaccaagaatagataaggtgaaagtggatccccctgccgtatacctctgcctggatgaacaggacccataaccctccccccatatgtaacattataattcactgttgtcacataagacatgataagagagacaaaatggtaaccgaatcccatacggagcaacattgcttctaaaaaatcccacccaactcgatcataggccttactcatgtcgagtttagagccataaaaccttctcttcccatcctcttcctcttcaaataatgcatgatctcaaaagaaaccataatattatccgatatcaa

SEQ ID NO: 25157 - DNA, 2322 bp, Cannabis sativa
attgtattcatgctttaaatatcttgtaattaactctctcacaatttagtcaatgagagaattctttttcaaaactctctatgttttaacatggtatcagagcattgactcgatcctcaaacacttcttcatccaagctttctgttcttaaagatccatagccatggcgaaccaatcatcttccaccactgcacaacagcaaggctataaagagccaatttcgttcaaacactctttgttgtcaaatcttgacgagcataatttcctctcatggaaacatcatatcttaatagtcgtgcgaggtcatcatcttcaaaggttttttttgtccagaactatacccctccaaagtttgattctgaggaaaattgtctttccaacaccttacccctcgcgtaatcggactgggaagctcaagatcagctatttctctcatggatattgacgtctgtgaatgatcagatgaatactcggatgattggtcatgaaacttctactgaagcatggacaacactctaagaattattcatggcccaaaccagcttcaagataagtcaattgaaaccagctgcacgaaaacacagaaaaattccttgacaatcaatgaatacctgctgaaaattaaatcgattattgatatgttaagagttgttggtcataatttccctgtctctgatcatgtcaatgcaatctttaatgcccttagaccagaatatgacatactttacacttccttcaacattaggaaagaacaagttactatagcggaacttgaagccatgttcatggcacaagaagctacgatcgacaagtctaccaaagaattggatattttaaatgctgaagcaaatcttgctcaaagtggatctaatcgtccctttggtagcaattgaggtggatacttgaaatcaagaggagaattcaataacaatttcccacccttgggtaactacaacactcttgatgatagtattgggcatgccccttaaagtgggtcttgttccaaataaagggcagcaacccaattgtaattaaatgaaacaaaaaaaaaataaggagaagaggagattttcgtggagaacaaccaaaccaagaaaaagaaagaaaaaagatagagggaaagaagagaagaaagtaagggagagaaaatgggttttgctactttgcattgaagttaagtggttgattcttcattcattttaactcaaattttgggcagtgaatccttacaaagtgctctaccaatctaccagttttgatttggtgattgtcctctctaaggtgttcgatcttctacaatattcacttggtgagacccaaactttttctatttgtgtatttatctttagagatctgatgatgattgtattgttgatctaagattatttaatcatgatgttgttttgagcctctagttatactgtagaagacattgtaatcctattatatattgagcattggtgatagtggataatttaaacggactatgatctgtaatttttttctacattaggtttctatataaaaatcttggtgttttgcttttatgctggacttgtgtatttttttagttcttgtggttctttggttgatatttataaatattgttaattttggtgtttaacaagtattccattattaacatacaaagagggaaaatattgtgatcaattacaataggttttctgaacatgtggtatcagagctaaggttgattggtgttgaattcttatgtgttgaaaaatagatgaatcgaatggaatgatcaaattgaacttatcaaattattttgcttggaagcaattgatagaaaatttgctctattgtaaagatttatacaagcctattaaaggtaatgagtgttgagaatcatgaggttccatctcaaaaccaatattggtgatgagtggagtagtccatgctcttatatatagctcaatattttacatttgaatatttgatccatgtaggacattattgtctaatattcccctcaagatggtgactatttttgttcacgaatcttgaatcactttatcataagtagtatcatttgatcacttatttttatttgttttgggactgggagtttcatttgctcgcttattcttgtttgcggctgggagtaccattttactcgcttgcggctagctaactctttgataggtgtggatcgaaagcccgctagggggaatattctaaacattgtctcatattgaataaatggtaaagtattgagccatatataagaacatgggctatcccactcatcgtcaattggttttaccaattagtttggagatggaaccccatgattctcaa

SEQ ID NO: 25158 - DNA, 3678 bp, Cannabis sativa
attctgttatgtgcacagaatctttttctctgcttttccaatattgttgggtgtatcaattctgttaggatcttattgttttctgtgtaaatacgtgtcaattgtttattgattgtaaaggtatatcctctgtactacacttgtctataaatgaaatatccctcactcaggaaatgctgagcggagttttgcccaattcatttttcctttgaaatctatcgtggtatcagagccgtgtggccaacgccaatgtcgaccggtcaatctcagactccaccgccacctacttcgaccaataaccaacctcctcgcacaaataaccctgctacacaacctgccagtaacttctcctcttcctatggtagtaattcctctctgaactacacacaacccttcaatactctaaatcagccgttctccctcaagctagaccgaaacaactatacactatggaaaactatggtgtcaacaattattcgaggtcacagactcgatgggtttatcaatggaagtcgtccctgccccccagaatctgttccagctgctgcaacaccagaaggagaaccagaaggcgaaatgatgctgaatcctgactatgagcagtggatagtgagtgaccaactgctcatgggctggatctacagttcgatgaccgaatctatagcaactgaagtcatggggtgtggatcttcatcagccttgtggagtgcacttgaaaacctctatggagctcactcgagagccaagctagacgacacccgaaccttgatccaaactacaaaaaaaggtaatacatctatggctgaatatcttagacaaaaaaagatgtggtccgatagtttggctctggctggtgacccatatccagagagccaccttatttcgaatgttacttctggtttgggtattgaatacttaccaatagtcattcaaatagaaagaaatagaatgtcatggcaggaattacaggataccttgctgagttttgacagcaaactcgaaaggttacaagctccaggacacaccaaatcgactgatcatacagcagggggctcttcatctggaccttcggctaatcttgctactaaaccaaacagtcactctcagggaagaggaagaggaaacgttactcctcacaaaggcagaggttcgaataacaattcaggccgtggaggtggtactagaggtcgaggtagaggcagaaccaacaactcaaaaccaacctgccaagtgtgtggcaggtatggtcactcggctgcctattgttacaataggtatgatgagtcgtatatgggtcaagatcccaatactcagcagtcttcacaagcagggaaccacactgcctttgttgcatcaccagaggtggtcgacagtgatgtttggtatgcggattctggtgcaagcaatcatgtaacatctgctgcagggaatctaaaccagaaatctgaatacaatggtaaggaaaaattgaccataggtgatggtaatcaaattaatatcacatctattggatctggttccctccaaactgaatctaattctcctttggttctaaccgaattgttacatgtaccaaaaattgctaaaaacttgattagtgtatctaaattgactgctgataatgatgtgattgttgaatttcactcaaattgttgttatgtgaaggacaaagcaacaaggaaggtggtgcttcaagggatgcttagagatggactgtaccaactcaataccccagccaaccactctacccaaaacaacttaaaacctggtctcaagtttactggtgtctctgttctgtctaagggaaatgtaacccgtgctcctagtaatgagtttttactttccaataatgatatttggcataggagattaggccatccctctgtcaaagttttaaagaaagtgttagaagtatctaatgtaccctgtttaagcaatgaaaatttacacttctgtgatgcatgtcaatttggtaaagctcatgctctcccatttaaactgtcgaattctagagctactaaagttcttgagttgatccacactgatctttgggggccttccccaatagcctcaaacacaaactacaaatattacatccattttcttgatgattacagtcgttttacatggctgtatccattaagaactaaagatgaagctttgacagctttcactcaatttaaagcctttgttgagaatcaatttgataggaaaatcaaggctcttagaactgactggggtggtgagttccaagcctttggtgacattgttaaggtcaatggaattgatttccaacacccttgtcctcacacctcagctcaaaatgggagagctgagaggaaacataggcacatagtcgaaatgggtctaactctccttgcacaagcctcaatgcctctcaaattttgggtggatgctttccaaactgctgtccatttgatcaatagacttccaacacccattctaaaaatgaaatcaccttttgaaacactgttccttgaaaaacccgattactctcaactgagaatttttggaacagcttgttttccttgcattcgcccatatcaaacgcataaatttcagtttcattcattgaagtgtgtcaatttaggctttagctcatcacacaaaggctataagtgcctaagttccacaggccgtgtgtacatttcaagaaatgtcacatttaatgaaactaaatttccttttaaacaaggtttcctcaacacctatgcaccagaaaaagaagccattgtccacaatccagcctggtctcagctgccctttctgcctttctcacacaacactcccttgcctactagtacagctcttgatccttctgcccaagcatcctctgaagcaacatcttccaacaatcatcatgttactgattttgaaagtcagcaggttagtgagtttgaacacacaccagctgatattgcttatgctactgagccacaaaatgctgcatcagaccaagctgaaccagtagctacagacctgagacaaggaacacagagtgaacaacctcctgtgccttgccaccctatggtgacacgtgccaaggcaggcatttttaaaccgaaaacctatctcagcaaaacaaagtggattcccaaaattgaagaaccaagaagtgttgaagaggctctcaaatctaaagagtggaatgcagcaatgagtacagaaattgttgctttaaaaacaaagaaaacatgggtgttggttccttactttgatggtgtgaacctggtgggtaacaaatgggtgttcaaaattaaatatcgggctgatggtacagtggagagattgaaagcaagactagttgctaaggggttccaccaaagaccgggaattgatttcagtgagacttttagtcctgtaatcaaatcatctactgttcgaattattttaacaattgctgtctcgagaaattgggctatcaaacaggttgatatcaacaacgctttcttaaatggctaccttgaagaagacgtttacatgcttcaacctcaaggcttcgaagatcccttgaaaccaaatcacatttgcaagctgaacaggtctctttacggccttaaacaagcccccagggcctggtttgacagacttaagcaaacactgctgctatggcgctttgtgaattctaaggccgacacttctttgtttttctacatg

SEQ ID NO: 25159 - DNA, 2212 bp, Cannabis sativa
  modified_base (32)..(49): a, c, t, g, unknown or other
aaccaagaattttagttatataggcacacttnnnnnnnnnnnnnnnnnnatatatatatatatatattgacatgatgtaattttgatgagctatattttatcttctttccaaatatgggtcctttggggactgtgcttaatgggacgggtattagggacatcgattaatttttgtcccctaatattaaacgatcacactttcttgacgacgatccatttagtattttattttatatttttagtaatattttatattttataatatgtttataatttttagtatgttactatagtattttttttaagttgtgttttgaataataattactttattaaataataattactttataatattttaatttttatgtagtttaatattttttatatatttaaatttttattctaaattttatttttattgggagatttcctgtcctgtcccccctctcattaagggaatccttaccccatccccaatggagaataagttgggaaagagattaaaattcttaattgggatggggatgggaaaacacttcttgctaattttctgtcccgtgtgtatccctatacatatgagataatttctgtaaaataaaaataacttatttatttttaaaacacatgatgtagtgaatcattaataaatttaaagtttcattgtaatataatgattatattatatagtctatatagtatgttatatataggctgtaatttgttattttgttgaggttataatttgttgttgaaaatgaagtgtttctacttaattagtataagattaggtataataataaagagaaatgttaagggacactagtggttctcttagcaccctttaacgtgtacataatatttattgataataatataattaagtatcgagttttacataacagaaatttaaaactttatatactttataatacttaatgacattatatgtgcaaaataatttatttataatttattatacatttcattaactatgagaaatatattcttaattttatatacaaattatatatggtaaaaataaataataaatatataaatatttataaaaaataaataataaacatgtatgttttatttataaattttaataaacacgttatattaacacatcatcacaaatttggtcaaaaaaaaaaaaaaaacatatcatcacaaacattatcataacaaatatattagattaataattaataaatattatcaataataatataaacatagtatttgtacataaggtcatttaattaaaagttcgtttatttttgtaaacacattttttaataactaataagcataagtgttacattttattatcataataaacatactagattaataatagcattataaacattaataatactaattcaatatatttaataaacatatacatacattatttataaaatataaacaaaaattgtaaatattttgtatattcttttttttttaatttcgtataaattttaataaacatattattttaataatatatcaaaatataaatattaacttttatattacatatttagctttatgcgtttactttttcttagaaaatcaattgaaaaaataagttaaaattgtaaacatatatatatttatttgtaaatattcataaaattgtatagaattatgtaattatatatatattttttgtatattttttgtaatattatgtatttacttgtatataaatgaaaattatcctttatataatttaatttaattattattataaaatattggtaactaatcgtaaggcatcactctcttctagatgatgctaagcacaagtagtaattataattctataagaacaacattcataataaaaagttagaccaacataatgactgctttttttttttggtaattaaaaattatattttgataataaaaacaactgtccttataaaagtagtaattattttgtgagtatatatatctggatgcactaattatatacaatttatattgatatctttttgttggaggcatttgattgtatgcgcacgttacatataaacttgtatttgttcctaaattggttttggaagaagacaaaaagttatataccaacttattaggttaattagcaattttatctcctgaactttgacatgtaccaaatcatgctctctaaatctttaaggtcgttaaaaatactccttaaactattgagatt

SEQ ID NO: 25160 - DNA, 1145 bp, Cannabis sativa
ctttttgaaaatttcttaaatttttgccgttcttttaattttttgatttgggaatttcataatttatttgaacattttttaattgaaataggcaatttactagatttttttttttttcaaaattgcaatttattgattttaatgttagaacatgattaaattatagaatacatatattatctaattatattgctcctataataaaaatacacataaattaattaattagctagtgcaaagtgacttataattgtatgaattaatttggtgacgtaaatctataaatatatagactaaattcggtgaatcaaaaattggaaaatttatcatggaataaaatctattgtttcatcattactaggacatattaggagaatgtcaaacgttataaaaagtatgataaaaattggcataattccacgaatatttttagaataattatgtgtatataaatatatatgtgtgtgcactattgtttgcacaaaacaagaatatttaagaaataaatgaatggagaagaaaaagagaacgaaaatcaaaacctaatgaaaccgtttactttgtaatagttgtaccaataattgaaacaaaaccaacaaaaataatttggatagtcatgatgattagttttggctgattttgaaaattattattatcattacaaaatgtatatatatagtgatatatatatgtcatgtgagtaattaatggggagtgctatgttataattcatatctgaatattttttagttggagagggtgagtagttcacatatttatttaaaaatattgaataaaaaattacataaatatatatatgtatataaaatcaatataaaaataaaattaaatatttatataatttttcaacttttttcttcaatttatttataataaaataaaattatatatatatgttgtgtttaaagggtcccatatataacaattaaataacgtcattacatgtatatttaaataatgcaatcttgttgatgaagatggcttcaaggaataatcttaggaaatctcatcaaatacaatcattcaaaattttaacattcaactaagaaacatatattttcattaatatcaacttggaaaatataacaatagttaaaaaattattcatttttaaagtggctagc

SEQ ID NO: 25161 - DNA, 1586 bp, Cannabis sativa
tataaaatattaaggtgtttaatcttaccgttagtgtgctaatgacacattatatcacggcttgtaattgtggtcttcccacttttttgttttcgttattgggaaatggtttttttcacacttgttgcactccttagtgttgaggcaacagatttgaacaatttccctttagtgctttgtaagtgctgaccactaccatctccttgtggcagtgttcttcaaaagttatagctagagcactgccaattctatatggcagtgggcgcataggctctattcaatggaaattttatgccattttgactttatgcacaaatttaagccttttcatgcccaaatgagtcaaattttaattggtttttttggtagattgcagtctctagagtgaaaatgcttgtgcgggcccataaaccctaatttgggcacacttgggtgtgtgagtctcagtaccaaatgattagttaatatttttgagtcctctagagaggtgccatgggccctcaagaaggatgtcttaattcatttgacatttataaatcttgatcgaaatcctgaggttgttttttttttttttcataaaatgggtacaacagctgacatttcatttttctttttgcagatctctcttgaaacattaagttgttgtaatctgaaagattatttcatttttcattttgttgcttgtgatgtaaaattaaagaatttggttttatgataatggtgtaattgatgttttctccctatttggattttattattatttttttttggactctatattatttttttggactgtactattttgtacgttggttaatgtaaaccaaaaagaaattagttcttattggttattattttcaatgaaagttcattgttcaaaaaaataaaaaatagttcctaaaaataaaatgatagtaattcatcaaaattataaaatctaaattagaaaagaattaaatattattattttttttaaaaaaaaaactaatatagtggcttttttttatggatcactatatctacaaatcaaaataacaaagaacaaaaaatagaaaaaaaaaataatattgtgacgcttttgggaaattgctgtcacttttttagtcacgcaaatcctgactctgaacgcctatagtgatgcaaaatgagtgactgtaaaagggtttagtgacacgcgctgaagggtcactaaaaacttgctttccagtcaccctcaataatgatgtgcattgaagggtcactaaacagttttagagttactcaacgtaggtcactgaaatatgtttttttagtagtgtttggagctgaaaagtacatactgcccattcggtaaaataggcataactctatcaatttttatccaaataacttatttcaacttgcattggaaagatcttttcaagatggatctaagtgagtctcatagtcatatctcaattatgaggttatcaggctcacaattggctcacaagatagactagcacactttacacgagaattgattagtgttattaagtgtgaactataataggatgttggagagctatggcacagctcatgtagcatcatgatcgagaagtgccatc

SEQ ID NO: 25162 - DNA, 4286 bp, Cannabis sativa
  modified_base (2173)..(2175): a, c, t, g, unknown or other
  modified_base (2585)..(2618): a, c, t, g, unknown or other
atcttagcattagggcattacaataacaattctcatctattgagcagtcatcactatcctctgcgattacagttgaatctttcttgtgatgatgatgcatgttgtccttcctatctctattgtgagatttgttgaagccttattgctccttgtacttcttgaaaaatctttgcaattgtctgaacctttcacagaagtaacactctcgagttttcttctctctggattttgatcttgattgagagtgatggtgtttactcttcaaactttcttttttgggtgatctccctcttgacaaatacacttattcattcttaagttcttttttcatttgtaattcaaaatccttggacttgagtgtggcaagaacaccctcaatgcaatcacgtctctgccatatttgatgacagcctcggcgtcttgatacgtgattagaagcgatcttaacaaaatgatggtctgactttctttatcaactttatgatttatattagataatcctacaataatcttattaaatatatatgtcagtattatcatctaaaaaaagagaaaaaaatcattctaaaaccatataacttttctagcaaattaatcttgctagcaatcaatggcttcctatattattcttcaagcttgttctaaattcctttagccgccttttttgcaatgagctttctccttacactgttggacaggtacaagatgatcgtacaataagcgatctcctccatttcagatatctcgactgatttcttctcagccaataatttctcatctccaagaagtttggagactttctagtgcactaggatccctttcaaactttctttccatcatgcgaaatctcatgttccatcaaacttcttaaattcgaatctcgccattgacgacattaattttttcttcaagaattacagcgaaaagaatcttgattctgcattcttgatcgattaccaaactctaatttgtggaaaaattacaataatatgtgcataaacaaatcaactaaaaacttaatcaataaataattaacaaagacaagattaataattcacaaaaaataatcaaagataaaacatggaagaacagagcaaccaaactagaaataattaaagcagtataaagcaatgaaaataacaccaagatattgttaatttttatggtccatatcaagtttagaaaagcgaaagcgaattttattaaaaattaatttaatccagtatgaaccataattctaaggatctcaacaaatatatataaattaaatctaaactacatgaaaagaaaaataatacctcttgtagcccatcgaggtttcctcactatcttttcatgttaatttactgaacacccaatccaagaacttattgtagagttcacaccacatgtcttccaagttagtcttaacactcaaaaatagagtaagctattagatttaatttgatgagtataattatataataactgtatattatcaactcatgagatactatgatgagatagggaaaaatacaaaattcacacactacattgtagagtgtggtgagagagagagagagagagagagagagagagtgagtgaggagagagtgtgtgtaaaaataattgtatttttcaatcctaattcttttctaaaaaatattgtatatttttctctcttaaatatctttttcatttctattcacttagtgttataaacaaattttttatttaatgctttacaataaaagataatatttaatttaattataatttaaatataaatatcatataactgattaacagaaatcaattatatccttttaatttcatattatcttttaattttataaaaaaaatattatcttttaattaaatacattaccaaataatatatttaattcaaaaattaaaacttaattaattaatttgatttattttaataataaaataatcaaataaaattagcatgagctttatatgtcaccatacacgtatgaactatattttaaggtacaaaattaatttctcaatcttaccaaaaataagatttattatttatttttccaataaataataattagttaatttcttattaatattttattacaataggactaatataaatattattttcactaaaataatatagttctctctttaatattatttaagaataatattatatttnnntaattaatatagttttatcaaataaaactaaatagttaaatattatttaattatacaattcataattgttataattattcaaaataataatttccacaaattactattttttccttgagagttatttttcatagaaattaattctcactcaaattttctcatcaaattaaaccttcacttgtacagtgttgtatataggtgacttgggatcatggagctatatttcgaagctccaataaacatttaactattattgatctcatcaatagaataacccggtttattaattctaggggaattaccacatatactattttttttttcaaatttacggtttgggattctaaagtggttgcagcgctagttgtaataggggtttctacacaattttttgttgcaatttaggttgnnnnnnnnnnnnnnnnnnnnnnnnnnnnnnnnnntttcgtaaaaatgcaaaaaaaattgttttgaagtgtataaatgagaaagccccttaattctattattaatccactataaatatataattggactctttaaaaatataaaattatacttacaaaattcttactagtagttcattaatataatcaatataagtagtttgccctctccaattatagagttggtcaaagttacccttctaattatctcttgattccttttgtaccatttgttcaatgtgaacagtaaatctataatccagtatagatttggatccaactattagtactcttagaattaacactatatgaaaactaatatttaatccttacagaaagcttggattctattattacataacatgttcccagccattcatgttattttgctcccaaaacaaaagttgtaaaaatcatcttctctgagtaaatttaacaaatgaatcaaagaactcaatgagcataaataggaattcatgtatactcaggattcagactgatctactaatgatcgtcgttgtgatatgaataattatttcatgataaatgatatgttgataaaagatgttattatatatcggtctactcatgtataatcaaattatacacaacacatttactacatgtctatccacatatataatctgaatcataatcacacacacacacacacactagagtatagtgtatagtaaaccccgtacttatattaaagagctctttattttaatacactaccgactagttttattcatattgtataattttaattctcttggacatccttacaagattatacattcttcatataaagaaggatttttcagatatttatcaattatacttctataattaatgtatctatttatcttataattgtattttatatattctataatatattatttattaattatttgcttttagggtataagtgccaacaaatatacactggttcaagtcttctagatcgatgcgatttatgactctactctagttctagaataccatctaaatcttctttattgatcgagcaagaacacaattacacgagatcaattctcagtttagattctcttttaatatttatctcttacactcttattcaagaatatttttcaattacagaaaattagtatttttttaattaaaatactattcaaaaatttagtataaaagtaaggattttttttaaaatattttagagattttcctacctattttcaattataagaagccaattttgtatgattagagctattgtttttttatctaagtatttgtattaatctttggtgcagagatatttaagtcaccatgagccatgacataagtaataataagaggtctgacattttaggaagactcgatcagaagagttttatatttcaataataagtggcaaaaccaccggtccatttggtgacttcttagtactaattagtggatagggaatttgaaataatatgacacacaaattaataatggaaacgatagacttctcatcctctgattccattttccttcttcgtaattattacttttcttttattatttttatgcatgtttgcatactgaataaagtcacatgcaaagaaaataaggaatactttacaaagtatacatgtaataatatacatatatatatacacatttttttattaa

SEQ ID NO: 25163 - DNA, 3314 bp, Cannabis sativa
  modified_base (1907)..(1911): a, c, t, g, unknown or other
  modified_base (2578)..(2582): a, c, t, g, unknown or other
tggaaagccaaaactactctgcctctgcaagatgtggtcatacctcacaataatcaaggttcagttcaattagtggatgcgcagcctagtaatgaaggtgttagtcaagaagcttcccaagaagaaggctcaagttggtgtaaaaacattttcaacccgccggagagaggtgaggactacaccattttacaagctcttttcagtgtagacatgttgatcttgtttattgctacaatctgtggtgttggtgggactttgacactgatcgacaacttgggacagatcggaaaatcgatgggatatccaactcacagcaccacaacttttatctcactcgtaagcatttggaactatcttggaagagttgcttctggttttgcttctgaagtatttttaaccaagtacaagttccctcgtcccttaatgctcactttggttcttctttttgcttgtgttggccatatcttgatagccttggcagtccctaattcattatatttcgcttctgtgatcattggattttgttttggtgctcaatggcctttgatatttgcaataatatcagagatttttgggctcaaatactatgctactttgtacaatttaggtggtttggcaagcccagttggggcttatatcctaaacgtgttggtagctggtcgattgtatgataaagaagctttgaagcaattagaggccaaaggtctagaaagggaagatgggaaagatttgacttgtgatggtgttcagtgttatagaatggcttttttcataatcagtgcagctgctctttttggaagcatggtgtccttttttttggttattagaacaagaaaattttaccaaggtgatatctataagaaattcaaagtaggcaccacaagtcctactactgctgataatgatcatcaatctgatatggctaagaagaaacctgcaaatggggttctgaactcatcaagttcttccacataaattcatgagtgagttagtggttactaaacttaaatgttatagttcactgaatctgtaatgatttctcctatatgatgatatttagcttctttccactgcctattttgttttttttttttttggttgtcagactatctagtgtcacttgtgtacaaattttgtccactaacttctcagtatagaagtggacaaacattgaaatcaataaacatcatcaatttatgacacaaataaaacaattactcgattcagcagcctaaatgcaactgtgctttgaagcttgtgaatactcttgacttttactcaagctatcttgtgagacaaaagaaatcatataaaatagttaactttgagctaaggttattatttaaaataaataaataattttgagctaaggattaacgtcatcatgtcgacagcataatatatgtttttctttgggcacatttcttgcaagagaaaaaagtacacaataactagtcaagtatagtattttcagtaacataaaaagaaaaaaccagtcaagtgttagtattcagcaaaatatatttatgaatatacatataattatattatgttagagttacttgcaattcataaataattaatttttttaattaggtaacatatttttttttaatttttgaaataaatttaacattttaatcttttaaaatttttttttaactattgcgtatatatacatatattaatattacatttatataaaatatgagacaataatatgtaatggtatattatatgctttcttgatcaatttatttttaagaaaataaaaaagagtttatacattattaatattatatatagctattcatagtttttttttttttgaaaatttaatttctttaatattattttagaagattaagggctcgtttggtacgtcgtataagggtcgtattgtattnnnnnataaataacactatgtttggataaagcaatatattgtattaattattacgacaaaaaaatttaatacaatgtatgttgtattatttagtacataataaatagtgtgtattagcttgtattataatatttactaaagatttggggtcaacaccaactcggacccgaatccggacccggacccgaacccggacatgggaccgggacccgaacccggaccctgactcggacccggacccgaaccgggacccgggacccgggaccgagaccgagaccaagacccgggaccagggaccagcgacccgcacccgcacccagacctgcgactagggaccagggacccacactcgcacccgcacccgaaccgagacccgcacctagacaaggacccgaacccggacccgaacttggactgagaaccatacccgagacccgaacccgaacccggacccagagtcgaacccggacccagacccgaacctagacctggacccagacccgaactcggacccagacccagacccggacccgaacccgtagttggtattggggtcaagtgtatagaaaatatattataactttacacaatctattaatacatgtgagtaccaaatattgtattgtattaaataatactgatacaatataatacaatacaacacaatccaannnnntacaatacaatataatacggcgtaccaaacgagccctaaaagaagtgttcatttataattaaatacgtatgtaatgaagaaatattaaaatattttaaattaaaattaaaatttctttatttatgttctattactgtaaatttgtgttcgacagcaacaaattttcattatgttactgtagatcgtaaaagttttatttttaattctggaatttaaaaaatatattgccatttgcaaaaatacaaattttcatatcttgtcctccttttggcataataaaaaagattagtcaagaagcttctatatattttgtgcaacaccagaatacagtatgtgtatttgaatcaatatcataaccatataaatgacagttactatttgtcgacaccttccttcgaagtaatccctttgatgtaggtagaatctcataaaagtctggttaggattttatgtcctaaataaacttcatttcaatataatcagatttactaattaataaaagatcagaaattattttatgttgcatggttcatgattgagactcaaatttgtatattttaagcttttaattgtgtgtacaaaattaatttaattaaatatttttatgattttaattgtaaaattattttaattaaaaatatttaattaattttaattttgtgttatctatcagatttgagtaaagtggtataaataaaaagatttaattatcaaagaagcaaaaagaggtca

SEQ ID NO: 25164 - DNA, 3232 bp, Cannabis sativa
  modified_base (418)..(418): a, c, t, g, unknown or other
taatcttttactatatatccagcactgttttccagacagtttccatcaatttgttctagctttttgtgcatgtttggcctgtccctggccatgtttaatttgacattttaccttctattttagatttcaaatttaaattttaaaccattattttttttttcactctacacaactagatttgactagcttttgtgtttaataaccagatatttaataaatggatatatacatatcacatgttttattaaaatataaatttggtattattttaagctaattaggattttttcccctcttaattttaacatgtattaaattatgtacttttaatatctactaaattatgtctctcaaactttgatatatactaaatcatgctccctaaactttcatctatgttaaattttttttactaaanttagacaaaagtccttaaatctatcaatctcaatagtttagggggaatttttaacgaccttaaaagtttaggggcataatttaatacatgtcaaagttcggagaaaaaattcctaattagcctttttttttacttggtatttgtttgttttaataatatttatttgatacaatgtgtttttttttataaatatgatcaaacgtaactcaattatgtcaattttaaatttaaatttaattacttttttatacatggtagaagcacatttgatcatattgataaaattaattgctaaattagtttaaataaacattacaaaaatatagagtagagtaattaacaattaactcttaacaccctacaaaaaaaacaattaactcttaacaaattactctttgtaaattatcttgcgtaatagtatgaccaacctgtgatattattattattattattattattattattggtggagccttaattttactgatatgatgatgaaactcaaaaccaactcagaatttttcttttcttttcttttctttctaatctttatcaatttatacttttctaaaaaaaaacttgttcataatcacaaaatttactccattaaatcatagcaattttgtagctatacagattattattaatattatatatatattaatttactttgaacatggtggggtttgagaaaaaggcctatactgatctgtttaaactagaaatttattaaatttctattttcatttccatgattgatgatgatgatgatgatgatgaatagtaatagatctctggccatggaagagttcttgaagctaactaaacttaactaatagttttaatttgtagcttcataaatactctgtaacgatggacgccatgattttgatctcattgcacttgcatttgatgatgatgatgatgatgatgatgatgacaatctctgtttacttctctctgttttcatggcctgaaattattttgttaaaaaaaaaattaattttgaaaaaataaaaagaataaagagtaattattatttatgagagtttgtaccttattagaagaactcaaactcatctcattattattattctctgcagtaacagaagattctgacttttcatgaacttgtttctttgcttttgcatacttcttagctctcaaaactttcataacctctgcaacaaaaacaaaaaagttcacaactttaagaatctacaaagaaaaacaatcaaaacccatttaggatttacccaaaatttaagtagaaacaaatcaacaataatacattaccttgagtagtgactagtcgataagcatgaccaagagcaagagtctctgttggacgaagtaacttaacacgagtaaaacgcaccgttttgatctcttctgtttgttgttgttgatgattttctttatcttggtgttgatctgaaattggtaatggtataatcaaagacacataatgaccagggttcaatctcataacttcacttgcacttatagtccaataaagcctctctattttcccacatgggtgttgtatcactagtgctgcagcatctatggcttgacaatttcccatctttttttttctttctcaaaaaaaaaaaacaacaacaagaagagaaagaaagaaagagagagagagagagagtacagaagaagacgaaggtaaggtagataaggaagaagaagaaacaagggtcactttcaatacagcttcacagaaaaccacaaatatatatatatatatattttttttttttttttgtaagtgtgtaaaaataaaaacttaagtaagtctctcaagttaagcaggccttataaggtgggtcaatttttattttaaacccaatttgacatttaagattattgtgtgttatacatacatatttatataaaaaaaaaggtttagttattgagatcttagtagccacgtggagagaatagtttgggattttggactgacattttcggatttgtcgacggagttaatgtttggactttaaagctaagcttggccggttaaccaagaaaaaaattttggtagatgatttatttgttttggtattcggaataaaattttagtgttattttattttattatcttgtatgttatagttattaaaaaatgtttgtaattttttagaaaattttgagctatttagcatagggaaaaataaattttaaatattttattatacacatgttattcttatacaaataactatttgaatcttaactttaccactataaattatttgattttacgtacacattaatatgaaaaaaattagattaatttttttttcttggtgccaaaacacatagaagatctacccgaacatcctctttaagtgcgagtactatagagatttcctatattattaatctcactattctatattactctagagctttacttttaagcttcactggttcctagcactatttagaggtaatattttgtaaataattaactatgatatcacatttttttagatggtactagttaccacttatgtattttaacatttctcttttttatttttattgagggacatgccaagttaagagcatatgggggctgtagcccctactgaaaaaataaatttcattttaaaaaatattaaatatttttattataatttaataattgtacaccaaaataattttttataataattaagttccacattatatacatatatatattatgatatgattttgtctcgtaatgtattttcacggaatgtattccgtggtatattagatgggtctcatggtacattaaatgagtatcagggt

SEQ ID NO: 25165 - DNA, 5357 bp, Cannabis sativa
tctgatagaaaggatactaaggtttgggaagacccgtgagtaatccacgggaaagagtttattcctacccctgtggccaatcgcctgtttcaggttaacaagattgcaaacctgcttttggattcgagagagttgtacatctcaaaactctattccctcttcgattcagagatagtgagtaatatcttgaaagggggtaagtcgagtggtcagggaaagaataagtggatttggacattggactgctcgggtaatttttcgtcaaagtctgcctatttagcccaagtgatggagtgggcccctcattgtaatgtggccctttttaacaaattgtggaattgtaaagtgcttgagagacataaggtgttgcggtggagcatcctctctaatgccctgcctattcatactgctattgcaaagagaatgcagatcaacgatactgcttgtcccttgtgtggggtaggagaagagacgatggaacaccttttgctcttgtaattttacataccacttatggagatctccccatagggcttgatgctggttatgtatttaggtgggcgtgtttgggacggggttaaatttctttggagtttaaatcaaaagggcgccaatgttgaggaagtgtttctgtacgcatcgattgtggtagatactatttggcgagcccgcaatgataaggggcacaacaataatttgagtagcatcatccattatactgactctatcattcgatgttatgtagattatggatcccaacttgtcacttcccctaaaactagagctgctccccgttggtcccctccaccaaaggactggatcaaaatcaattgcgatgttaaagtgggaaagttcatcgatgagtgttgtggctctagctcgggatcacttgggaactattttgtgggttgcttccaacaagctcgtttgatctgatgccgttataggtgaagttgcaacttgccatctagcacttgagacagcagtgaagaggaagcacaattttgtgattatagagagcgactttgagacagctttcaaggctttgcaaaggaaagtttccgtctagaacattgataattatgtattaaattgtaatagcttctctagacaggtgtttagttgtaatttttcctttatacctagagttggtaattgtgcggcacacaatgtaactaagtgggtttttgctcaaaacttagctggtattgttgatgtgccaactatcccagtggatatcatttataatgactatgaggtctaactatttattttagtaataaacactctttttcaagaaaaaaaaaaactccattattaaaatttaatttttttttattttaccacaaacttttacattttactttatattaatttctcaatttttttatttacattattaaaatattatattttaaaatttatatttattaattctaaatatataatattaatttatacacatccacatatataaaacaaacagcattttatctcaaatatatatatatatatatatataacaaacaaaaaattaataaaataaattgagcgtaataagtagttcattgctctaaaaaaatgtaaaatacattacttgattacttgatgtgtatgacctattttagtcattcctttctctattttaaagaattaactattttaaaggaacttatattaaaaattggcatatatatcatcaatggttaattaattaagatcatgaaaattatgggtcttgtctacatactttgaccatttcataaatattgttcataaaaaataaaaaaaatctgtctaataattattaaaatacattattatatggaggagtaaaaatgtttgagaaacttaagttgaggatctcctatgctaagtctatttaagaaaagaaaaagaggcactcctatgctgggctgtatttgtatttggatgcctaaattaaagtccaactatatgtatagttgctgtatagtcaacccttaacagacctcatcaataattaaatgatcccatcagggcaacacattcctcactcccgatgattaataaatatatttatatgccgtgccgtcacagttacctttcttgctttcacactccaaaataaaatatataacaaatttaatagaaacaattaacgtataaataaacataatattaactactaatgacatgtgattcagtgacaaaattttctttctttttggtattaataagaaaaaccatttagatacacttacataagaattaccatttacatacgtaataattatatggcgaaaaaaccaataaaaactaataaatagataatatatttgaagatacatataacttgatccaaattaattaatggagtttagatattgatcactatgattctttctctttctttcaaatcaaggatttttttcagtacctctccctaaacatatatcagtgtacaatccatacaagtaaatgaacaaatccagtagagatggcttttttttttttttttttaaatttctttggggttaagaataaattaccaagaagaatattacaagactttaagtgaaaaaagaaaaaacaaaacctcttgacgatatatgatcaatggtgcaatgggtttggtccagtggggactaagcgcttctcaacaccataccgtgggtcgatccgagggtcgcctgggtctggctccgccggcagatgtcgatggtgatgatgttgccgatgaataaaaggagaaaagtcaaacttggaacttgacaatagcaatttcctgttaccactactagtgctgctcagggatgagtagtagtactggtaatgatgatgatcgtgatttgtagtagtagcgaacaatgtagcacttgccttggaacttaggacattactgttgttgaaaccggaccatccaatgttaatgattaagattatcaagaaagagacacaaagaatgagcctaaagaagtgagaaagaattatgtaattaagtttgaggataagagccataacaataaaagagagaaaatatgaatgataataataaggagatcatatggacagattattgcatatagatgaacagaggaagagagagaaacgagagtttggtaagaaaatatataaatatttatgctaaaacgccttgaataatattgtggttttctagtcaatttagcttaagaaatatattgtagagctgatgagagagttgacatatgatcaaactctagctgtgcttgcttgtaccatgagactctctctcttattctttctctctctctctcttaaaagtatacttttattaataatatataagtgagagagggagagagagagaggagttaatttggaagataatatagggcctgttgatgcggagagggagcagaattgtggagcaatatattcttattgtttgttccaatgaatcttccttagcgttcaaggaacaaagctgggtgagctatataataaaagcagtacttttgtcaaactttgaatcatatatgtacatatgtatttatagttatatatattgggatgaccccatcaattatatacctaaatatatgatatttatatatacatttactaagatgagctgcgactatgtgacagctcgatctgttacatcaaaattaaaataatataatagtatatatataaccaaaatacttaattaacttacattaatttatgtgcactatgtatacatatatggttgatggtactagacacaaatttttaatttattatctactacatgcatataaataatgtgtataaattgtgtaacatgtaatgttatacatatcttctcaaggttttcttaagagtttatatatatagcgagagatatgcgatttgaaatagaaatcaaatttttctttatataaaatatatagggacgttatcatacgtactacgagcgtcacttatttaaaattttgtatatatatcaatcaaatttttcatataattcatttatgaaaacaattttcatactatatatatgtatgtaatgtaatgttccttagaagatacatatgaatagaaaaattatagtgttttggtataggagggcacgtaatgaagggaaggcgttgtttcaggggttgaaccagtctggtctagctttatgcgtacacaagcaatggacaactcatacaaaatggaaattaatcccatgcggtttgccaactttcattcttttcttaattatttggcattaataattataaaatcaaacttctaatttgtcatctatatatagattataccgataattatcctccaaatgagtttgagtttgaccaataattaagtaattgattatattccataaaactttcattttcttataatttaattttttgtactctattaatattaaaaaaaattaaaaaattaagtcaatgctataaagtactattaactcacacgccctatacaagatagagtttctaaaaaaagtacagtaaagaagcatgggagaaaacaattacttctattatactcctttcataatgtatattaataataatcatattaatattataattttgagaatattcatcaataggtccatgtatatattaatatatatgtatagtaatttcttaaaataatgtctttttatgtgcttaagtactattagcaattgtacttattcgtaaattcgttaatggaatatgattcagagtcatatttaaattgaaaaaattgattaattaagggaaaacaagaagatatgtagttttttgtttatggatttcacagtcaatagaattaattcacatgtcactttgctttgaatagtactaatactcttggctactaatgctgcttatgtagatgaccacccacccaaacacatagatccattatggttgattgtgcatacacgagctccaactcaattctcactttctcttgcatatcttcaggaagtggcaatggactttgaatttggctttttctttgcaaaatgagaagctcttgtcggctatatcttggagagagatcaatgggattagttagctgctagctaccaagttataaccttgcttccttttatttttattatgatcgtgtttaatgacgtgtcattaatatatctataattttatggtgatattgacattattgtaaatgaatatttttgaagttttattttttttttttatttttgtgtctgatactaaaaattcaaggggagttgttgatcatgattacccactcatgagtcgtcaaaagtcaaaggatctaccaaatacacacctatgtgttttataaaattacaacttcttcggtttggcaagtccttattttttcggtaggtataaaaggataaatatttggta

SEQ ID NO: 25166 - DNA, 1819 bp, Cannabis sativa
tcatctttcaaacattctactacatacaagaactagtatggtatggactaaaccaaacaattcttttcttggtcttcctagttggtaggttgaataatcaagtattggaatagtttcgcccatatgattcttgaaatgttgattagggataacattggtgtgcttaaccatattttatctcttcgttgttcaatacgactcttcctatttatgagtcattaattatttctcacaagtgtcacacatacctgctcgaaaaacaaatatagtagcttagttggaaagaggagatgcaatgaatgagtgagctagtgaatacactaaggctcaggatgaattgttatagatatactgattgtgtacaaatgtgttacaactaaaattagttacaaactaaaggaaaacaataaatgttaacaaactagttgtaactaactataactaaccaaaacaaattatatacattcactaacacccactcaagctatactttgaatgttctaagtgtagcttgttacaaagaaattaaaaccgtgaggaagataatggttttgtaaatatatcagcggtttgatcagcagtaggaatgtaacacatttcaactttgtcagttgcaatttgatctcgaatgtagtggacatcaagctcgatatgcttggtgtagactgaaagactagattctgagcaagggcttgagcactttgattgccacaccacaacataagtagctgtttatgtaaattaattcgaagttctttaagcaaataactaatccatactaactctgttgcaactaaagcgagtgctatatactcagattcagtgcttgaacgagccattcccctttgttttctcaagctccaattgactaagttgcctcccaaaaacatgcaaaagccactagtagactttcaatcatccaaacttgatgcccaatcagcaccaaaaaaagcttcaaggtcaagaactattgctagtttgaagtgcaagccaagatgtggagtgcttctaatatatctgagaacacgtttgcaagcattccaatgatttactgttggagccattaagtattgactaagcttatttttacagaataagccatgtctgatcttgtaaaagttaagtattgaagtgctcctatggtgcttcgatatagttctggttgatcaaatggagtaccgtcagctgctgcaattttgttttccaaaatcattggtgtgtcacacgcttggcattttcaaagttggttttagcaagcaaatctgaggcgtacttaaactgggtaagatataaaacagaagtattttgataggcctcaaagccaagaaagtagctgacagattcaagagatttgagtgagaaatgtgtatgatcatggatcaaattatgaatagcagtagaacttccatcagtaattaatagatcatctacatagaccagaaccaatagggcatcagcatttttctgagtgtagaataaagatgtgtcagagacagattgttgaaatcctcacctgatcaaggcaagcttgagctggtcaaactatgatcgtggtgcctgtctgaaactaggggtgtacgtaggtcagtttagtcagttcatggtacattttattcaatccaatataaagatcaggttacaaaaatttaagtgtaacccgcccaattaagaaaaaagaaaatagtaactcgcccaataaaattagtcggtttggtcgagttaaattgtccaaaactaatatatattttttattttttttatttttacattcaattattatattttagttaattgtaataatgagacaaatatatataga

SEQ ID NO: 25167 - DNA, 1993 bp, Cannabis sativa
ttctatacctgtcttctcgtatacggaggcgccaaataatgtgaagaagatgtcttttataatcacattgccttttttttttaaataattaataagaaaagtctttaatttgcttggtagttgagcatgcttgtacaggatatgtatattcatgcataacatttgcaacacaatactcaattccaccgacattctatgtcaacatgtgtatgcatttaacatattttttctaaatgaagaaagggattttaaataatttaaagcagaagcaattcaggcagattcaactgtgattaatgagttgcagatgtaatggttgaatacatataaacaaatatttttccaacaatttcgacattcatgctgatcagactagttccatttggctaaaatatattagaagtcaaaagtgatattaaaggaatgaacttgactttcaaaagttctgaaatttcagctaaaacctcttttaaaagacattggtctacaaaaagtaatgacattgatttgtcatttgaatgtcaattataatcctatagaagaaaactataaatttgcttaaagctgaggttggtgattggctgcctctttctcttatgtctttatttaagttggtttttctaactttagatgtcacataaaacacaagacaaaataacaattttaattctatgggaaagccaaacaacacaaagtgtatcttattattggattggtgtgagctgatgtccatttattatataatccataaaaaatctgggccctttctaactaatactatgctaactcacttcatgatttgtccaaactaaaatacaacgaaatttctcaaacggttatagtatgtctttgtgcgtgtttgtatgcttatgcacgtaagatgtatgtttatttaattgtaaagagagaaagtttagactgctagagcacctcttttcgcttaagaatggagatcttgataccgaaatatcaggttgagctgctatgttcttcaacgctgttttgtaagagaggtgcctttggtgcactcgattcatcatccaattcgacctgtgactctttggattttccccacattacagagtaaaacccagcaacaattatgattgatccaagcaatctgcatcaaagtgttatggtgaatgtaaatctttctgctcaacagcatgatcgatcaaatactgtatatgaagaatatcaaataagtaagcccaaccttccaaaaaagaaagtatccccaaagaagataacacctgcagcaaatgcaatgacaattcccacaggcttgaacatagatacaaaaacaggccccgttttatgcatgcaccatgtagatacactgacttggaatgcagagccaaaaactccctgtaacattaagtttattttagaaatttttctgcaatagtagagatcactctagcaggttcagcatgcttgagttatattattcaattaccgagtatacaacagccgaaaacctcaatttagatttcaagctccaagcacttaaatctctttccaaaaccaaaccaaatactgcagatagaatagctacaaagaagcagtagaacaaaaccataatcaattctgccgggtattgcttgaggattgatgcctgtaagaaaaaaccaaagaagttggtgttatttttcttaccattttccatgtcacaagggtctttatgattttacctgtacaataagccaagcagaagctgccacacaatcagctgtgagaagcaatcctcccaggacccagttaggctgttgaaagagaagttctgtataagataagttagacgacgacgatgatgatgatgccattgaaagtgagggccctttgtatagagtgacaatgaatgcccctaaaatcaaaattatcgttcctacagatttagcttgactagaggagcttctccaatttaatgtttccatcctgaaagatcggttgtttaataagaatcaggtaacaattttggttctatattcga

SEQ ID NO: 25168 - DNA, 2348 bp, Cannabis sativa
  modified_base (2216)..(2223): a, c, t, g, unknown or other
cgctcttccgatcttgaaaatttaaattcttgtgccttaccattttgtgaagcttgtgttttaggaaaaaaacataagctgaagttcactccagtaaaacacacaactaaaacgatatatgtgcctgctaatctttgggggccatacatggtgcctactcactccgttaagcaatattttcttttaatagttaatgattatagtaagtattgttgcaccttcttgttagtaactaaggatgagtgtctgaaatagtttagaaattagaaacctcaggtggaaaaccaaatagatcttaaatttaagaaccttaggccgaataatgggttggagtttattaactttgaatttgacaagatgtgtctacaatttggaattactgggcatagaaccgtaatgaagaccccagagaaaaatggcattgctgagaggatgaaccgaaccttattgaataatgaacacaaatttttattatctaaataattagccatttttgtaataaataaactgtagaattaattgtattgcaataaatgatataaaaagcaataaataacaagaaggtttttatgtagttttgaagttaaatcttcatagtccatgagtccatcttattaagaatttatgtgtttgtatacaaaatacaatgatattgtttttcaagaataaataataacaatattatctatttttctcaagattggccatcctttgttccctgggttctttcccagtttatagatgtatagggtgacaattattcccttaggatctaatcattcgtaactgctcatgaaacatgaacattccccatgttcatctttgtgcacatgtgagaataataaataactgcctaattgctcattgtctttatctatagattgtaatgctgactatgcttagttgttctcaccatttgaatgatatatttcttaaacatcttcgtagaaactgttaagtgttgagtcaagatgcatatcgagttggttacttcaacgtgttaagagcaaggtgagtgaatgttggagttgttttcattccttgaacatactcacaagtatgtggattaatgagctacaaactcattagctactcgttccaaataattctattgtgtattctatttatcttgagatggacttgtttatcttgttggtctcatcagtcaatagttattactcatgtctcgctactgtctatatgacagtgagttcaagtatttctattaactgtatttctcgagacaagtcatttaagtatatttaataatgcgtggtttgagctagttcatattctagctttgacacacgtgtcagcttcttattgtttcccaaaatatagatttaataattgccccataaaaagtactttttttttttaaaaaaaaatgactttttaaatgcttcgagtgtacgcttgtatttttccatataaattttgcatgcttttatattggcggttcaaaacttcaaggcaaatcatttcaccatttaatgctctgactattcctttctcatttggtttccatccgttcgatatgcttttctcttgatcaaacagttaccaccatttgggtataaatttcaaattccctttcatttttgccatttctgcacacaaaacctttagaatttggaaaactctcaatcgacatcttttatgaatttgcatgccctctttgtctcttaccttcttcctctatgtttcatcagaatgcatcacatgacttcaaaatctttaagacccataatttctgtgttcagagtttttattgcaaagttcttccaaccccaaaaatctttgaaaaactagaaaatgaattctgttttcttctgacttttaggttttcaatattgatttctttatgagtgtagtatgttgcatattcaatctgtttaaataagctttgtgtgaatttctgggtagtctaaggcttagaaatcttttaggttacacgatttgcagactttggatttagttttgtgctctattttttttccaggatttggggcattttttctttgaaatcatgtcccaatttaacccatatttcatgctcccagaatcctcagagtttgaatgtaacgtcgccacttcaagcctccattgggcccttacacccacaaaatgatagcttttatacacgagtacgtcactttggctgcttcatagaatgacgactgaccctataaaccaacacgagtgtttctagcgtnnnnnnnnctcactcacacacttcctgggaaagcttttcaagaggtcgcccatcctgaaattatcccaggtcaagcatgctaaaccatggagttcttttgtgatgggctaccaaaaaataagatgcaccttgt

SEQ ID NO: 25169 - DNA, 4008 bp, Cannabis sativa
gagagaggatgagaatgagagacagagacgagtgagtcttagatttagggtaattatttttaataaaaacctggcagattttttaataggataaaataaataatattttaaaaaaatatataattaaaaattcatagtgttattcggggtatttcaggttgattcggtttcattgggcgggttactttattttcaacacgcccagtgaatagattgggtagtttttttgttgggttttttggttttttttttgcagattttttggttttgtttaggttggttattcggtttaggcggtttacaaaaatatatgtacaaccctagtaaatacagtccctaacctagtataaacactaggaggatgactatcagtagaggaagaatgagaggcacctttatttagcttagttcgtagttgtgcacgactctacatgttgtgtcgctcggggccttcctcttgtggtctttcctccttttgtttagggtgccgacccatatttggagcagtagggcctctattacacgtggagtcgtgtagatgttgattcagatctaaaccttcttggccattctattctacttgttccctacaatcacaagtattattatattattattaggacgttcagtatgacgtctaatattattggttacctgagtatcatcctcacgtcagctcgagactcgtaaaggatgttgggtccaggttctatctctccctgcaattttatcttgcatggcttgcatctgttcctgaatgactgcatactgcatggtcgtgacctaaatgatgccttcagacatgacagttggtttaataggtgggaagtgtcccactattgttgcaggtgtcgaagtttctcatgcatgacaacagtttctgggaataaattaaggatgggttcttcccactcctgcaatgacggttttgattgggtttgttcctcctccaggtgttgttcctccaccaggggaaactcctctgccaagtgcggttcctttaccatgagtaggaacattcatggtcccaacattgaaaaatcctgcattattgttcacgtttgtctaatctgtagtcatggtgattctcctccaaaaattacaaatgataatgtgtttcccacaaacaatggcaaatgttttcgaaggaatttagacaacaccaaattcgtgagagtatttaatacaaataagaacactcaattaaaattgtgtgtactcacttagagtagcgagtaatcaaactattgctaataaacaaacaaaataaatgtagaaaataataagaacacaaaggaattatagtggttcagttagagcttggtctgcttaatccattgttgtaaagattttagcttagtttatttgatttagatcactcctttatatagaaaataggtgtcctttaggatttacataactgatcggttttagaattgttttataacaaatgacagtattaaattagaataaatgtttatagaataaatgatgaacattttaatttgttcttgtattaagtgcagcgatgtatttgacttgctaagcgcgagttgcatgttcatattctcacacaagctcgcaggctttaggtgcattttgtattcacagtggtctatgagcctatggtttggatgtttgcgttcacctttgatcgcatagacgaacatcttatgtgttgacaatgtagaacatgcgagtccttgacaaatcgtcaaacacattagtcattcgaactaatccttatgtaaagaagcaatctttactagttgcaagagaggtctacttggtcatcatatataattgatatatacgcgaacaatatcaaatcctcttgatcctaattatttccttgactatgcaaggcatagtatgcgactagaccctgtcatgatcgcatcatctcgtgagtttagatcaagtgaggctaactctatgggagttattgattaacacatcatctttttctcgagaactggatccacatgtcaattttaaatgagactgctcttgtatttctaggtgagaaattcgcactataacacaacatttttaaaataattggccataagacacaaaggaattatcccacttaccatttttaactttttttaaaaaaaattacagtttaagttgtgtaaagtctttttttggcaatttaggtgtcaatatttttttttatttattgtatgttttatttgtgcaattaaatcgatttggtctccttgatattgtgtctttattgctcttttctttcaaaggaaagaattaattttcagctgtccatcttcttattttggaaacttcttgtaagagaagaaattctactatgaaaagttggttttatttggaaactttgaccattgctctttctctttattgtattcaattgtatcttgataaaatcagatcaagcacactgcttttggcaggtataaagtcaatgttcatgatcgagcacctgtttggcaggtttcctttctggtctgatttgttgctgtagaaacctgatcctggtgcaacaaatcaggatttttttgggaaagtttgtatagctgtggaattaattttgtggatatctctagggttgctatgttctataaatagagcctagagagcagccaattagttcaactcttctagctttcacttttgcatatttttcttttgtgaggagaaagttccttttgtgagaacctagtggttcagctaggttttagtgcttatgtatttgttcttatattggtcttaaggtcaatatgtatattatattgtaatgaaaactggtagcactttctatgatttctatctagtagtttttcatgccgagtcattgtgactcacgggtgctccatggtgcaggtaaggaggatagaagctatgttcggccatgagtcagaggtctcccagcgatgtacatatcagctgtggtatcttggcttctggaaagcaagatcgacccctttttctatgtttgaaaatgtaaccttgattttgtaatagtagttttgtaaattttttataaagaaatttttatcaacaggtaatccccatattataatggtactttgtatggaagttttagtgcaatttaaaatctgaaagggtttaaacttaaaccacacttttcctaaactaatagattagtaagaaataagtttgaaaaagcacacacgtggcgtccctgagggtcagggcattacactttttgtaattattgaagacttttcttctgcagatacagcctttgcagtgacagactttatctgttgcaacaaacttcaaatttgcagcagcaggaaaatttgttggaacactagatgttacaaatttcgtaattctagaacttctagtactatctaatccaataccagcaaagcctctttgacctgcattctgaacttcctcaaaaataaaaggtctaaggttaagcatttggacatttttcttgagattgttaagttccttctttaatagagtaaactttttatctttattgcaaaattcagtttcataatgttttatttttaattcaaaaatttcaatttgatgagacagttttttattcattttagcgaagattctattttcagaagtaacttctatccacttttcatacatgaccttgtatgatttagcgagagactcttcctcttcacaaatttcagaatcagaatcatctgtatcagaatcttctttttcaatggtattattcaaacttactaatttttctctcacatgtgaatcacgcaacacattagtcatgacagaggttagagcaacattcttagaattttcttcatcactccaagtgacattaaaacttttcttattctttttcagagtgtttgcacactcagattgaatgtacccaaaactgtcacattccctggactgaattctcttttcattagtcacacatgctttaaaaggtgtatttccttttgaaaattttgggttattctttttattacccatcgttttcatatatttctgaaagttcttggt

SEQ ID NO: 25170 - DNA, 5600 bp, Cannabis sativa
tagtcatttcaagaatttgtgattctatttacacaaagcaatctttttgcaccattttatgttataaaaattcaatctttaaaaatcttggatataccaaagtttgaaattcttgcaataatattaaaattatctctatttgggaatagacaaaaagaatgaaataaatcacataagcagtgaaataatcagttttgtttacaacaatttgttctaataaaacagtgaattataatccgatcaatgcaatttggttgcaccaagcagatctattggtcatttatggccactgtagtcgtattgggctcttagtaatagtaaagaagtttgtttgaatctctgctgaaactgatttagaattcagaatccaagtagtggatattacttagtggcttagtccttaagtgtggttcaaatatttatgatcttaaacagtgatttcctcaatacaattttaaaggctcaaatgctgaagccattaaggtaatatagattgaattttgtctctgaagtcttccggaaactctggcatggtgagaaaattctcatctgtcacattttggtccacatgttaaggcaaactgaagaaggaaaataagactttcggctgacaatggcattggatgcaaggtaaggttgggccctttgttgccttgtcaggaaggataagataactcactttttaataggttgaagttgaactaataaaagagcaagaatggaatgtgtcttgaattatctattttggcaatgtctgtccttaaatgctattgttgaatctagtgagagaccaaaccaatgtgagacaggaatggttttgctgctacattctctgatataaggccaagagtagtatatatgaactataaaaactacgtttcaaaatccaacttttctcttttgatgacaggttaagggcgtgtttaaaaagccacattataatcagaggtaattatatgatttgatatgtttgtctgaccacacaattatactgtaactatgtaattggacgaaagtaaatgaggggtgccaattatactttttaattctcacgctcctatgagaattgaatataattacactgtgtaagtactataaatttccattttaaatattaacaacaaaaaaaaaatattattttcttatgtaattactgtttgttttgcctaacaagatattaaaaattcatatatgattatcacctcaaatccaaatacaccttgtattttaaatatagtgtgattactacactatgtaattaccactataataattacattgttacttccaaacacatcgattcttactaaatcctctatataatattagaaagtactaagcttttggtgaatgagtttcactaaattgctttctttctattcaagtccaaagctaaaaattaacataaagtcaccaatatggaaaagagaaaaaaaattcaaccaagaaactgttgatactatgcagcaattggcaatgagttagagttagggagttaagtgattttgacaagactttcagcatcagcatgcaacaaaaccatttatacactttattcaaagaaagtagtcaagatacaactaaaacaaatgctccagactccttcaataaattcaccttttcctggtatacaagataacattacaattacaaacacagaaattccaagcctttctttaaaccaatcgagttttaaccaatgtatatatgtatgtacataaccaatgtagattttctagctagctcacactgaagccaatgagttgaagtaattccatgcctcctgtatcaaattataagaaaatatatacacaacatacgaattagcgaactgggttgtgaaaaatgatagtagtacttggtaggaaggtacctgtaaaatatcgaaaaccttttctgcaatgtatttttggtgagttgcagcacccttttgctgtagcttatctgggtgcaaacaaagtaaagccttttgatatgatcttttcacggcattcccttcaattatatctacaagaggaactggtttccacccactctcagcccaaagcacctgcatagccttataattagtttaactttcacaaataaatacaagtgtggattttgacatgaagtattatctcatcaacacttacgtattgcaaagtcgaaagtagtgaacgaatgttcccttcttttcctcttgtccactctcgaatcttagtctcaacttcctgcattattatatatcaagtactatttagatacaaacagttcagggtcccattatatatttatgtgagcagtcttatgttttacattacctggatttcttgattgtttgggccagtttccacttccaggttctcattcacagtttggggtaattcttttatctgccaatcacctcaaccaaacaagatttaagtaaaatggaaaatgacacaacaataatgataatgatatagtttggtgatgtataatatacaagtagtgttgattattggttcacataactgaagataatattatcagttttggaatttcggtcttaggcgtcgtcatgatgctggtgcttgttcatctcgcttaagatactagaattggagttattggtagaaatggattttttcttcttaatgttactttgcaaaattacattttctttttgaataatattttgcagaagaccattttacaaatgattataaaaaagaatttattgtgcaagtgaatgattaaatgtttcttgtgtgacattactaacatattcttatggcttttagctatagtgaacactgttcttgacactagcaaaattgaagctggaatgatgcagttggaagaggttgagtttcaaatggctcaacttttggaagaggttgggctaaaagaaaagttgatttgattttggatccatgtgatgcctttgtgaacaagttctcacatgtcaaaggtgatagaataatgcttaaacaaattctaggcaattttcgaagcaatgctataaaatgtaccccagaacatggacacgtagtcttcgagcttgggcgaacaaaccaagttttacctattaattcctcctcaaatcgacaaagtctaatccgaatattgccatgcttgttttacaagaacaaagccgacgaggaagactgatcaagtcatgaatgatccacatgttatggactttgtgtttgaattggatgatgcaaagaaaggaattccaaaggaaaagcaaaaggatcttttcgaaaactatgtccaagacaaagaaacttatgaacttaaataaggcactggcttaggacttggcattgtcaagtgatttgtaagtggttattataaaataaaacatttttgtcacaataactagcaaatatattctgagtttgaattcctttactgcattcaggtacagttgatgcatggacaaatcggtattgtggacaaggacattctctgtgtttgtgaggatgtgtttgacagtaaaagcagtactactttgaatgttcttactcatcaaagtcccaaggtagatggatcttatattatactatcaagtagttatgccttgaagccagaatattggaaggaagaaagaaaaaaagagatacctggaagttctcgtggaaaggctcatctgattcgtcggctttaacattaaagttatctgggaatgaacctgaaacgataatggtgaaacactcttagacatcacatcacatattatgccaaattgaatggctctttagttatgccacattatagattaaagcacctactaaccagtgctagtggcttggtttgggctccccggtgtagaagcatatggttttgctgagtgcttcagatcctcactcaactaaaatatcatcagagattttataagttcatcaccaataattagaagtgagcaccattccataatattatgcatattacctcatgcatcttcaatttttcatcagctacagctgtgttaatacttgtttcaacttcaaaattgaatttattgtgccatttacaactctggcttctaaatgataatccatctttgggttttgatggtgtttcttggttgaacattttaacgaaatctttcacccttcccttgactttgtttttcccataactctcttttgatttcttcggtgaaccttggaacaaactcgcactatccacttctgaattgatcagggaaatgtctaaccgtccctgattctttacagttttactatttccaactactggagacgaagcttttgagcttttcgcctcgtttcccttcacttggccaccactcattttagctctctcaacattggttgtgtctaaatggaaaacaagatcggcataagagagagtaagataataccgttaggctaataatttctctaattacatcaataccgttaggctaataacaactaaccatttctaacatatggtccttgaaacccaagattcagagtactataacacagcttacctctttcaaaatcattgtcaaatagcagagaactaataggtttcatctcaggctggtgagtagagattcctttctctgatttgtcttctgccaaataattaatgaggtttcacagtttacttgtatgtctcaagaatcaagataacaaaacaagtgaacataattgaaatataacaaggtggtacctgaaacatctcccattattctttgaggtactggatgaatcactgaatcatcaactttatctgctgtgatttcatcaagagttgattcatattcttgtttgttggattgaacttgaacttcattctttgaaatactgtgttcatctgttcttaagggtggctcatcagatttggtcatttctttcaaccttgaacttcttctaccattaaaaggtatgtcaaatggaacccctttacctgcccacttatatatcgaaaaatgaaagtgtccacttccactattactactggactttcctgaatcctttttcaaattggctcctttatcgatttgatcaggctcaaccaagtttgaggacacctcagtgccttggatagcttcctttgaagatccaggaagagaagcatcatcattcaatttaagtagactacgagtagggggaccaaaggttggaagctccactcctttgattgtatttggaggaagactaagaaagataattacaagtcaaaatatagaacaagcaaagcttgatgcactcaagtaccattaaaactaataatattaaggtaaagattaaatttttgactaattgggcaacatgaatcagttcaagagttaaaatatagaacaaggaaaacttaatgcactcaagcactattaaaatcaggatttttattttccacacttttacatgtaccaattatattcttcaaaattctcattgagattattacatttaaaattttttgactaattttactaacgtaagtgtgatgtgaatgaaagttgaagatgcataatttagtacatattaaagttcgagatcaccatatagtagatattaaagttcggagacatgatttgatacataaaaaatagctatagagcagaaatctttaaatccaacgatttcaatcgagagaatttttaatggccaaatcat

SEQ ID NO: 25171 - DNA, 1380 bp, Cannabis sativa
aatgtcttgccctactgacacaaaagctcatttatctattcctatgtgaccattgacatctgggagtgccttggtcacaaatggcacttatcctctagctgtgatggtgttgccttgtcatttatacttcattattctaaatagtttaagtcaattagtgtcttgttggaattcttcctcgagttaggatttgaaatgacctatcttgagtcttgattttgacttgactttacttgaaatatttaagaaagtagtctagggtgaaaccctaggtatgcaaccactgacactatctcaggtcagtggccgtatatggcattttttccaccatgtggcactcaaacaaggtgacatttagtactctagtcgagtttagcctctatttcgtctttttcttcttggtttaagtcttaaagttaacttctttaatttctcaaaaattaggtataacattttccccccaaaagttttgccgtgaatttttaggaaagacttttatagtttacccgcgtttattctgaccatggcatgcacactgacttttgctgctcttaacaatttttgaagtacccgattaggagaaggaggatttgtaaaaattgggggtgaaatcccaaaaagacgtagtgaggacacataagatcccataagatacatgttgttagtggaattggaaaacaagcaactccaacaaaggttggcgtaatcaaatcaaagaaatgctaagttggaacgcaaggttgcggctgtaagggctgcatgcaacgatgtacctcctaaccaatcaaacacatccactaggagacttcagggaagacctagaggctcgaggaccaatagacatggggaaactcctagaggtgataaccacagaaatcccatgcatccctaggatgatcaaccggggagtacaagggatataccagtggacataggaggtctacaaaatctaggaagcaccaacaatatagaaactcggccaaataatctaagaacctcacgcggtaacacaaattgtgagaatgtgcaacttaacaacccacagtcatctcgcatgaatgtagatgccaagtaaacatgacttggggactatgggttcactcagtatgatacgaggggtgtggggaaacgacccgggtaagggcatccaccaagacactcatagggaccaaaccataatgacatagatagcatggatacctacttgagtaggggatatgtgtcaaatctctttcaaagacagaggtctatgtgagaggaacctcgagaaataggattaagctgattagccctccatgtgttggtttgtaattagttttggtcaaaatactattttacctttttaattacttctttatcctttagttctattaattcact

SEQ ID NO: 25172 - DNA, 1289 bp, Cannabis sativa
taacataattggtcacttaattttgtatcacactttataatagcatatacattatacatatgtgcccacatagaatttttaatccaacatattatgtatacatatttactccatcgttaaacacgggagttggaatgtttgatgatcaacaacatatattcctaccaactaccttctttatttttacaccacaataagatgtcccttatcgttatggcccatttatttttattccatgttgtaacttttccaatcatttattttcataaatacttgaaaactatacaaaaaaaaaattacaaaaataacgatgaacagttttttcaatattctttttagttttcatgctgttgtatatttgtatgatgttgttttaatattactttattgaaaaaaaattaaaataaatctgtaaaaataaaaaagataataatacatattaattttttttgtctagaaattcttttttttatatgaagccccaactctatttgattattgacacctatatgtgcatgtaaacatatatttagggcctgcctaagttaaaataggtcatataagttaaaaatacaaaataaaaaattagccattattataaaattataaaaaaaaaataagtatattttttttatttggcccttaaaatgagtgagcataagcgtgggctcttagcccgccttagggccgaccctgcatatattaaatattatatacttcctttgccttaggaccaaagtatatatggagtgaaagtaatgtaatgggaaagaaaaggaaaaatatctacacagtgccttacacttaaaaaaattatgagttaaatgatcggggaaacaaggcagccaattactattgaaacttagtaatggttcaaactctagctagttcttatactatgattttcctattgctcttgtagttaagtgatcacttaaattcaattaacaatagctgtactattgtgcctacatcttttcaacttgaaatacatctataagaattttggtaaatggatgaagtgagaactttaaaaagttgtattatggtctaaaacaaatagacaaagctctccatattatttgggcttacttaagcagcaatccaacaaaaatatatggtctcaaatcttagcccaaagctaaagattcatagttagaagagcccaagccttttctgagctgggcccattcatagaacagttaggaatttggaatagtaatagggaaacttacaaaaaaggaatttgggttaagttttacaaaaatacagtcacacggaaatctttt

SEQ ID NO: 25173 - DNA, 1077 bp, Cannabis sativa
acaagtaacaattatactttataataattctaaaaaaaagtagtaggtttcaaattcaccaataaaacataatcattgggcaatttaattggccaattgtcaatttcatagcttcacaattcccacgagtttttatttaattattatttatccaaaataataataaaaaaaaaatagacgaaagggacacaaagcaaatcaaatttgcacttagagctcacccaactcaaaaggcccaaaaaaaagaaatttttaaaaatattgatatcttttgtatttttcaaaagtagcatatttcagaaataaaataatataacttataataacgaagggtaatttggttatatttaaaaatattttgatcttaaggtcctaattgtaatcttttttaaaacaactatttgtaaaaatatagagtttaaattggtaattcgttaaagtaattataaatcctaagtttttggcggttacacccgtttaattatcgttgcacttgtgtttaattctacaagcttaattttgatggtaaaaccttttaggctattgaactgttagtaaatttaaggtgttatctggttaactgtcatcatggactatttatgtatacattcttgtacacgtgacacgtttattggtacacctaatattattatttcaaaattcattttaaaattaaataaaattataaattttatattataggtgtactaatataaatgtgttatgtgtacaagagtgtatacagaagcagtccatgctaagttaactgtggaaaatagagatgataccttaaatttgttaacagttcaataatttaaagggttttactatcaaaaagcttgaaaaattaaataaaagtaaaataataattgaaaaagtttaaccacaaaaaattcacgtattaataaatagttcaaaaagtaacactgtagcatgacatgaaatttagtagccgtcacatattaaatttagatggctaattaggtttttggcctcatgatctttgacatgtaccgaatcatgccccctgaacttttgagattattaaaaataccccctgaactattgagattattg

SEQ ID NO: 25174 - DNA, 2137 bp, Cannabis sativa
tttagggcgccaagttagtcaattggagccccatctttttgtattttgatttgaaaataatcttggaggaggctctattgtccaccatgcatcttgccacaattatattcccaatctgtgcagtaacgagcatggatcattgtgtgagaaactaacttgagcagcatctcctttggcaaaagagatagtgggctcccacaattttggttgcttggagcccctttcttcgatggccaagatgtcactttttggctcgtgatgtaatttccaatcatagcactccctagattttctagtagcgcatgcaatatggggtcccctaataatgacccctaagtgacctaccactagaggtggcatgggctctgcatttttggcaccttgtacacataacgacatagattgagattgtttttccttataataaatctgatctccccttcaagttttgacactagtttgtgtcatggctgaagtcgttgtgaaactgacgaaactttgacatgtcccttttgctcgactcccttttgatgagaggggcttcttatatgggacagttccctaagtggccatgaagatggcctctggtttctctgtcttgagggtgaaacaggtgaacttcttctccttgtctttctagttttgtggagtgggagaagtgttgtactttccctttttgccactgtttcttttagagatattgttgttgcgcttgcctccagtgttcttgccactaggggtttgggcagagttgctagcgccagtctgcacacctagcaagtcatggggctgcaggatgctctgagactgcctcttaccaacttgccctatctcggattgtcggatagtttcctccatctttataaagccatcaactctatcgaggaacgccttcatgtggttgattgagatcctccaaatatctttccgaaagtcactcagtggaaagattccccctaggatggtcgtatatcagccatcttctgttacgtctttcaccttggtggcctcatccattaacctttggatgtaatcctttaaaggtcttaaatattctttggcatacttagactagagatctgctattgagtgggaggaataaggaataaaagaattttattcatgattgaaaaataaggacataaccagacaattttagctatgaccttttttaaacttgaatttatagataatctaaaaaaaagaaaggccttattcttggggtggaagttattcaagattagtgtaaaagttatctttgcatattctaaactccatcagcttgcctaaataatagtgttgctcgaaacaaccagaaaattattgagatttataaagattcaaatacatattttggatttgttctagtgatggaacaattacaattttcaccaaaaggtaacatagatatagtatccagatagtagtaactttgaatccccaaaatgaatcaaagtctttgtaagtattggaaataaagaagattgatgttgaacacaaacattaggatcaattgataaagataaagacatagactatacttgatatatacaccgagcttataagatttagagagatacacttttgttttatgttagtgcaagtgtgagtatgttgagattttatgctctaaataaaacccatctcatggtaatcttattgactaataaagaatgatatcgaagtcaaactttatattatttagttcacataattatttcgtgattatttgtttaatatataatttctatctaaattcattacttatggtaatcatgattattgtgttgtctacacattagaaaataatcgtgatcatcagctttgaacttttagtcccacgatttactaatgcacaggacttacactagtgtgataactagcgatattgcttactcacacttagataagtggaatgccttttctaaggtattagtgaagttagctaagatcagatgcattggttatacattggatttgactgatatttatagtagaagagatatcgtaaacttatcataatatcttttctaggtaaatctctaatagttgatcttagatcaatgatcttaatcctgagataattaggttatggcatagctttgttattcttggtcttttatttgtttgttcgaag

SEQ ID NO: 25175 - DNA, 1921 bp, Cannabis sativa
  modified_base (1168)..(1182): a, c, t, g, unknown or other
atgtgaaaaagctttaccaaacaccaacttcagttttccagctcccttaataactgtgtcagttgctctgtattggtcaccaaaagcatgccttccaatacatattggcttcgtccaccctgatattaagaacaatcagcatacatatagtctaggggagttcgaacgacactaacagaatgtcaaagaaaaatacctgggacaagacgagggaggtttttgcaaaggattggttccctgaaaacagtacctgcagaaaacaccagatttcagttgaatatgaacaaaccaaaaagataatggagtttacagtgacactgtataccaaccgttcaatatgttcctaatggtcccatttggactcctccacatgctcttcaagccaaattccgtcatacgagcttcatctgtcaatcagcaattgtagattaaagatatgcaaacggataagttaaataaaaatactacagcatcataaaagggaaaaggtagtttaggtgtttaatggatgatggaacattctcaaattcccaatatatacagcccacctggggtaattgttgcacatttgattgctacattgtacctaggattttcaaaaataaaaaatcaatagtcagaagaataaaagtataacatatgatacaaaatatgtttaaagaacaacatcagtcgaagattattaacaaggaactgacaagaaaaggtttcaaatactacaggaaaaaatgaacagaaaaggttaggataacaaggaaacattcttggacaattaatcagggacattaaaaacacttacttaagggtagcctcagcactctcaactgtaactttatcatcagttgcatcacgattaggaaggccaaggtcaaagtacttgatgtccaaatcgacaaatgggaaaataagctgaattcaaaaccgaccaaaattttaatccaggagtgaacatatttcaagctcctatttactataatttagtagaaaaaattccaaaaacaaatgtaaagaccttgtcctttattgatttccagaatatccttgtcatttcatctcctgaaataaaaaagcagacataaattcttagcacataatgatcacatcaagttgtaccaacagaaaaaccaacacgtccgaaactagttaattcattattattattattatnnnnnnnnnnnnnnntattattattattattttcaatttagtccatggcactttaagatcggaacggaatccattaaaaaaattacagaaattttcaatagaagcagtcaactgcaaaaagacatagtacggcacaaataacttgagccgaaaagagcaatcggatctaacgacatcaaaacgatattgaaacatcctttctttctcactattggacgttcaaaggaagcgaaacaatagagaatcgagatgaatcagaatagattcagatcacgtgtgagaacagatcggatcacaaaaaagcaaagaaaaacaaaagattgaaaagtctcaccgtccatctcaacgatggggttagcgaccttgatcttttcaaacgccatgatcagagttggaaaggagttgaggctggaggagagttggaaatgaaaacggaggtcagtagaacacacaacaatgggtttgaaggctattttatagtgagaagtagtaggtgtaggcccgcccgccctaacgacacatccccacttctgtgtttttattttatgacaattttctcctcccctcatattaggcgagggaagcgataatatttatgtgatgttctataaattttttgttttttgttttgttttttttttttttcggtaaatggcaataaaatttctaaaattttaattttggtttcacttattcttaaaatctaaatttgtgcggtaaaatctttaataatcatattttgttagcaatttaa

SEQ ID NO: 25176 - DNA, 5043 bp, Cannabis sativa
gaagttagagtttggaagctcaagctttgagctctaatggtgtttttattttttgagccatttattgtgttctactgcttgaattggttatgttggagtgtatgcaggtattctggagaatattaagaagttagagtttcctaacactgaaccggtcgaccggttcagggggacctataacaaccgatcgaccagttggtccccagggaaccggacttctagttggaaaccagtctgccggttggaacaatttttggaaccctaggttttcctgtttttgtgatgtttaggttattaccatgttatccatcgataaggatgctcttaattttgattttaagtccccgataggtatattttagtgtgtctctcatcgaaatttcaaatattgtggtttagagccctgtaaagcgtcgagctgtagttccactcagactgaacgacacacctaagcacggaaacgaggtaagatagcataaagtatatatatgtgaatgtatgcatgatattaattgtttacactactaacactaatgaaaatgtaatttaagggtgttagtacagtgtagggttttaggatagttacactgttaccaacacgagtaccagagagtacgtcgtgcatgtggtacaacacttagtaactcttggaagtacaataatggccctaccaatgcaacaccagtacgaagttggtactctagtgcatatggtacagtggtcgtactttcgttgagaacattcttaagcatttggtaagactgttaatttatgcatatcgatcttactaggtctgtcgactcatcagtttgctaccttgtgtaggtaagggcaaagctaagatggaggagcagtgagatgagcttggcaaggattgtacatatcgcggcagtgcaacctggagggttctaatctttcaactttttttgaactgtgtttcatggctgccctgagattttgtagtttgtaaaaaaaaaatgttatgtaactttatatacaatatatatatattttcattaagaagttttaaactcgggatcccaatttacaaagttttataaatatattataattaaatcatttacaaattagcaaattttaaatacaggcgttacatcatgttagtgggatttctgaggcaaatgtcatcattaatttacctcgatcccatacatggcattaaatggcaccctttcatattcccaaaccattggattttattgtgttttctaagatagatctgagtcattggattgagagcacacaaattgccagtttgcatataaatagagcaaaggtcaaacatacaccactttttccacgcttgcttttgatttcaaatttttgagagagaaaccaaaaccaaaaacttaaaataccaaaagcaatcctagaaaaatctttgcggtgaatgtgcgatacaaccacagaaattctcgatatccttctctgattgcattcaaggttgtatccacaagcgcccttagttctagtgatttgcacatccaatatttgagtcatcaaccttcaagaggaaaattgacgaattgacaagccatcttcagagttttcaggagaagttgtggtcgctaccagaaagtccaacactcccaatcctcgtctcgacacacccaacttctaactcatcaagtaaatttcccaatcttagatttgtgttttaatcggtatctgggatagtcgagttttgggtaggaactgtaagatacttgccatgtattttagggttttaggtgggtttttggttgcctgctccaccaaatagtgcggtacttggttcattgtctcatcaaaaaaaaattaggaactagtagaggccaacaatttaggaatctttgtctgacttaggaaaatttgtattctatgaacactaacttcctattggacattatcattacgcttaagagatctgtcaaggtttatgaaagtattatagtgactctggtttttctatctgggacccttacgatgttggatggcttatactattaaccctttcaatttctattttgtgttcccgatcttatcgccccagagcaatattccttgagaaattttgtaatatcctaaaatgagaaatagattagaaatcttaattaacttaattaagtattaatgtgggattatattatcatataattaattatcttttattctatgtgaataataaagtttaagttctcatttatgtgatagggggatttttgtaattttaacttggtaagggtaaaattgtaattttactatactatgtgctaagagactatattataatgtagtttgctcattttataattttacatgtaatttttgacaagttagtacaatataattataattatgtattttggctcggaccgagttcaccaaattttgagtaaaatgtgtttatggaaattaaatgatgttatatgatggggaatttataattttatatatacattatagtacttaattacattatatgtacaaaaaaaaaattcatttacaatttatcatacattttattaactatgagaaatatattcttaatttttatgtacaaactatatatggtaaaaataaataataaacatacatattttatttaaaaatttgtatttaaattttaataaacacattatattaacatatcatcacatacttggtcaaaaaaaaaatatagataatcacaaacattatcataacaaatatattagattaataattaataaacatagtgtttatacataaggccacatttaattataattttgtttattttttaaaacacatttttcaataattaataaacataagtgtgatttttaagtgtttatttaaataaataaataaataaataaaatttaaatgttttatttttaaaattattatgatattttaataaacaaattatatttaaatgtgtcagaccctggcaggaacatgacctgcaagaccctggcaggaacatgacctgcctgaccatggcagtaaaaacaactacataaatctaccgaaaatatattatacttttacaattatttaacaatatattttttaaaaaaatacttacttattaatccacaatgtaagagagctagaggaggggcgacggttgggctattgggcagacgtctttcatggtggttgggctattgggcagacgtctttcatggtggttgggctgctgagtggatgtccttagcagcggcagagatacagagaaaggaggagagtttttttttggcaaagaaaggggaagtgctgggttgatatggttattagagagagatttgattttttttaggttttgaaaaaataaaatagtaagaggtttttttttttttttgggtaaaatgagaaattattagaatagtattgtataaaataattaatggattatattttgaaataagaatttttattaagtataataaatgatattttccctaacaatatttcacctcacaagatactataaatggcctttagtatttctcaaacaaaaaataggaccatctttattattgttaaaataatgatagataatttgtacttttatataggaataatttaaaataataaaactaaatcatttttaaatatatatatatctattaataaatagcaaattaattttagagtcatgtttttgagttgaaaccatatgcatcccttttgcattaattcatgttactttctattaattcaaatactaagaattgataaaagggtatatatatgtcataattattagttccctcttaattaaccacaaatataatgtaataatattcctttaattgcattattagcaaagcgtttataaatttcaatatgttcggcgccgagacgagaagtagaatttcatcacctaaccaaatgttctagaattctgaccactcatcaccaaactcgatggttccatatctttatttcctagaaaataatactaaatgtttatattttttaacataataaaaacaataaaatagtattaattatgaaaaaaaaaaaaaaaaacttttttaggcaagtagcaagaaaagatggccaagacaaaatttgaactatttgacttttgacctacttatctccaacaagcatgggcggaaacaactaccatatttcgcttattacaacattactcttttcaactatttcacttttaatatgtattgtcttttttttcctatgaaagtaaataaatattaattttttcataaataaaataaatatttttttcgcattatatgactgaataattgatttcatgtcatagttttcacgtttcaaatatactctattgtcttattacgtgagcatgaaaaaatacaaaaactacatttgactcaaatggggaaaaacaattaatacaagtacatgtgtcaagtccatactattaatttcaatatatcacatgaataataatataatttttattttgtttttattttttggttttggtttttttttatatgttgagaactgtattttgatcactccattttatatggaccaaggttcatgggattcccaaatctcaaccaccccccacacaaccatataaatatatatagagatgccaccattaatattgctcaatatcttcaaaacaaaagtgtagcccaatatatactattgtcggccacaatactataacacactactttctcttacttttcagtattactactcaattattataaccatggaaaatctcaaaaattacattatacttttcatgctatggttagtgtccaccattgtggtccgagccatattctccaaaagccgagccaagggtcgacttccatctagcccatctgctctcccaatcataggacaccttcaccacattggtccattaccacaccaatctctccacaaactctcaaaccaatatggacccttaatgcatctctatcttggctctgtcccaactgtggttgcttcctcaccagaaatggccaaagagtttttcaaaactcatgaatccgccttctcgagtcgccctcccccgagcatcctaaacaccctttc

SEQ ID NO: 25177 - DNA, 3161 bp, Cannabis sativa
  modified_base (1605)..(1605): a, c, t, g, unknown or other
  modified_base (3099)..(3106): a, c, t, g, unknown or other
aatgtcattccaatagaatgacttttctatcattttggtaaaatgactattccattttgaaaataaatgaaagaccatgagaaaatttaacaatttctattcagtattttaaatttaatttcattcaatttctatttctactcctattttatcattctttccaaccaaacgctaccgtagtgtgaaggaataaaatatcagaaaaattaccctataatatatatatatacatatatatatatatataaagttctccactgcaagtagatatttacgacatggtactgaacaataaagtagaccgtgatgactttaagatcaaaaccaacctgagatatgtttgatttgttatccgaaaaataagaggatctaagaatctctttagcctcgtattcttcaagaaatggcttgtacattgactggaataaatcaaactgaccccgtacaatcttgttcacctgagacatttattttctaattctcaaactaaagaatcatagcaaatacacacgaatatacacaagaagagcataaaatgcctcttataaccccttccagtatactgatgctatgcaaagttaattaatgaactcacaaatagcaacccacgataaacataagggctcccatttcataaaaatctaaagatgctgacatgaaaaaaaaaaaaaattgatgtacctcatttgttatgaattgaaaatgtaaatgacaaaataaacagttcaataaaacaacttgttggaatattacctgtatatttgtaaaaattaagataaattgcatttagtagtttcttatttagtcttctaactttaaatataaatatatactattctatggaatataatgcacaattcaatcaccatattttacatggtatcagagctgattgtaggattgggagtccaaaattcaaaattcaaaattcaaaattagggtttatcacgaatttgggtttttcaattagggttctttttcggaaaccatatttagaggggtcttttgttaccacccactcaaaaggattgctagcagccgatctgccaaaccccaaagtccggtcattggattcctcccacgtgtgacgtgtggcttacgcgccgctcgtttcttttgccacctaccccatgcatcggcgtgtggaggcacatgtgacagaggtttcgacagcgatttgcctccgattcgtttttcagccccccttaagcctactcacatctgtctcaagttatagtttggtatttctctctactgcgtatatgggtattctttacttatttttcattattcgattcaaccttgtctctttcgatatttgtttctgaaattatgaaagagacgaaatcagatccaaaaccactagttgttttgatgtggttcccgtgatgtctaaaatcacggaccataaattgattggttcgaattattaagaatggagtaagacaattcggctttatctaagtagtattgacaaagataatcacttgactgatgatcctcccaaaaaaaaaagacgattcaaggaaagtgtggctccgtgaggatgctcgcttgtttcttcaaattcgaaattctattgataatgaggtaattagtttgatnaatcattgtgaattggttaaagaactaatggattacattgagtttttgtattctggcaaagacaacatatctcacatatatgatgtttacaaagttttttatcgagcggagaaataagatcaaacttttataagttattttatggcatttaaaaaacatatgaagagtttaatgtgttattaccatttagtactgatgtgaaggttcaacagcaccaacgagagcaaatggttattatgagttttctagcaacactctcatctaagtttgactctacaaagtcacaagttctctctgattccgatgtctcatcttcacaagatgtgtttactcgtggtcttcacacaaaagctacctcttcaactcctcttaatagcgccttggtgagtcgtaacaattctgcatcaagaaaaaactctactccaagtgaatacaaaagaagtaattcacaaagacttgataatcgaacaccaaattctaggagcatcatgtgcaattattgtaagaaaccaggtcacaccaagtttgagtgtaggaaattacagttcaaaaatcaacaaaaatattctactaatattgcaagcactagtgatgcatctaacaactcagtccttatttctgctgataaatttgccaagttctcaaggtatcaagaatcacttaagtcttcatctccttcagtgactgcaataactgattcgagtaactctaatgcatatcttctttccacatcctaaaaatgggtcattaattctggcgccacaaatcatataacagataatttcagtctctttttcacttttcaatctcatagtcccactactggtactttagatgatggataaccatcttctgttcttggatctagcactattgctcccacaccttcgctcacttcgtcatcagtcttacatttacctaatttgtcatttagtttattttttgctagtaaactcactagtaatctaaactattcaacctcattctttcccaatcattgtttgtttcaagatcttatgacgaagaagattactagtaaaagacatgaatctggcggtctatatgttcttgatccacttccaccagcctctattgcttgtcctagtgttagttctgcttttgaggcttagtcatttagttcatccatccctagtatggtaaggtgtcgtcattaaattgtgagtcatgtcagtttgccaaacattatcctgttagtttgagtcttcaagtcaataaacgtactggtgttccttttgagttaattcattttgatgtttcgggtcctcctattatgtctcaacctagattcaagtattttgttacttttgtgaatgattattctcgtgtaactaggttatatttaatgaaaaatcgttatgaattgttttctatattttgtgcattttgtaatgagattgaaaatcaattttatgtacatgttcatacttggcgaagtgataatgtcaaagagtacacatctgctcaatttcaatnnnnnnnnacctctaatggcatgcttcatgaaacttcttgtgttgatactgcaccttaaaatg

SEQ ID NO: 25178 - DNA, 3016 bp, Cannabis sativa
tcattctaataaagtttactatttgtcttcaaaaaaaaaaactaattcaaaaaattatatttttgcacaaattatgtgaaaattcataaaatgtgtaatttcaattcttagtttgatgtcccaaccccacacaaaaaagtggtctactctattgttatcaatgcaaatattttgataacaaaactaaagtaaagaaaatatctatggaaagtcaataactataataaatcctttaacatgaagctaactccttgagattaataactcaatgtaatttccaaaaaaaaaaaaaaactcaatgtatttgtttatacaatataaaaggaacaattatttgtacaggtcttgttcggcttaacttttataagttctttcttagctttcaggatataaatattattttcaaagatgtttggataaaaaaaaaaaatcatttttctaacttagaagttcctctagaattagcttttccataagaatttttgaaaaattatatttaaatttagaataatttatataattcttaacttaatcacaaaatatatatttttatataaaaaatatttatataatagttatccaaattaaaaaatagtttttcttggttagaagttaaaacttttactttgcttatatttttatctatatatgtataagtagaagcttacctaaagggcctataagctatgcctattatcttgtattctttaaaataatattaataaaaacattatttattataataataataagactcatgctaacttttctttctcacctaatttggttgtcaattaggcttatgattatttctctcgataggttatctcaaagttaatactgatacatctcaatcctgttctagtcttggtatggttgttcatgaccattgtgaaagtgttcttgcttcagtagtttggcgtctggaaggtcgttttgacccgaaagtggtaggggcttttgctcttcgaaaagctatgttcactgccagctttttgagtatgatcacatcatctttgagctagattgtttgattgttgttcaaaagcttcaaaaacaagttacttttaaattcttcattggggcttgtcttatctaactttagttgtgttattttcagcttcaatcatgtttgttttaagcagtgttctaaatcttttaatattgttgtatacatcttagttaaattcgcattaattgcaacttgtaacaatgtatggtacagtcgagttattcaagttgtattaattagaaaattaaataaatcgtgatacaaaatttgtatataatcttgagcacaattataattatataagaattaggtatacatacttgattgatccatatcaactatctcaatttgatagtgcaatactatcaactaagtctttctccctaaatctctatatcagaagtatttttattaatctaattattaaaatgtatacaattatgataagacaatatgtatttatagaattagggatgagacttagctatataactttagttggactggatctgcttatcaaatgctttagttaactagaaaagttcacacttttactttaactagattttacacacacagatgctaagctcattaactattgatcactaacaatacgagttaacatagcaaaaaactattaaatcaacctatattttattaaaactaataaaaattaatgtaagcctaagtccaatagtattttttttttttgttgacgtagtgattagaattattcgtgaatttacgctgtaaaaatttggatacatcgcaaaaatctcgtcgaaccaaaatagctcatcgtctaatagtatttagtcttaccttatagaagatactattatttaataaattctctcctaccttttgttaatttcattgctcttagtgttaataattgacactcttttcctcaaaaaaaaaaaaaataaataaaataaataataataataaaaaaaaacattttgtttcaactattttggcatgtattgaataaaatggaaagtagagaaacctgccgtgattggctttggcaccatgcattgttccttagttgacatatgagattcacaaatacattttatttatttatttattttagtaaaattcattcaagattaattcggaacaaagctttataggcaaaataataattttttttatcaattatatttatttaatttaaatttattattttgaatgtatttatatataatattaaagcttttttatttttacattttaaaacagtttttttatatatatttttacggaattctatacagaaactcatatagcaactgacggaacaacttaaattataactaaaatttatataacaacttacataaaaaccaccgaaataaaatttaaatttaaaaaaaattaaacataatatataaagtaattctcctacaatatcttaatgttatttagtttttcaataaataccaaaattagtacatattttatttcaataaattacaccgaatccaaaatacaataatatgatttggtttggtttttgtgggtgggaagaccaactttaattattcaagtctattccacacatgatgtattgctgccccatttggctacatggtcaaaaagaggatataacttcattttccacacaatcacaatgcttcttctaacctcactccaaattattattcataaatgttcaatagtagtagtggtgtctagtaccacttaattacgttatattattattggtataatttaatatcgagtttttacttttttttattcccctaatgatattgatgcctaaggctaactccaataaaactacttgtatattaatatttatcggtcaagtggagtcaaatagagtcataaaataatattttatagcatatatcaaaaatagattacaactagtcctcacaccacttaaagatattatattattatgggtaaataccattttagaccatgtgttttgtaaaagttacagattggaccttgtattttgttaaatga

SEQ ID NO: 25179 - DNA, 1634 bp, Cannabis sativa
  modified_base (1575)..(1603): a, c, t, g, unknown or other
gctctttttcaagcattattgggatattgtaggaagggaattttgtgaagctatggaggacttctttatgtttggtcgtatgcataagggtatcaatgctaccaaatgcggttttaattccaaaagtcctcaatccaaaaatggtttttcagtttagacttatctctctttacaatgtggtttataaggtgatttcaaaaatcattacaaatagaatttggcctatccttcttagaatcatatgtcctatgcaagtagcttttgttcctataaggagtattcaagataacaatgtactaatccaggagattattcactcatttaaaaagaagaaagctaggaaaataaggcctttttgcaattaaaattgattttgttaaggcctatgataagcttagttggtagtttattgatcatgtgctccaaaggctccgaatagatttcgtaattgggtttctcagtgcatcttctcgacttccctgaacatttgtctcaacgaagagcctgtatgaaaaattgtttcctagtgtggtgtcagacaacgggattcactttccccgtatctttttatctgggcggcagaaattgtgtcccatcttctagagatgtctttagataaaagagttattaagggtatcagcttgagcaggaatggcccccggttatcccacctctctttgtggatgaccttatactggtgggtaaagctaccatttcggaggcaaaggggttctgggagtaccttgagaaattttgtaactggtctggtcaaagtgtggataaactcaagacctctattttcttcagcaataatacaagtgagggtatgaagaggggaattaaagatattttggagattgaaggtttggtgggtaacatcaattctctaggcctaccgctttttcgatctaaataaaatgatgcggattttaactttgtgatcgataacctagtgactaaacttcaagggtagaaagttaaaactctctctaaagcgggcagggctactttgatcaaatctgtggggttggtactttcagtttatactatacaaacgaccaagttatctaaacatatggcatcgaaagtggatgcatacattggccagagacttctggtgggaatgtgaaagaggtaatggtgggttgtatttgaaggcatgggatagtgtgtgtctcccaaaatctcttgggggttggggtttcgcaaaacaacagatatgaactaggcttttttggctaactagggttggagaatgcttagtgagaaccaatctctttgttgcagagttcttaaggctaagtatctgaaagataaaccttttatgaagtactcttacaaggatattgactcgttgttctggaaaaacgtggtcaaagcaagatctattctagataaaagggtgtgtaagagggttgtagatgggaaagacacaaatatcttggaggactcttggatcttacatggaaaaacctttaccctcaagcctgcggcaaactatcctctggatatcaattgggtagctgacattttactggattctggtgagtgggacctgttggaaattattttacnnnnnnnnnnnnnnnnnnnnnnnnnnnnnttattaacatcctaaataagaactttctaaa

SEQ ID NO: 25180 - DNA, 2324 bp, Cannabis sativa
cagcatatgagaaactcacttcgaaaagaccatgtggtccaaacaaaggagcaatccgtggagcaacttatgatcttgccaagaatgatccttggaaagagccctttcagtctctcccagaacatgcctttgaggacatagcagattgggagagaaacttgattcaagatcgtgttcgttctctgcgtggcacttgagcttttaggtgagcattcttgtaaagtaactcgtttgaatttttggcagcctgataatgaaaaaaaagatctcatgttataatttagctgaagtcctttatatccaaatatggctctctttggtacttatgggaattacaaattagtttgtgttgttaaccattaaagttgtcattgttttgggaatcaggtggtgaaggatcaattacagaaaccaagttggtgaaatgaaaacttgtcatgatgcaaaggttgaggaagaaactttgggcattaatggatgtagtaggagctgaagctagaacgctcctttatctttccctgttctaagcagaggaattatacttaaactatgactgcaatgtgtatttcaatgattcacacaactaaattaactaggaaactaagaatcgaatgaaaaatcatagggggcatggaataaatttgatctggagattgaattgaggtttcttaaagttgtataaatgaaattttatgactttttttatataaaaacttaaaaagagcaatttttattgaactggtttctggttgtgaaaagagtaagcaatgcagttagctctttttggttaagattttatttttgcttatagcaggtataaaataagtaatatatcttttattttgtctatttttagaattattatataaagaatattttgatgaaagttcttcaaaatgtttcaatatcattacaaaaaattgtgtaaagcaagaattaagtaaaaaaaaaagttctcaaacggtatcttgagaaagaaagaaataaaaacatttttttatttcttctttaaacatctttattagttctagaaatataaaagttatggctggtttttagtaggggtggtaatttaggttatgacaccacaatacgacacgaattaatacgaattattgcgggttagggtcatgaaaaatagatgcgggtcgaactcgaatgacaaaattattttttgggttgggttagggttaacacgtgtcacataaaattgatacgaatagacttgtttatatctaatatattattaaattactatttatttttataaaaaaatatataaattaaaaagaaaattatttataaaaatataagatagataatttatatttgatgttaaaaattatattcattgtattaataatttgtgataaattatttttgtaaaaattataaatacgataccaattatgttaattaatatatattgtaacataagtataattgacacgcaaatacgacaggccaacacgagaacacagcgagtcgagttaggtttaagatttcttgacacgaaatatatataggccggattaggaccaattaaacatatcaatttatataatacgaagttaaatatgacaagtcaacacgaattgttacctctaatttttatcttgttactattttcttttcaaaactgaacatttatacacaataacaaattatattgctccttaatagtatctcttacaaatatgattatatattattttaatttaatgcaatgaccaatttgttggtgaaagtccaacaatgtgttggtcataataaaaggaaaaatttctaaatttcttctaaccaaataatttcgttttctaccttagtgaatatcttgttaaattatgtgttacattaccattttacattacatatatgtagtaaaaataactccactaagagacatccttaaaaaggctccgaacataatttacaataattttaacagtcatacatcattttaggtaaagataacttttttagaagataaaaaagtagacaacagtcttgtaaaattccccaaaaaaaatcatcaaaatcacgaagaagagtaccaataacagttacagttacgtacaagagcactaatggcaatattctcattattactgaattgtacacttttagtttgtaacatgagctgacttttgggcttttaaactgaattggtgtggagatagagataaatataaatatttaaagggaaatttatatagtatactaacctttgttatttttttacaaaaatactgtcggactgaattttttaattttttaccgtgtttttttataagtttcatactccagtatactgtgttaagttt

SEQ ID NO: 25181 - DNA, 4610 bp, Cannabis sativa
aagttttgtgttacgggttgaacttttggtgttcttggtgatattattggtttggtcaattggacagtttaggagctagttgataattagattgggatttcggggtatgatggatcttacaggttcaagggacgatggggttagagttgatctggaacttggggtgctaacaagtgatgaagagtttaataagacccctgtttcgggttctaaacaacaggctaagaaattgatagctaagttttgtggtggttttgttgatgggttaatcaaagctgaagatggggtgagtcgtgggaatgtcaatggagtttctcttgagagtgtcaaggtgacagacaagatgttggatggagaagacactaatggtcttgcagagaaaacatcgtcggtgaaggagaaacctccaaagcctcctagaccccctagaggcccatctttagatgcagctgatcagaagcttatcagggagatttccgagcttgccattctgaagcgtgctagagctgagcggattaaagctgcaaagtcttcgctcaccactctcttctttctcgtgatactctttcatgataaatcatcaagaagttctaccgagagtctccaaggaccttaatttcgtgtctgcaggtgcaacagaaggtggtgggctaatctcaattcagttctatcaaataccatcagcaaccatacatctcccaatatgtgatgttctttggtaagtgagaggtttattagttaagttgaagggttttacaagaccaactttgaagttcaaatgcaagctgtttgatcagctttgccttgtgaagctgaatttgatgtgtttaattgttccctatttgtatattttcttcttttcaaaataacaatgtgtgtacaagaaattaaaggctgctcaattcacaaaccataccatttcaacacaaaaataaatacatcaacaaaaagcatttcaataaaaaaataaaaagaaaagaaaagaaaattaccctccaatagctccaagaagaacagcatcagattgcttagccattgagagagtttcttctggtaatgaaacaccagtcaaatccaaggcaactccacccacagccatttcttggaaactcaaatcaatccctaattttccaaatgtccccaaaatttaaattcaacaatgaaaaaaaaaaaaagattgaaacttttaatactttatggaaaatgcaaatgtgggcacattatctcaaaataaactaaactaaacccaatagaattcgaaactcaaaatcatcaacaaaagcaaaaaagattgaaaactttcgacacattcaggaaattgcaaatgtacccaaatggaataaaacgagaaaaatcgaaccttggagagaagcagtgaggttaagaacatttttagcaacagagataatctctggaccgataccatctccagggagcaaagtaatggtgtaacggcgcttggattgggaggaggcagagcacatgatgatcctacttgggttaggcttaggagagtagccggagttaggtggtgcaaccgcaaagggcctcttgaaggtcttcccatagcataattgcagtgtagccgccattgaaatggaactgagttgagctgttcttcttcttctttaagtgtcgagctttcttttttaataagccttctttttttttttttttactattttatcctttaatttagtttttgcaatgagggttttagttgtaatttcacaattttttttagtacaaaaaatatttgtttctctatatgaagaaattgattcgaaatcagatgccgaaatattttttttaacttttttcatagcggtattcgttatagttacagtatcatctctgtaaattttcgaaaattccaaataatttataataccaaaaacagtgttcatgatattccactttatcactcgcgttcaaaataaaatttcaaacatattttcgacactgtaaactatttgaaaatatttaaaaatttacaggaatgatgttgtaagcataacgaacacccgtaacaaaaaaaaatgaaaaaaaatattccgacatatgtttttggacgtagaggttaagtaaaaggttgtaacagaaggttgacggtagcacacctcattacaaaaatgtaatcttctcatcatcataatcatcactcaccatgctattcatctagttttttttttttatggtaaataatataggtgctttaatgaaaatttagtttgatattatatatatagtattgtacattataattatttataacatatggtaaaattttgaatgattcagaataatttataatataaaaaaatattcaaataatttatttcacatttgtataaactaaaaagttacgcatataatagattgtttgaaccatgttttaagtatgttaattttatgatgcaatcttatctgttttgatattcgggagaatttttttaatctatttttttttcatgatcatatatgttgtagttatttaagatatcttataaaattttaatgtaattttttaagaatttcaaaaaaaaaaaaaattaacacactgaaaatatagttcagatttaatgcattcgtgacttttttattttatacgtgcgaattaaactgtttcatttaagtatagatgatgaaaaaaaaagctgacaatacataactaaaaaaaaaaaataatgagaatcttgatgaaatttttttatttataatttgaaaacagtttaattttctgtgttttcatgaaacagtattgtcagtttaattaaacagtttatttttttggtttcaaattatgtgttttcatgatgaaacagtttaattattttttggtttcaaattatgtgttttcgtgcgaattaattatttttttattcatcatgaaaacacataatttgaaaccaaaaaataattaatcatccctaagaaactgaataaatatatattttttatttatataattcatgctaattttctgtttattatataacaacaaacaagagattgaatgtatatatacacataaaaaaaattgatcaagaaagataagatcttcattaatcaacaagcaaaatagtcaacttacaatctcaacacaacacaagcccacacctacaaagaggttattttttaacaataataacctctcctcattttcaacttcttaaaattaaaattactaaacctatactttgcatcttttcttatcatatctacaatcttttaaacactataagaaaaaccataaaatacacgttttctattttgccacacataataaaacttcattaatagtttctcacacaaaaaaaattaaataaaagaaaaagctaaaaataaaacttcattaattacatatatattgtataaatgtatcatatcatcatcatcatcatcatcaccaccaccaaattttgacagtaccaataaaaagaacatatatattaatgtctaagaaaattattgatcatatatacaattaaaagaaaaagaagaaataaagactaaaatcaaaacttcattatatattgtgtagaaatgtatgttctgatcatcatgatcatataaccaaaattcaaaaccaagaaaaaaaaagtactaaaataaagaacatactatataatatatatgtatatatatatattacatatcatcaagcttgttccaaaataaatctatacgtacggacatattatcactaagaaaatcaacagccataggactcttacaacacacacttggatagcaaaccctagcatgatttacaaaccctaaaatctcaacaactcttttcgaaatccatttttcgacatgttcaaggaaaatcgaaacctcttcaatgccccactccctaggaagaacagggcaacacaaagcagcttccaagtaaaaaataagaaaaaacaacttatcatcacacctctcctcgaactcatcgaaaatttctttcttatcagtataaatcgcatcatcacttgtagcaataccctttcctttaccctcgcgtgagaagttgtactcatcaatctctcgtcttagctcaaactttaccatgtcaagaaccaaaagaagtttcttgatgacgatgctgttagggttttcttcgattcttaatgactttatcgagtttttgataaaccctagcctttgttcttggttgtagctctcgtagatcaagatagtttctacaacaactgaacaaatgcccttaccaagatcaagaattcgcaattttgctttctcaatgaagtctgccacggtgatcggttgtgatgataagaaaaggttcgagttagggttagggttagggtttagatgttgttgttgttgttcgagaccgaatagtaaccctaaaaggcttatattgttttcaatttttccttgtttggattcaatgttccaacgcttcacatacaatgcaataagttctttgcctttgaattttcttgaggtgaatatgtcaaattcttcttccatttcatgtaacaacgatttgatgctcttttccattttctttttttctttttcctttttgatttcattttccttctcgtccatttccatgatcaattcatcattattagtttccttctcgtcaagct

SEQ ID NO: 25182 - DNA, 2957 bp, Cannabis sativa
taagatatttttttaatttaaaaaaaaaattctttaattttttggtttaattattgggtttatttatttgttaacgtttaacgttaaagactatttaattgtgtaaggctaaataaaaaaagaaatcgttaaaccaagaatcgttaaaccaagaatcgttaaattaattgtataaagatatactctgatgctccacatcaatactttttttttttgttggaactcttggatcaataatctgcctaactacaatgaacagaacagtctatgatatgaatgttgcaattaaattttttctttcaaaaagtatatcacctaacaaatgttcaaaataaactaaaactctataataacacatatatgttatcagttattttgataaaaattcaatgtgtttatatatttcttttcaagaatgaaaaacagaaaaaagtatttccgttaaaaatatctcaaaacataaagacaagaattgaaaagttggcctaatgggtggatccttcctagaccatcctccataattcgtacaattttttcttaaattcagttcttcagtcccatcagccaactcagcaatttgaccacccctaaaaataagattacaccaaagctttctcaatcctcagagaccagagccaatccccagccagtcagtcatctcatgatgttagggtgccagagtgagtgtaatccattaacaggtcactgaggtcatcatatactttacaatttacaagattcattattcactaatcacatatatacaatttacgaaaatgcagtaaaatgcctagcagttaagttgaaattaggggcaatgtgattctaccccacaaaacatcaaatccaagttgcttgttcgatatacatacaaattaaacatagtaaatatggctcgcaatgttaataaattccagaccatatcagaccctagtaatgtgatcacaactcacatgcaagtcaatcaaccacactaaattgtagacccaatagtgagttatgacaagtcaattcgaattcatgtaatatgatatatgatatatcgacctagtaatgtgatcaaaactcatgtaagtcaatcgacctgttgactaagtaatgtggtcataatttgcaggaaagtgtattcaaagcccaaataataagatataaattgaagcagaactgccattagccgagagcaattgaaagaaaacgtgtcctgaaaggcaagaaatgatcggaaaggtgcagcatcaatagtaggctagtggtcaaaaagtgggtcataaacgtacgtattcaactttctaagcacattagaacatccttattacggaacatcacttaataaaggtcaggtcaggattaatgatgaacacaaacaaagaatttgagacagcaatcagatgcttaaacaagcatttaagctaacataaacttaagctaagtatcagttcttattaatatgcaataaaaacatgaaaaggaaaaaagattaaatttcttccctcactgcaacgcaaagtaacttctcaatactttacaacaacaaagaaccaatcttcaaaacaataattagtatgaatcaaaataaagtacacacctttacggaacataatgcgaaaaaagcttaatcaattgcaattctttccatgatatctgacattgttacaaactcgaactagaaaaaggttagcaaggaagaaacaaaaaagaaagcataaaccttttctttttttctcttcatttcagatcgtaggacgtattctaagtaagttaatgaatcaaagggaaaaggaaaatcaacatacaaactagatgaagaaaaagccaattaacaattacccatttacagaacaaacccgaggaacaagaaggcttcaacatcaccaatgatatatcagtcgcttgataattcacaacactcattcccttcgttaaagaatcggaatccaatcacatccgccacaataacgctctccattcaaagaataatctcaacccaacaacaagattaggcccaactataaagaattgatgagaaatctgatacacacaaaaacagaataaaaacaaaaaaaaaaatcaagtttcatgaacaagcttcgtatctgtcattgacctttaaaagctgtcgcctcttgaataccaagaagcttataaccccaatctgaagaatggcggcgattccagagaacaacaacccgatcttcttccctgcattgatcttgtgttcgtgtggcggaggtgggggtggtggtttacgcttgtggttaaagggatgtctatgaggcgaattgatcggtggcggtggtgatttattcgattcgatattggatggcagctgcggagatgcaggaggtggtggtgacttaggcggagaaggaggaggaggagattgtacaggtggtggtggagagccaggaggaggaacagacggaggcgggggtgatggtgatggtgaaggaggtggtggtgacccaggaggaggaggaggagaggagcgtggggacggaggtggtggtggagctaaagccagtggcggtggagggttactcgatccacctgctaattgggtccctgactcgacacgaaggacgaaaacgaaaatcaagaacccaaaaaccaaggtcgagaattgcggttccatgaaacagcaaccacaagattcgaaacctcaagaaaaatcaggaccctgatcagggtttacggagttttctcgcatctgggtttcaacccccttttgacatccgccttcttagctcaaaattccaagagaaacctcgttatctacggatattagaaccacaaaactagggtttgagaatcgttgtttctttttccgtgaatctgggcctctctagtatctccaaaggaatcaacgaaaagggtctaccatttcagtctcaaaacgattaatttctgggcgaatgaaagggaaataaaataagaagttggtgttgtcaagaaagtgt

SEQ ID NO: 25183 - DNA, 2882 bp, Cannabis sativa
tgggcgaggcacccttatctgccataattatgcaagacattttagttgtcgacctgccatcagcttacaatatattgttgggtcgtccagcattgatcggactagcggcagtgagttcgatcaagcacctatccctaaaattttaaacaccaaagggtgtgggagtggtgcgaggcaataaaatgctagctcaagactgctatcgcatagagctacaacatagaagagtcggtcatcagttaattgtggtcttggcagaataaacggaaaagagagacgaggatcttgacccccgactttaagatgaaagaaacttattaaaaccaattgaagaatttgaagaagttgttctcgacctaggaaatcccacaaagtgtgtttacattcggaagatcctggacgaggagctaaaatagcagctaataagtttcttaagggcgaataaggatcagttcacctggagccatggagatattgtaggaattgaccctagtattatctgccatcatttaaatgtcgattcaaactacccagcaaagaggcagaaaaggagaccttttgattccgagagacaaggggcgttaaaacaggaagtggacaagttattagttagtgactttatacacgaggtgttttatccctcgaggatagccaatcctgttctcgtcccgaaggccaacgaaacttggagaacttgtatcgatttttctgatctgaataatgcgtgcccaaaagactgtttcccactacccaggattgaccagttgttggatgcaactgttgggcacgagcttatgtcattgatggatgcatactctagatataaccagataaaattgtatgtcccagatcacgaacatacgagcttcgtaaccaacatgggactctactgctacaaaatcatgtcgtttgggttgaagaacgctagggcaacatatcaacaattggtaaacgagatgttcactaatcagattggacgaaacatggaggttcatgttgatgatatgttagtaaagtcagtaaaaagtgggaatcataccacagacctcgcggaatgcttgaaaatattaaacaagtataatatgaagttaaacgcgaaaaaatgttcctttggggtatcctcagagaaatttttgggattcatagtcaacgcaaggggtatcaaagcaaaccctgaaaaaatcaaggcattgatagacatgtcatcaccaacaaagcctaaaggagtacaagccttaacggggaggatggatgtactcaacaaatttatttcgaagtcaactggtaaatattcgccattcttcaatgtattgcgaggcaacaagaaatttgagtggatagaagattgtgaagaggtttttcagaacattaaaaggcatctggcaacgcctctagttttggcaaaaccaataactggagaaatgttactcctcgatttggctatctcggaagatgcgattagtgcagctatagtgcaagaagagggtaagcaccagccacctatttactatgtaagtaaaaggttactaggacagagtctagatatccccctctcaaataactcgctttgtgcctagcccacacgtctcacaagccccggccgtactttcaggcacaccccataaaggttttaaccaattagcccttgagacaagttttatcaaaaccagatgcttttggaagattgataaaatggtgaattgaactggggcagttcgacataacataccacccttaaacatccatcaaaggccaagccttggcagacttcttaatagaaggcataactctagacgaaattccacatgttcaccgagacatggagagttgaaagttatacgtggatggtgcatccaacgagcaaggttcgggtgcaggggtaatattaatttcacaagaaggatttaagtttcattatgctttgagatttcaatttgacgcattcaacaacgaggttgaatatgaagtcttgatcgctggcctaaaaatagccgaggcgttgaaagtcaaaagtctcatctgccatagtgactcacagctgattgtaaaccgggttctcagggaataccagaccaagggcctgaaaatggctaagtgtaacgccctaatctatagggacgccacgtgtgtgatttcataaactagtttaatagtgatagattaatttattattaaaaaccttgataatattaaaaacttgactaaaagaaaacactaaaaatggacattataacagcataaaaaagcgtgttccaggaacccctgttatagaaagttttataaaagaactatatatgatgatgcctcaaaaacataaaattaaaatacataatagatacagcccaaaacaactccgggcaacccgacacgcaggccgacattgtcaatatgtacattgctggagaagactatcatctcagggttgatctagcttttatttgcctttacctgcaccacataacacccgtgagtcacaaggactcaacaagaaaactaataataataatcatatagtttattattcgaatactgtcatttataaacaatcagaatcaaaccaccacgaattgttcataagttgaaatctaaatcactattggcatctaccacgaataaacatcagtatacaaatatttggtaatacaaaacaattatacatataatagaatttatattcatttaattatatatatgttacctcttaagtaaccatcttcattacatcacgttgcctaatcaggcaagtcgatactttaatctgaaaatcctgtattgcgttgcctaatcaggcaagcctgtgccatagcctatgtaacgccctgtccagctgggacgccacgtgtgtgtgtgtgtgtgtgtgtgtgtgtgagatcggaagagcg

SEQ ID NO: 25184 - DNA, 3181 bp, Cannabis sativa
tattattattataaatatatatttattgaatcttgaccttaaaacaattcaagaactttaataaaatatttaccttaaagtttgatctgagactcgtaccgataacttataaaatatatatataagaagaaaagaaaaagaagatgaagagagaaagaaaaattgtgtaaaaattaagttatttattctaatagggtgaatttttttttatacaaaagtattattaaggaaataaaaaattaaatcaatataataaaaaaaatacgtgataattaatttggtgatttgaacctccatatataatattttataccaaatctattttttttaaaaaaggaaaaagaatatatatgcttgtattaattggtggaaaatatcctttgtaggtcatggcagcaccttgattgattgagacataaatattatctcagtactttttagagcattgctatggccattagaaaataaatgggggtgactatacattagaaaaacctagctaaataaatctgaagtaaactatggctaaaaaaaaaaaaaaaaactatggctcaaaaaaaaaaaaaaaaaaactatggctcaaaaaataaaataaaaatctgaagtaaagtacgactatttattttttttcaagaaagtacgactagaattttgtccacatgtgtagtaaccatacaataatttaatttaatttagtatttattctattttagaaattttaaaattttgtctccaatgcctttcaaaaaataaataaataattaaataaaattttgtttccgaaagcataatatagtttgtatcaaattcaaaaggtctttaattaaggcaaagtgaatacagagccatgtttcctaagcttccgatatttcttctcttagtatcaacattagttccacttccacaagcattatcccaagctcaacccaataatctgagttttgtcttcaatggattcaagtcaggcgaccttgtactcgacgggatagctgaaataacctcaaatggcctgttaaagctcacaaacgacacaacacagaaagcgggtcatgctttctttcccaacccagtaacattcaaggcaacaccaaacggcaccgtttcttccttctctactacattcgtcttcgccatcagaaaaccgtacccggatttgagcggccacggcatcgttttcgtgattgctccgacgagaggtcttcctggggctcttcctagccagtaccttggcctttttaacgaatccaacaacggcaacgccacgaacagagttgtaggagtcgagctcgataccattcaaagcactgagttcaatgacatcaacgccaatcatgttgggattgatattaacgatttagcctccgttaaatctgagccggctagttattttgacgaaagaaaaggtgggtttaccaacttatcgcttataagtggtaaatcgatgagagtgtgggtcgattatgacggtgttaagaagcagatgaacgtgactttagctccgtctgaaggtctcaaaccccagaaacctcttttgtctttgacggaagatctttccccatttatgaaagacaccatgtatattggtttttcttcatcaacaggctctattattagtaatcactatgttctgggctggagctttaagattaatggccaagctcaagaacttgacttgtccaaactcccaaagttaccaagggtcggaccaaaaccaaaatctaagcttatgacaattgggttaccagtgatgttgactagcttggtggctttagtgatcttaagcttagttcattttatcaaaagaaagagaaaatttgctgagctaattgaagattgggagtccgaatatggaccccataggtacaaatacaaagatttgtatatggccaccaagggtttcaaggacaaaggtttattgggcgcaggaggatttggcagtgtctataaaggagtattaccatcaaaaacagagattgctgtcaaaagagtctctcacgaatcaagacagggtatgagagaattcgttgctgaaatcgccagtcttggccggctccggcacaggaatgttgtacagcttttgggctattgtcgccggaaaggtgaacttcttttagtctacgattacatgcctaatggcagcctagacaagtatctatatgacaacccaaaaacgacactaaattggagccaaagatttcgagtcataaagggagttgcctccgggctatgctatcttcaccatcaatgggaacaagtagtcattcaccgtgacgtgaaagccagtaacgtgttacttgatggggagttaaacggtcgattaggagacttcggtttagctagactgtaccaccatggaagcgatccacaaacaaccagggttgttggaacactcgggtaccttgctccggagcacaccagaaccggaaaggccacacctaacgctgatgtcttctcattcggagctttcttgctagaagtagcgtgcggacgacgacccattgaagggagtagaacagagacaggggaggagcttatactggtggactgggttttctcttgttggtgcagaggaaacattatggaggccatggattcgaatctaatagaattagattctactgaagctggactggtattagaagaggaagtagagttggtattgaaacttgggttgttgtgctcacattcagaaccgaggatgagaccgaccatgaggcaagtggtgtcctttttagagagagatgcaccgttgccagacctgtcgacaacagggctgaccgcagcggggttgactttcgggcaaaaagaagggtttgatgactttgccatgtcgtatccgtcgtctatggcgtttcactctcatgtgtccacagcttctgtggctgagtctcttctctctagtggccgctgagctgaatccgagttccgagttgagttctagcgcgtgaactgtgactctgacgtgcgtgaacttattttggttatctgttagaaacctgtacattttgttgctttgttgccataattgtacgaagatataatgatacttacacatgtttagtttaattatttttgttgtataaaattagaaatgtaatcgtgttgctactttctgtaaaagtatttattttccctgtctttctttttttataaaatgctattatatgtttttttttttttt

SEQ ID NO: 25185 - DNA, 1916 bp, Cannabis sativa
accatttctttcccttcttctttttcttgttgctactgctattattgcttccaccgctctttgcgctgctgttaccagcttcggaagatgggctctcggtgttggtggagttgacgccgttcatgttctcaaacatgcctgattgcaccgcgttctgaaaccattcaaagaattcttcctctgtcatgcagtcttcgacgttattcgctggcattttactgcctttttgtcctgaacttgatccctttccaacactatgcttggtcgttagactcgtgttcacatgaaaactaggcttgtgagtgttggccggacatctcattccctgtgacaaagttcggaaaacaaattaattccatcacaagattgttttggatcatcaagaacttcatttagctaggattattttaataaatgatgagaaagctgaattacctgacagatataccattctgtagcattgtatactttgctatccgcacaaacaaatgcaacaggagcatctacctgatcagtgagcactatgttaaattgcataatcgaaaatcgaaattcctaatcatgtcgatgatataattattatggaactccatctcttgactttatcatttcgtaagttttccagtcattcatccccgacgaaatgtgaatatcgttaaggtaattaataagcaataataacaatcttaaacttgtactttttagataccttctgtaacaatccaaaaattaagggttgcgaagattgttctacccatccatccccatcccttgcttgatgaaaatcattacaatccttcaaaaagaaagaatacataaacacagtacagtaaacatctccatgttgtgtaaaaccacatgttaataaaaataaaatgaagatgtaactctgaaagttgatatttcgtatgaaaccaaatgaaaagccgaacggtaaatgaacaaacctggcaccatctagcttgagactttgatttcctagtgagtacccaaagatgaaagttgttgcacttcttgcaagctattcttcttgattccccaaacagatcctcaccatcagcatccgaccgtgccattccagaagcaaataagccatgccctccattctagaaaatatattgcataaaatggttaagtaaaagaagaggtctgcaaaaggaaaaccatatgcctttccctttccctatccctatccctagaaaattacataaactttttcggtttagtgacaagattttcatcataggttgcatgcactatgtttcgggcaatttattttagcaacagttgcacaaacagagtgaattgaaggtcataaaattgacataattcaggctctaacctttgcatttttgagtttaaattttctataatattataaattacttcagaatcaatgcctctatcagatattaaattccattagtttgtgtcaagaacatattaagtcactaattcaaacatctaaccaaccatgatcgagcttgataagaaaccacatgtgtaccttaatataagatcttgtaaagtaactgatttctacatgtaaaaatttatcacagatattgggctgaattcctacaaaatcgaaaggcactgggaagctgaaatggaacgatatgcaaatttataccttttgtgatgtactttggaacctccggaaaatgtccagtaactcctctcgtcttaattcatcatcgtatgtttttcgcttcactgcatcgagcaagaccttgaacaaatgaaacaaaaagggtaagcacaaaatatcagactggaaaaccgaagtttgaattgaatcttatgagaatcaaatttaataacttacctcatatgcattctgaagtttcttaaaagcttccacagccttttcatttcccatatttttatcaggatggaccaacattgcctgatga

SEQ ID NO: 25186 - DNA, 1882 bp, Cannabis sativa
gacagtatttttgtaaaagttaagccaaattccttaagccaaattccagtatttttgtaagtttcccattttttttccctatggcccactttgtttcagggcccgccctggctctctctactcttttatgacggatttattgtatttcacaggataagtagtgagctcggggacagagatcctatatttatatacgtgagaccttccatcaaggttcctgttacaattaattgtcagaatattttgacaattaattttagaaattaaatcatgtaactaaactatttagtaattaaatttgactataattaaaatattttaattaattagtaaataattaattatattatattttataaattaaattaaataaaatattttatttgttagtctataaaaattattttaatatatataaattaatattaaatataatatgatataaaaatatatgcaaaatgtaattcgatatacccacatacgctgagtatgtaataattatgcttgtgtttatcaaccaattctttaggcaatggttgccatgactaaaggggaaaaattacactacttaaaattgcattttgcatgatcagttttgacaatgtgttgagtttatagttttctaatctctaaaaattacaatgtgaagtgaggactttagtttcaaataataattagaagaaagtgcaaaaataatagttttttcagaggtcggagagtatatggtaagatgcgtgacaataaaaggagtaactcatacaattttatttatagtattaagttctcacacattactaatgagagattctttaacatcccacatgttggttatttttagcacactaattttcgacagatcgattactggtattttcggctcactattctaaaatcataaacttttttgcccttctttttggaccgattattaaatttggataagatactcaacttagaatatccttgccattagtttaacctacagtgtctgatattgtttttactttaaaagggtacatggaaatgttcacttaaaatgttaatgaaactttcatttcatctgttgcaacaatgggtggtctggtgtaagtaaatatgtaagttggataggaacaatggctgacagaaatgactgtgcaatcagaatagttgatagttaatcctaagagctttttacatcaataaatataaatgaatggctgtctgtccaaagcattaactctttttttaaaggctgaacagaacagaagaaggcccaacaatttaatcagtatccctttgtcctctctgcttcagatgctcctttctggttccaattgatcccacttttctttttcttcttttgtccccatctcttttcttctcatacttcatttttagcttcttcttgcatttcttttttatcaaatgagctgtgaagcagagcttgtcagcatcatctattgtctttgttcagcaacataacatttcactcattaaaattcaaattctatgctgctactgttacataagatattagtctttatatatatatacatatatacacatgaatttaagtgtattgtatagcatactaataatacaatagagatggtgccaatgtcaatgtcattattagagtaaaatggggctcaaattttctgttgcagcctgcctcacttgagccatcatttattattgcagagtgaaatcattgcagtctttagagtgagaaggctcaattatcatatggtatcacccttgttcttgtctctcctatttgactttcaacttcttcattttaaaaagaaaaagaaaacttctattcaattttttattttatttctttaataaaggaaaaagtagtaaagctttattgttatattaaacctttttttttttt

SEQ ID NO: 25187 - DNA, 1093 bp, Cannabis sativa
aattagtcacaacttttttatctttacttacaaattttattgtgattaaaagtaagattttttgtagtgtaactagagtctccagtaggaacatgaagaatgtaacgtccccgcttcaagcctctattgggccttcccccatggactaatgactcttatacacgagtacgtcactttgactacttcctaaattgacgactggctctacaaactaacactagtattttctggcatgctttgtcttcactaacacacgccataagaaagtttccaggaggtcacccatcctgaaattacctcaagtcaatgtggagttcttttatgataggctaccaaaaaacaaaatgcaccttgttgatatgatttggatactcgcgatggtggtcaaaaaagtgttgaaaaatcagtggcgatgtttagaaatttggtggtggtgattgaaaatcaagtagacacgacctttaattttaattcgaaagtaatgttatttgtggattttattgttgaaaacctattaatataatatataggtgtaggattaagtgggtttgaagttagaaaaataattaatcatttaattacggttttgtgggttttggactggacgaaggcagtgttaaactatgagacttcaatttagggtaaaaatatcatttttttcaaagaaaataacacttatgttttcggttatttcacctatgtgttccgttatttcaaataactgaagatataagaatttatttgaatttgttttatttagtactactacacaaaaaggagctttatcttcgattaaaaaaaatctcagtaccaaagattattaaggtgaagacataggtccctaaaatactgaagatatgcaggggaccatcgatgtcttcaaaataattgaaaacgtacgagggacctatgtcttcgatcgatcgggaaatagctagatcgacaagaatcactataactacaaatttaacaaaaaaaaaaataacatttaacacaacaaaatcgacctttagaaacacaagccgtcacaccgaaaaaccacacactatctgaaaactaagatgataacaagtaataataataaaaaaaaagt

SEQ ID NO: 25188 - DNA, 3276 bp, Cannabis sativa
  modified_base (2151)..(2151): a, c, t, g, unknown or other
aaaacttgaattgtttaaatgtactactactaactagtaaatagagagaaataagctaaattaacccaaccaacctgcaagaaacgtaagatactatatccatagtacaaaattatatatattaggtaagacacatggaaaagtgacaaacaaaaatagtgataaaaagagtgcatttttctaatgaacataaacacaaaaaaagaaaagtagttccagctcactattgacactccaaatgatatttcaagttggtgaattgtatttctcaatattgtaaagtagtagcatatttatgttatatatcaactcttcacatcatacgagaaacatcagaaaagccgagtgtgagtattatacaataaacattgaatcacatctttgaatgtaacgaatttcctcaatatacattcacgagtaattaattaaaaataaaaaatgtaagtataacacagaagcttcaatccacattatttttcaataatgagtgaaaaggttcgagtataagcatataaaaaatcacatatgaaaacaaaagcaaaacataactaagacataaaactccaatccttttcaagagtggaaaacacaatactatcataatcttataaagctactagccaaaagggcaactaaaacctttgcaaatccttaagacctacacttaggatgtaacaagctaaaactaaaagaataagcaactgcagttttttgtccttttccgaaatcaacaattcttttgtcagtagaatctaaagcctacattatagaacgaaaaaacaaggaactacatgccaaaccaacatacaaaacatatgggaaggaagctagcaatcacgcttttttcttttctttttcattttttatgaaaaagagacaaagggtcaccagttcaacagtgactttcttccaagtttatttcctcacttgtggcagaggaaaacaataaccaacataaatacagataaaaattatacaaaagcaaatacaaagttacaaaacaatcacaaagctggtagaaaaaatttccatcactgacaatgaaaggaggcgcacaggaaagggaaattctatgatttccttgtaattaactttatctacaaactccacatatcaagtttctagcctttcccaaaatcaaccaatttctaagtacattaactaaatcaattaataataaaaatattaaaaataatcagcaagagcttagaataattatcctataaaattttctgagagaactaaattttctttatcctattagatttcttttaagaaactcactatctattcacaaagatttgatataataatacagcattcttatctactcgcattgtcaaatagtcatagaagagagaaattccacattggagtttgttgtatctagctcttgctctgttaaataatgaattggagaatgatatatgttggatttgtagagcaagaaatgagggtgctaatgagttggttaagtgagctcggtttgatatctgggaggtgagtccctatgtgatcattaatctataaactctcaattttctcttataaatttccttagccatagcaaaatatatatacatagcattctttagttcatgcatagatttaagaattgatataacaatgtgtaacatttgatgatggatatatgatatgagaatcaaaagatgaaaataaaaattatttctatcttcaagtaaaagacaagataataggaaaagtaatctgaaacatgagcgacactatatacaacaacggcagaaacgaaaagcaaacagaaacaacaaaagatgaaacatatcttctggtacaaatacaaacatattcaccaaaatcctaaaactacactcacatttatcccaatttcctgagaataaaatattcaccacaatttcaatctaaagacaaaggaatcttaaatgactctatgacatgagaatggaaacatatatctatatatagtttagattatgaaagtattgacttcaatattcacatactgatgccgtattgccttgaaaaagaataggaagagcatacatcatatcttatataaaaccaccaaattgacatttattgtaaaaatcaaaagcaaggggccatatgccattcagaacaaaatgatttgaaatatatatatatatatanatatatatatatatatctaaaaaaaggtgaatatacattgggtagacattcaagatttcaatgaaagagcatacatcataaacttcaaaaggtcaacaaagcaaaacaagaaatcaaactaccgaaaccaacttaagagcagcaagaaggaaggaatcaatggcacaaatgaatgaatttaaacacacgaagaggagcccatacaatgacacaacttttcctctttgaaaggagacatattttcgaaccaaaaaaaaaaataataaataatgaaatgaagagtttcacttttacgttagttgatgatttaatgactgactcataccctcacagtcgatcttctcatcattctccaaagtattcttctcatttttcgacattctcaggatttaatattataaacatacccttttaaatttgacaatatcgcaaatcaattgggtctttcatgaatgatttggtggagattagaattcgaaacaacccatttctgtttcaactcgcatcaatctttatattcatcatattagatcagatcaaatgtttaattttctatgtaaaagtcatttcacttcacataacgcagccagcaaaacaaaattaaagtatttaattgcgtgttgaacaaattatatgagctttaaactgcttcacttcagggtttattgtttccacaattaggtctattgtgtaatattgggcggattggagtgaatctatataagagagaagaacaaaaagaactatatatacccagccctaaaatctaaaccctaaacggtgcacgttttggttgatattaaggatgaacagtattctataggctctttttaataagaaacagaaaatattcaggcagagagagaaggaaaacatatggtgaaattacctgaactcgacggaattcggcttcagcggcgatttgttagctgaaatcgcagaggattaagagagagaaagagaaagagatcgcgagaatagagaggagagagaaaggaaattaaaataaatgatgcaatttcaggtttaggaattgggctgggctgcgctgggtccaaagcagtaagaattattttgggataattaccccatattgaaaattttaatttttttttatactgtggg

SEQ ID NO: 25189 - DNA, 5273 bp, Cannabis sativa
  modified_base (2496)..(2516): a, c, t, g, unknown or other
gtcacttttttttttccttgtcatgccaccatctcagattaagtacctctggcttctttttgatctggctgtgggtccagataaccttgttgaaaatgggccatacaagtaagtgttttgaactcttaagcgttatgcttgatggaaagtttaatcaatgaagatgaactgtatttacgatagtttgtttggctgcatgctaaaataatatcttctatacaggtatgtgtttagcactgaaggccacatattgccatcaaccccacaaatatctcttgtgcatgaacattgttcgtattttggtgcgtattgtagaagtggcaacgtcaatcaggaagatcataaatcagatattgctagcaatcttcaagaaactaatgacagtaggtcatttggtagctggtctgattatggatttccatcagaaagcacttctgattcatctcctttatctggatttgtcaaggttagtatttaatttctatcttttaggaaatttttaacttctttccttaatgcgagttttttatgaatatgaaaatatacttttaccaaatttatttattatcagaattacttacatgtgaggctctacatttaaactagtttaatttttaaagattgtatttaatgattgaatgctctgatttattacaagggggaaaaagtgtccccaaaatccatgtgcagcattaaattattggttttttttttcctaatggaaaatatcttctccacatggcagggaatttgccctggactaactcatgggcagaaatttggaatatcatatgtcatgtcagcagatatacaacatactaagcctacaaataatagagatagagaaccaacggtttctcaaagtcattcagttaatattcctggcgaaaattctaattatttacagtcagtaaacaagcaaaatcatgaaaatgttgagacattggatgaggggggaagttctaagaattattcccccgaagaatgacaaatgtgtctatgtccatagaaccttctcaaattttggtgaatggttggaaggaagcttggacgaattcgggtttcggcccatttatgaattcttccttcacaaagatcattggtaattgcagaagtgtaagacatttataccggcagaagcctgaataaccgtccgatgttctctgcatgtaacttttggtcataggttataatgattgatttaagataaggtaaggtggtggatctagagtttatacatatggaaagggaagaaaaggggcctgcctggcaaatcttctatagctggatttactgccccacttaactggaacactgctcttgtaacttgcaactatagctcagcaacattgaatctacatttattttccccttttcagagatggaatgtggggtcatcatatcagattttttgaacaattacaagaaatcatgaagaacagtcaaatgtttgcttaatcagggattttgtttttgtttgtttgtttcatttcttggccctagtgaaaacttgtacaggtgcctgaaatatattatgttactaaccaaagaaataaaaaaaaaaaaacaaagaaaagaactgctccctctctctataattatttttattgtttatttacttgtattcataaacatcaaatttgattgaagatgtattgatgtttgcctaaattttttgaaagaaaattgttatgtggtatctcttttttcattgaatttctgtgactagttcctcactttgatggccctaatcacatccaattacctttgaacaatgtttaagaactaagaattcatgcagaaattattttatagaatgtgaaatgaattataacatttactaatatataggaacaagaaagagaagagaataaaattataagcacatacaattgcttgtttctttaatcgtagaatagatgcatggtatctcttaggagtcgtaataattttattcagttatattagttgtcattatatacctaatgacacaatattgtacaagtcttgatctatcaaagagagcttagacttaattatacatctttaatatatttccatgggttaattaatggttcaatcatatcttgacttctttaacgaaatcccaagttagtggaatcaaacatattgtcaagcctttctcacatttgtacaaattatattcatactacatagatcttatggttaatattcacatggttttacacataattctctattccaagttttctaagtacatttgtttgttacactaattaaatcaatagacttggagattcgcatgcaattaaataagtggtttcatatgaaacaaagaccttgtaactacttttctggtagttaataagataatacatagatatattcgtaaggaccaccacaacatgtggtgtgtcctcctcgggaaacaattttaaatctaaagttgtggtatgcctcgatgccaagttgctatatcaatctagcttgaaatttatttatttatttattatnnnnnnnnnnnnnnnnnnnnntattattattattattattaagtgattggtagagttcaatcatcaacttcctacaacattaaaaatgagtagtacttcctatctccaattattttgaaaatataatagggtaagtagggtttattcctttaaaatataaccatgttaaatttcgccccaacttataataaccattgtgaatgtactttgtcttttgcattccatttatttttgttcaacatttttctttttgtttttctttttttgaaaaaaataccctaggaaatatcaccaaagagcatagagcttaaagaaactgctagctaagagatatcatttgataacatgagcgatgataatgtttttaatacaagaaggatatctgttatggggcaccaaactattttaattattgttgaaaaagtaaacttagcaaaagtatcaacaacaacgtttataattatggggtaaaaattaaaatttcacaacattgaaagaattacaagaagctttaatatcagagatgaataatcccaaagacgagtctaacatctacaaattattatcttctctcaatcaagcttttgcagtcggattcaaattgaacattgtgaaatccaaaaagagtgtactaaataatggcatggcgtaaaacaagagcttcagccgtttcgggatgaaaagtaccttccatcttccaaacacccgaagctataactacaccatggaagtcccaagccaccatacccaatccacgagagccatgcatgagatcgatagccgcatcaacagtgttcactttaatcaccccctcgggaaaggcatggactatatgggtttcaacaaaggaacacaacacttgataggactccaaaaagccagatgcgcacaacccaattagctccagcggaatggtggattttttgttaatcttcttgttccgtctaaaccaaatgcgccaccatgtagtgagaatgagttcaacactttatttatccaatccaacattaaaagaggggatacaatttcatgatcgatatattttcaacttaaatacactagaattaatgatattatatttttagttctacaatactatcagtaaaagcaaatctagataattaagatgagagagacataattgtgcaattaaaatttcataacatttttattataaagatgttataaatgttttgtataaaaaaatataaatgtagctatttgactaacaaataaatagtctctaagaatgttttattatatattaatagcattttacatactttatgtaatattttttaaataattatcatgtagactcaagcctctctaagctaattgagagtcttatgcaaaaaacttttataattgagttttttatatgaaagtttttatgtttttttatatatagtggtaaaaatttaaaatataatattttaaaaatgtaattaagtattttttcttaataagatattaaatatatgatcgtcaccgtaatatatcttaataccaaaaatagtgagcgtttgcccttttttttggtgttttgtgacagttatgtttctttttggagttttaactgtattatcaagttattaagtagtttcccataacagttcttcaagccttcttcttcttcttccccttaacttctgcacttagctgctccctccaatccataacccagttctgccgtgcttgctcttcctcaccataccatggaccctttcaacaataaaatgaaggataagatcacacttacagatgaggaacaaatcgtttttgaatttgattttggagattcaattgacactaaattggtaattgatcgcgttgtgtatgcacgtattttaactactaaaaaagtatggctttcaacactgcatcgataaatgactgaacattggaatggtagattttcaatgacaatttctgtggatgaagatatgttcatgctcacttttagggtgaaggagacaagtaaagagtcttaaaccgagaaccattccattttcagaatcatcacattgtgctttacacgccaaatgtttgtcaaaatgtctcttcttcgaatatgattttttctcatttctgggttcaagtttataggctgccttttatgagtaaaaccatgaagttagctgaggctcttgggaacatcataggagaattcattaaagtttttgaagaccaactttttgatgatggggtccattcttattcgagtgaagatagatgttaccaaacctttaatgcgaggaaaaataatcacattgtttcaagtacgtgacaaattttgggttgaatttagatacgagaggctacttgaatattgcatagagtgtggtagattgggccatcctttcaataaatgtagcatttttcttgaaaaacttgataacagactggagcttgaacttgaatataggcctatgattaaaggtgctgcacttccaacatctaactacgatcgatatggaactaattttgcaaaagggaatgcttggcctcttctcactcacttggtaagaacatcactaacttcgacaattccatcactcagtagacgcactcaaccacaaccaacaattctgtttcaaggagaatcctctcaacatagcagcgaagaaggaagaatacttcatagttttggttttaactcaaaccaggtgatgttgaaacaatttcaaatgtggaaattcctactggtttggacactgatacatcaattagtcagtgttcagaaatgaacatgcatgctaataacacaacaaatgt

SEQ ID NO: 25190 - DNA, 1993 bp, Cannabis sativa
aagattgtgttatgacagtcacaacgagtgtgtgtgctatttcttgaggaattgtttgaggtctggaaaaaatggaatgaaggcgtggagagttctatttcaaatatagatgcgggttaaaggtctttctttactcactgtagatcctgtgcttttattttttcagctggacttttgtttgagctatgtgataaagctttcgttctagcaatgttttatcttttgttttttctgcttttgatttttgtagagcttgtttttttctcttagtcagtgtttgtttcctaacattgaattttcttttgccattgtgtatctttcaggttcggctattaatgcataattgggtgttgtcaaatgaggcacctcaagtgttcagagtttgttagagaaggagttcttgcacaaaacaaaaggtagctccatagtaatcgattttcagagcttgttttaattggtaggagctggttcattgctgctattaacaaagacagagttattatatgaatgccttcaatattggaatggcaataatttaaaatgtttagagtaaccattaaagtttgcatcaataggaagaagttgtcttccacatgatggaagttgtaatattgacatcccatactttgaaggtgataacaacagtggaaaaaatacagaacacaaacaagactgaaattacatttatataagaatcctacgcacatacctttaggaaaaatggtatgaacataacaataacattgcttcattacttcccagttcccacatacctaatgaagtgtggaataaagtgtcatcattccctaaatccttgttgtaaactaggaagttcaatatgtaatgtgcaccaatatgatataaataatgtcactaccctcattattatatcagtactcagtactcacccatgtattcaaatagcatacatattttattaagcaaaaagttcatccaaaatggtgtcttcattgattcaaaaaatgaaaagtgtcaaactattcatctctattttcttcaatcaggtaatgaaaatactacttaacagatccccttatctcaatgccttttgaattaataacaaaaactctctgaattaataacaaaaggggaagatctcaaaacgttacctactacagctatgctctaagtgataattatttgaaaagtgaaaaaaaaccagtaaagaataaaaaagaggcacagaaattaaaagaagtcttacacaagcaattaacataaaagactaaaataaagaaaaagactaaaataaccctaaataaatatctaacaccctccctcaaactcacgatgttgttgcaagaagcatgagagtttgcctgaaagaacaaaaatgagaaatagtatccaacatagtaaaaaagtcagcaagttgcaacgaagaagaaacataaggaaaaataatggtgcccaactttagatgatgacgagtaaaatagcaatcaatcttaatatgcttggtgcgttcatgaaaaactgagttgtgagcaatctgaatggcactttgctaatcacaatacataagagtaggacaagagtgaataacacccatatctacatcacatttggctgtttgttcactttatcaagctgagttcccttctgctcaacatcacctttggcttcttccaaagccttcatcaattcattggtagtggaactagttttgaaagtcgctgactttgctcaggaataggcatacgcgagttttagattagtctggaaaaagaaacaatgaaaccaagttaagagatttggatggcgtataatctgcgcaaaagtttcaaagataacatctataaacttaccctggcagcttcaattccttcaggatgccccgactagaagttcaacttgtaaggtttcagcaccagccaactgctcgttcacctcgaccattatgcggcctttttatcgttcccaatcatatcaagtgaatgcaagtgtcttgttgtaatttgttgatcaccac

SEQ ID NO: 25191 - DNA, 2293 bp, Cannabis sativa
  modified_base (33)..(44): a, c, t, g, unknown or other
aaattaataataaataataaaatatttttgtcnnnnnnnnnnnncaaaaatggaattaacaatctcaattccaacactcaagattcccttgagtaaggtagatgaattcttcactagctagatttgaactcccttcgaatcatatctaaaccttcgatggctctagtagcaagcttcacctcttttgtttggcaattcattgacatgaataatttgggatctagctctaataccacttgttaggatcatcagacaccatctatctccatattggtataatattgtttgttttaggcctaagccctcacgaatttatttttgagcaccttctcaaaaagcctcatttcaatagagatagtgtatatccttatatacccaagaactttcatatttttagccaatgtggaactttgattgtacacctaacatcttcgtcaaagcttcgatggcaacaccacatctttttgcattctctcattcttaccttgcctcgtccattctatcgactatcaactaccgacgatcactatgactcatgctccatccatgaaataatcagccatgcttacaggctatctcaagtctacctttgtaattcacgatgaaggtctgaccataatccatcgtaattgacctattcagaaatttgtaggcactagagatccgtcatatataactagagatcagataaatacaactaaaaaccctatagtactatctcgtttatcatcgacctccccaaaaatattggttcttaggtactagagatcaaactgagataactagttatcccacaaaagttattactgctccagcaaatgttcatcaacacaaggtttgacctgcccaagatgattcttgtttctttggccctggagatcctacaaatgtaactatagatcaatcatatgcaacagacaatctagcaaatgttcatcacaacaagattcaacatgcccaaaacatttattatttctttggcactagagattctagatgtaactaaagatcaaacagacgtgactaaagatcaaatagaaattcatcacatccaacaccaatagattcaagccaaaaataccatcaaattcaaaatttccaacttaaccagaagatccattatggctcctaatacattgttttcaagaactaagagttccaagacaaagttcaatcagcgtagtagcacttggatcttctaatacctctatcctatgtttttagtgttcaccaagatgagtgtaacaaatttgtaaacttcacattgagggagagtattaggagttagaggttaggctagtcatgttcttttcagttagttgttgcatctactatcaggttagttataactaaatgttctgtcagtgattctgttataattttctcctatataaggagtatttcctcttctaataattcattcaaacatattcaagtattattaatatattcatgtatcacacaatacatattcaataagattagggtcagccctaaggtgaggtgagcaacgcgtgtgccttgggcccctgaacgcccaaagccccaaaattatgaaaaaaaaattattagtatacacatgaatattaaatagtaagggaatatatcagaatatgtttagcataatggtaaagagagtcatttttaagggatcaactcttaacttctactttgttactattttttagagatattaaatgtgatattgtttgaataatgattaaactgtttatataaggatttcaaaatttaattttgtcttaagtcacatatatcttaagaccggtcctaaataaaatcatttcttatattttctaacgtaacaatgaacttttcgtcatcattttttatgctctcaacaaagaaaattctctcactttcacacaaaaaaccttaatataaatgttgctttttctaaacccttgatctaaagactcttaattctaattcttgaattaacttttttatttttctttgtatttaacattttgtattggttgtgggtgggcgaagaggaacactagtcttcaaaatctaccatgttgcttgcaatattttatgttaattattgttgtttttgtttcattgttaaaataagagtagaatttttctactatcctgttattttagcagttatatattatcgcgagaaagaatggtggtgattctgtgatatgttgtttggctgcgggggcatcattttttgttcttgtttgtgtgaccaagatgattattgggtatcttctaaccctctattatgtgaactttagatctttagtatcaaaagagttta

SEQ ID NO: 25192 - DNA, 1363 bp, Cannabis sativa
  modified_base (614)..(614): a, c, t, g, unknown or other
ttgtttgcgaggtgagtgatcatggactaatcacatcatttatgttgtataaaaatatgacaaatatataaagtagaatattctacttaatattattgaataagattgaatgagtattatatataattatatatgggtgaaaatatagttgtatatatatgtatatatgtataccatactaataagaatatgtatatatatatatgtatgaaaataattattttgatgcataaaaattgttaatgtgaaatgaatataataatttcaacaataatatgactcaaaaagattaaaataaaaaaatatttattttcattggccaaaccaccataaagaacatatataaatatatatatacatgcgaaaataccaaaatttaaaattatcaagatagataaaatcgctttgataccaactattagatattttatattaataatatgaaacatatgaatgtgtatataaaatgcggaattaaataaatatataccagacttttgggcacaaggaaaaggagtaactataggatagaaatatatttagccattaattctttaaacttcggtcccacacaacctttggatctgcaaaagaaaaggaaactgattagtgtngtaatcgggcttccaagctctctctaatctctttagatggattctgtatttttagcatgagtaatgagcttgggaccgagaccctatatttatataggtgagatcttctatcaatgtctctgctacaattaattatcataatattttgacaattaatgagaaaatacaacttggatgactaaatcaaattaaattagtaactaaataacattgatcatatttataatactttatcaattaaactaaatattaacttttaataaaattaattaaaattgatataattaataattctaatattagaaaatattcttaccgaataaaccttataaagtttttcccacaaatattttcccaaaatgccccatttgacaaaaaggtttctaaaggttagtccacatgcacactactgcaatcaaattccattgctcactgttctagtttcagcttaccaactttacctaggaaacatctaagtaagcaacaaaagcttaataaatcaaccttacaggcataagataaccaatatgcattcaattcattaccagagaattacaattaaaattagagaattcgttgactttattatttacttagattaacgcaaagacgtaaataatttccatgaccatacataagagtttttgtaactttaagagcttcttagcttttaggcatgttaaaaagatctatttagttgaagcaggttggagttccgatctgatggatcacctctgatccgaaacctt

SEQ ID NO: 25193 - DNA, 4262 bp, Cannabis sativa
  modified_base (972)..(972): a, c, t, g, unknown or other
  modified_base (1570)..(1571): a, c, t, g, unknown or other
  modified_base (2188)..(2192): a, c, t, g, unknown or other
  modified_base (2811)..(2813): a, c, t, g, unknown or other
  modified_base (3527)..(3528): a, c, t, g, unknown or other
attgatgtgattcctcataaagtagtcgtcactagcattattaatcatagcgtaatagctgaaaaagcagggttacgccatctgtcatatcgtttatgatagttttaatacgtcttctcccatacagcattaaatgcgaggtgatttttcaatagggtccagtacctcccggagcttccttagtatgcccccggcctccgggagcgtaaggatccttctcatgtctcctccgggagacaccttcccagaggcgctcctatgttgtctaagacttagtcgatttctttgaaagctggtcctctcagcttcttgtgtcatccttatccaggtccacgtattttgggcaaaatcaagggcaacaataactttttcaaaacacatggtccaaaatgttattcacccttattaattaaacttgatactgctcttaactttcccaaaacctcaatcaaaaaaatgtagtaattccctctcacatttaagtgcagagctcaaattctatgaaagtttcatgttggaactatttcaaattgaatgaagttttgataaaataagaaagtttcctagtgtatttaataggtggagtcccacatgggatctgtgccatcctttacaaggatatacaaggtgcaattatagcacttggtataagaccccaactatgtgtacattcctaaatagtgttgcgaacttagctacctagtccgcgactcaatctaaaatcttaatttcataatatcgttcttcttttgatttttttataaaaaaataccagttttacttttgtaaacaatatagttataagaagttgtcacaagtaaataacttttgtaacttttcaaatatttattacatatttacaaataagaattaattttaatttattaatttacggtaaattacaaatttcaagcactaacaattattttaatcgaaatagttaaaatcttattgttaacgcagattttcgtnaactaaatttgagcctcacagtaaaaattctgcatagtccacgtaaaaaatcttgtgttcaaatctttatttctatagcttttatttttctgtgtgaaatttctagtgtgaggctcaaatttagtaaacgaaaatctgcgttaacaatttggtgctctcattgagagcctccgtgaaaaagctaagaaaaagcctcctgacataaaagtaatggatgacgccaaagataatgatcctcaagaaggaatcagtcatcaccctggaaaagaaccatggagtcctcagggatctattgaatcatcgcatgaatagactgcaagccccaagaaaactcggtattggggtccctagtttgatggaccttgggacaacaacaaccagtcacttcctaaccaggttgaggaggatggcacctacgacacaaccagatacataccaattgtggaattagaaaaatcaccatcttaggcgtcgattggaggaagtaaaccggcgtaatgccgagttagagcatgaaatagctgcagcgagggtagcgcatgagaatgaaacccaaaatcaacctaaccttgggagaagagatccacgaggcaaaccnngcagctcgcaaaccaaggggcaggagacaacccatagataaacttaaaactctcaggagatgtaacctgaagaaactgagaaaaatctagggatgcagcctgggatatgcagaacttcagatggaaatcgccaaccctctcttcagattcatcaaaaagaaattcgtgcaaaccgttatagggagaataaggtgaatcaaaccttaagaggaagagcacggtccgaccgcagtcacaacaggagtgatctacgagagcatctgaacttgaagaagcctaatcttcgtcaacaacttggtttaaagcaaaaggagtcactccctttgcgaattgaagagttggagaataagtttagaaggcatcgagtcacgaaacccaaaagacgaccggggcatgatactattggagaatttgattcagaaacctcaggatcaaagagagaagacgattccaaaggctgtccaaggataagaaacacaacaaatatttcatagggacgaagccaagaccattgtgcatcacttttctattggacacattgagagaaaaagtagttttcaagcactaacaatcattttaatcaaaataatgaaaatctcacatttctgattgtggtnnnnntttgtgaaatgtggcctggacccatctcacaatattttttcccactagtcacaatgaaatcttactactaagacgtgaatatgaagattagtttcgcgttaaatttggttaaaatgaccctcttattcagaaattaaaaatgttcttctattcagtttaaattttaacaagttttttccttacacaagaagaacctggcaagtctacaagaccttggaagttgtacgacaaggttgtacacagaagctaaacaacaaagttgtacgaaaaagttgtatagacatgccggacaacacccaaataaggtttggctggcccaaggcagacagacatgccaaacattccctaaaaatatggttgtttggccaaggcagacaaacatcccggacagaccctaaaaatagggctagccgtccaacttgtgcagatagcgccaaataggctgaacaaattacgaggtccaccacgagccttctagaagattctcaagccaaactacattttcaagagaggtttaatagctcttgaagatagggatattctgtaataccctaagattatgaaatggattagaaaaatcctaactagttaattgagtattattgtggaattatattannntataatttaatatatatgaattaatatgagatatgacatgttaagaccccattggtgagctaagggtattttagtaattttgacccgagaagggtaaaactgtgaatttaatttaatacgtgcttatggattatattattatgtagtatgcctattttgtcattttttaggtgtattctgacaagttggcgcggtattgtcacaaccgggtatttcgggtagaaccgggttcggggccgaaatacaattttaggattattatttattggcattttaagtgtgattaatctgaaattttgttgggtatatttatgttggaaatgactatgttatccttggaatgcttttatgtgttatttgaccctagggggcattttcgtaaatttgccttttggattaattacaacaaaaaggaattattttgcattttagaaagaaaattctgggttgttttctcaactcttagttgaaccctattctccctctctcttcaatctttccacttcaaatcttcctctcttctgtgttgttgagcttgttggagcttgggggattttgatgtgctttgattgtgagaagcttgaggtagttcttaacttctctatttgttaaatttgttgctgaaattttttgggtttcctcctctcttacctgaacccccttttctctttttaaccatttctttctttgattgaatgtgtgagttgttgcttnnatcaaagcttggtttggtaatctttgtgcttgtgttgagacagtcattttaattggttaattttgaatattcagctgctgtaaaatgattaaaaagtatgtgctatgtgtgaatttgttcatctttgcatgtgtgttggattaaggggaaaatcttgttgttcttggcaagtatgtgttgcaaaggtatggaattgttcttaatgattttaaggcatgtgtttaagttattttgagagtaattttgtgtaaattaatatgttggtttttatggttgtgcaagctcattatttgggatttttgctctagttaaagcttgctgaattgatgattttgatgcatgttttggtgttattggagaatgaattaggtgtaattcttctctaattattttgtttatgctaggtaaaaatttattatggttgtgggttggtttagcatgaaaattcgtatttttggatgtttttttcgtggctggaaactgggtttcttgggtttttaaacccagtggtcgcggccattttgtggcagcttattgtgttattttcgagtttttgttttggccataacttttgacttgggactctgtttgggacgttctttatatcgttagaaagctcattccgagctctattttgatatctgtaatttaaatgccaattttataatttgtggaaatggatttagggattaaccctatacttgtgcatctcgggtttgtgactaggattaccg

SEQ ID NO: 25194 - DNA, 3521 bp, Cannabis sativa
  modified_base (202)..(203): a, c, t, g, unknown or other
atatctatgattagcgttcactcaattgcactatcatgttcccaagatgtaagtattgggaagatccactcagtcaactttaatgaacaagtcaaagaacacgaataatacatttaaacaaaaacctaattatctcaggattaagatctatggacctaagattaactaagtgatattgacatagaaagatataacggtaagnntatgatatcttttctattgtcaatattggtacagtccaatgtatactccatacattcgatactagtatcttttactaataccctggaaatgacataccacatatcaatgtgtaagtaaattttatcgctgattatcacgtcagtataaatccagtccagtaccactgataaatcatgggattagattaaatactttaaagcatataagcatgattactttccactgtgtagaaaaaaatactactattataatcatgaataataactctatgttcaggatttaatagaatttatacattaaatatataatcatgaaagcaatcatgtgaatcatgcatcataaaataatttctaatcttttgttaattagtagttatattgaagtgagttttatttaggacataaaatttcaacacaagatagcatgcaacttctccctggagttagaccttggatgaatatagtcatggtacagagaaataagcttcatcaaacaactctcgtaactttgcacaacaaccctaacactaaaagttcaatcaagagacaaagaatatcttacaagaaggaaatattacaacacaatatcataaatgtagcacagatcccctatgggtggcacacacttgcgctacccccaagaggtgaaaaccaaactagaagcaccacgtctagcacctatgaatgatcattcgagtgtgaattcacgcaatgaatactgattgggttgttgattttgtgtaattaatgttgattcattttctttttggtataaatattagacttacatccgctggaaaaaaggttcacaattttcctttaagcagaagctctgctgaaatacatttgtaattctctcaattttaagaaactcacatgaactatcttgtgatcattagttaagtattaaagaatataaaactaaaaagggaggcttttacatctgaaattagagtcgaacggctataacaatcatgggatcactattactatttttgcattccatcgcagattatcacctttacttagtttttgtaactctagttagttgattgaaattcaggtcaacactaaacatcatgcactttggggttgtccatcattattggagtgtcgtgaatttgtgatgttactttggggtattcaaatgtaatttatctagctttttatgagtttattcaaaaaattttgatcctcttcctgtgatttggagttgattcttgttatcttagggagaatttagttcaaaaggaacaagctactccataatgataagataattgctaccgagctagttgttacttgggctcgagactttcttgcagattaccaagaaattttttggcttctaatgtccctttgagtatctcccaaacggtggcatgtcctgattctttggttcatgctccgttggtaccttcgagttggatactacctatattccgtgtgttgaaagctattgttcaagtggtcgttgacaacgtgaatggaagatgtggtatgggcatggtagttggaaaatacaataaggaggtggtggcttcggtgttaagcatgttgtgggtggtttctctcttgaaatggcacatgctttagctttgaaaaacgcaacaagtcatcgttgtttgttgattttgagaatgtctattttgaatcgaattgtttggatgtagtgctaaaatctaataattaagttcccttggtctcatcttcgggtttgattttatttaattttagacgtagatttttagcttttcattttgctagtcaatctcatcgtcataaattaactaatgttgtggcttatactttagctaaatttgcctcggatgttattatcaaagtttggtggtcatgttattataattgtatccattcgctcatttagaatgagtttgttgatcaatgaattagtgtcgatcgcctcccatttccattacgcgttatgcttggatggaggtttttttttttcggcgtttcttctaaaaaaaaaaaaagttttataaaaaaaaaaaaaagttctattggtcattacctgatcacttaaagagatgcacaaatctcacaaatgacatgcccaaattacagcaaaaagacccaagctaattacctaaaatcaacagtccacaaagctaacccccaaagtgcagacacaaccgcgccaaatggtaatagatgtaaaactgattgacccccaaactaaactaatgtatactatgaataagtggttaaaaagttttacaattaggcaatggtgccccatactgaataagcacaaccacttaaatgtgaactattcaaaagaaatattagtcaaacaatcataaagtaaaaactataacaccgccatcttcccctctcgattagaattgagtattaaaatttgggaataaaataaataaagtattattttaaaattaattggtaatagaaagagtaactcattcattttatatatcgcaatttattttaagaactaactcttaataatagagcacccatgggaaagcagcgccagccatgattagtcatcttcatatttcaataattatcactgtcatcaatacgtgccattattgaagatttggtagttggatatcaatcaatcaaaaatagttggagtaggtgcgcacattcaataaattttaatagttagatgtagtccaaatattatgttataaacttttgtgtcgtatttttcatgagcttgaatctttttttatatgataaaataattattaatgttattagaaagctactacactacgtatatatttaaatatgtattgtggaaaattagagcactagttttataattttgtctttgtttttggcttttcccattaagttatatttggtttatttatgggaaatttgaattttcttgcttaataaactcataaattggttccctaaactaatactatccataatttgtaaagtgggataacttttttctaaatcccaaaatacccctcccatttttcccaactgtccctctctcttcctctttttccaaaaaattgattgaccatcggactagccatcgggctcgctatcggactggccattgggctggccccattggactggccatcggacgggcatcgggcccacatcggacccgattttcaaaacctagaaataagtcaaactagtgtacaatcgggcacactatcggacgggcatcgggcacaccatcagacgggcatcgggcacaccatcggacccgaccttcaaaagccagaaatgagctaaattccacgccagacccgatttgagaggagtattttcgaggttttgcaaaagtagtcatac

SEQ ID NO: 25195 - DNA, 18302 bp, Cannabis sativa
aaaatgcatttatgtatttacttacaatatttactcaccgtgcattgttctttagtatagaacaatgattgtatttcaaatatatacacatcaagccaaaaaaattaaaaaggtctatagattcagtatatttacctatgtccctacttattgtttatacctccatattttggaaactttcaacaatgatttgtgctttagagaagaacttgacttatcccaagaagtaatatgatgtcttaaccaaccaatctaattttcacattcatcaaattttactcatatctccatagaatcatagccactggaaatgctttcgagagctagccaccataagtgtcacaattccaacctaaccttgtaaataataaagccccaattgctccatccaagaataatatgaaaatagagtaacaattcttgtagagaaaaaatgaaaataatatgctctgtactatgctatatatgacaaatgaattttatgtatcaacccatataaaatgcctaaaaccattaagaagaaattgaataatgaatgacttaaagcaaaacatgtatgattgatgattggtgaatgtgacaaatgatgacatttataacaatgcatgaagctaaatattatgtggttgtgtcactaatcccacaagacgaagaacaagtatacagaatgcaactacaaaaaagaaagaaaaaaaagggggaagatgttgaccgatgacgacgaactctatgacaactgacatgttgtaccaatgcagaataatctttgatttaaccatggccgctgaaggggccgccccgaaagactgagttcaaccccagaaaaacagtatgacagggcaggtgggggcaaattttccatctcattcattcataatttcattgattttctgccaagatggcagaaaaacacacatggtcatcgccactgactttcctgcacggcaatgcaaggacaacggaaaattataaataattgaccccgagctgctgattgaaatactgcccttgccaccgaccgacccaaacaacgtcattttcccaaaaatgtgatgacctgactcatggtatgcaatcccagactccaactctagacacccaatgcatgcagagaaaagaaaaatatggcaagtaccagcagcctcaaaaagaaattgcacgacttatggccaacttggcccactcagcagattccttaatcaaatgatcatctgatgtcaaacattcatttagaaagtctttgctggacagtgattgctgaatcaagataccagcattactacccagtgtatcggctagatcaccaaggaccccaatggctgtcttggtcaccacgtcgtccctgaaagaagtagcagaaagcatgagaaacaatagtaatgattataaaaaaggaaaagaagtcactattatgaacaagatgtacacaaataaaactgagcatacatgtctttctccataaacagactgtccaagaactgcaggacatgaggcgcaaaaggcatcaacagttggatctttgcggatcctttgaatccctgaaagatcccagagtatgcctccaaaattccattcctcaaagtattggtgtactctatcatgtcatcatcagccccagaagtattgacagatagttctgcagcaccctgaagcatgggcattgaataaaccaagtacttctcaaaattctctccaattgccaaagcaatgtcaccaaagcatgaaaagatgggaggcttcaccgaacggtgcaactggttgctggacaaattcttcaggagttgagtcattatcccatcacaataaggcaatataccaccttctagagctctgcaaatatcccccaccacaccaaccgtaatggcgcagacctggtagtcctcaaaatcttgcagacccatttccaagtatttatagaactcctgcatgtacttggcgaagtcagtgcctgcacaataagcaagagctccaatggcaagcatagcctcctcgtgtgctgtggcacttttactaccgaatactctcagaaacagggtcatcatctggtcagcatgatgcaaaaaattactcttggttggttccgatgaacctagcttctgaatcatgacctgcaagcaaccacagagaagaccttgtagttcattgcgtttctctctctcttcagatgaattacactgtgcagtaaatgtctgatctagctcccgaataatgacaggaaccaactgtaacactattggagctgtatcgtcagtggaacacctgacaacttcatttaaagtctcataggctgctgttcgaagacgcgactctccagaatcagcccgatgagtcacattgagaagagcctgaataatatcttgaaagaacggagtcaacggggaggaagattgttccacatcctcataaccctgagctaagaaatacaaagcaccacaagctttctcagcaacattaggcacatcattcatgctctgaagaaggactgtcataatctgttggcaatttgcttgagtaattattggtgtctccgagattgatacatgcataaactcaaaaattcttccaagagtccatgcagtagtgtctttcacatgattgtttggatcattcatcagggcattaagcataaaggtcagagctacattaacaagaggcatgagcttgtctggggatgggccttctagaattgaaccaaatgcataagtggctgcttctctttgtctccaatctggttttgcaatgttctcctcaataaatggcattaccaatgggactacgtcatcaccaactgttcgtgcaaccaaacccaagcatgtgcctccagccattgcaatattccaagccccttcatcctgatcctgatcttcttcttgcttaagtaaagtttccaacagcaatggcacaagagccgggagagcctgctttacaaaataaaagcatggaacatcagagtctccactaaactcccctccgtactcttctaagatatctatctcctcatcacaaatcgaactccaaaactcaacggcttgtagtgcaacaggttcttcatcttccttgatagccttcgctgtaatgttaaaaatatcctgaatataaggagccaaccgttcatagtaagttgaagatatagcaactaaacactcaaaggctgcctgccgaatcctcaattcaggagagagagtggcctcacaaacaactctcataatataatctcgttccatgtcattagaaaaatttgcctgagcaaaacccaaagcattatacaatgctcgagtagcagcaagtctgacatcattgttactctcagatgcattcatgccctgaacaacagctgtaagtatcttattcacttgagcttgctctatcacatcaggagagacttcctcacaaatgtagccaagagtttccaaagttgcctgcctcgtgtgagccggaagctggtgagtatttgacaacaaagcttctattagttcaggccattgtttgtgtggcaactcaatgctagcaacctttgcaatgacttgggatgcagttgaccgagcctcaagggcgggagaggtgagagtctttaataagcatgctttaacatgggcttttacagtttggtccaacgataaccatctttgtacaagttcaagcttcctgttgtgttcctttgcgtccaaagcattcttaagtatcaaaccagctaatttacgactctcggcaggcttctcatcgtttgccaactccccagcaagtgaaagcaaaaagcttggaagattttgctcttgaaattgtttaagattttcttctgcatgattacgtacgctactatccacggcctgtgcatttaaaagtatttgtgtgacttccattgccatttgaacctgaaatatgtattttttaaattacagcaacttagttggattaaactttaaaggatgcacagatcttacagctagtgctattatcactatattctaacaagccatattatattgcaatgcacaaatgtaaaagatcaaacatgtagctatatagtattaaacattggtcatttttcaacagaaaattataaccaaggaaaaaaatgtaaatataagattatcaagttactaaaaactcaatcaagtaaccaaaacagtaacaacatccactttaactagattccacttgtattgcaaggaattaaatcatagacacacgcacacactgagatatgaaagtacagactgatggaaatctagacaactagagcttcatatagatggcaaaattcatgaattcagtataacatagaattaggataagaaacaaggaaaataagttgtatactaaattcctgttacacaaatgagtaagagttaaatataataaatgatttcttgtaaaatccttaaaatgtagacagttgttgatgagttaaaaaaatcgtctttcttcctccaaatcctaactcaatagaaaatcaaccaagtgattggagccgtcaatgaattatagcaaagatcatatactaaatcctcttctaaccaaccaaataagattataagagaaaaaaaaatagataatacccataattcatgagaacaaaaaaagaatagaggcatttctttttcattttctcttactcccaaatcctaaatcaatcaaaaaaaagctcagtgattaaactgtcaaaaaaaatcaatctttttggcatgaagtcaaaattaatgagaagctaaaaaattattttctcttttatcgtcaaacttattgttttaccatcaaaacagaacctaaactaataaactaaagatctatgttggaaaaaagaaaacaccatcaattaatcgtttcataaatcatgagcaaattttatcatatgataaactgaataagtgactatatcccattgctccaataataaatacttaaaaaacatcgaaaaaagtaaaaggaaactagcaaccctaaaggtatcactttctcgcgccctaattccaaaactaaaaaactcaaaacgttctccaccatcaattgttaaaatccaagtgaccatttttcgaatcagattttcttataaatcaaatatcttttttttttaatacatttgtaaccattttaccgcaatcaaacatacacaacaatgaaaatcagatacaaaagcgatctcgttaatattcaaaggattcacatatcatagatctcaatacacagatccataatccaataagattcaactgttagataggatactgtagaaaatacaaaacaaaaaaaaaacaaaaaccgcttacttggagcgagttggctcgggacaatagtgagtgatgaatccgagtcaggcgaacaaacgaagaagaagaatgattcgtgactctgtaaaaccctagcagagactctggaaagggaaacacaagcagaaacgccgatattgtaatgctgggatttacagaacaaagaaaacccaaaaaaaaaaggaaaaagaaaaagaaaaagaagcaaaaaaaaaataatgtttttatatttttcttcaagtgagcacacgcgaggcgtttagcgcgtgagaggtgtgtgattaaaagagaggatcaagcgtttgggaattggctctaaggaattcgtatattcgtgttttcatataaatattttttttttttttggtaaatagggggcataagtatttaaaattttaaatttttaagcggtataaatttaatgattttttttagtggcataagtacttatatttataaaattaattggtaatgagtaaagtagttcatgttcttatatatggctcaaaatttttatatttgatccatgtcgacaatattgtccaataaaatagttcattgagtattgttttgaaaaatagagtttggaccagaaacaaaagagatggaaattaaaatatgtaacaaatacatttcattttgaataatagagtttggatttgatatggaataaatggaaataaaatggatgaccaaatattaaaaacttgaatataaataaattggtatgtactgtttaatggcccacatagagggaaaaaaaaaacaaaaagtacaaactgtttttttctgtgctagtgagcagagaaggctagaaggtgcttagggtaatgcatgtgtttcccttcacacgtttatgtactgccttcattgcttctcttatcttttcaaaacttattatagagatgtgtcaccttcctgctcatataaaattatatttttttttatcttctcaatatgatctaataatctaatacattcattaattaatcccttcaactccacccaagtggtacatatacaaccctatattactgatctgtcgtgaacataatagctagacacaatttgcttttcttttggccattaatagtcaatggtcattgttttcgagttttcttgtcattttccttctaattcaaattttgacttagaggggtcaagaatatttctagtaatggggacgtaaatatattgttattgctaagaatcatgaataatatcaaataatgtcacatttgtttgggatgaaatgagaatataataaaaatagaaatggaataaaaataaatttaaaatgagtaaaatacattagtaaaaaaaaaattaatcttttttcttattttgtattgtaatgatcaatttatcattattttactaaaataataaaaaactcattattttcaatattttaatcacattaaaaaataaaataaaagttattttttttcattacctcgaaccaaacagcattaatgtagagtggaatcaaagaaattccataaaaattacagtatgtgtaaaagtcaaaaggagtgtttacttaccccaaattttaatttatttatttttgggctaacataatctttagagtaggacccaagaataggtgctggctaagattttataatgaaacctgaatatcaacctaccaaaaaaactaaaaatggtggcccaatcatttataataccaagacaaaatatgtatatatataccctctcttgctatgtctatatctgtgcatttatttgctgtggtgtattaattatatccaggtcctttagtttatttcttttcttaaaatatgcagtgtctctcagtaaacctttttcataaattttgtagtcttgcacctttgatggatgcacttgagaaaaatgatcaatattttgtcagaactgataaaaatctcatggaaaggaaaataaaatctcatagattaagaaagatatcaggtttttttcctttaaataaaattaaaaattattgtgttacatgttgtattcgttttagatatctaaactttttcttttttcttagttaaaattttcagaaaagaagataatattagagtttgaacttgagtaatcctagtttgtaacttagcagccagccaaaatgaggaatgtgtttatactattttgttgccctttctcaacattatgctaaaagagaagaagctgaataagaattcttcattctatcaattgtcactattattatcacagctagctaccactcaaaagtaactgaaaagatatgttaatgcataaatttatatatatttatttatttatctactttcctgatcccatctctaaccacactccaaattcattggtgaatcagttgtagatataaatatagtatgtacattattatgcggttcatttaattaagttgcttctcctacttatctaatatatgtatttgtgacaaagttttataatctaaaaaaaggaaattcaaatgtgtcccgaaattttaatatgtactagattttgttctttaaattaaaattgttgaattcaattatttctgtccaaattcattcaatttcgacacgacgattattcatgtatcaaattgtatcgttgaactttaatacgtactaaatgtcctttaaactttcacccataacaaatgtctgttaaaaaaagtactgaacgaaaatatttaaatctaacaatcttaatataattcagaaaaaaattttaaccaactaagaatttaggaacacgtacatatcaaaatagataaaaaaatcttaactagccaaaagaaaaagcattcataattgtgttttttgttctttggttttttacattgggcaataagtaccaaaagcactttgagaaactttgattagatattataataacaacaacaataataatgagccaaatggcaatacagaaagagtgggatggctctaccctcttaaaatcatcatcataataatttgcagccatatacatatatcttatatgtaattcaattcaatagaacatggttatatactgcaactattatactacagcaaatagtactgatacatctgtttattacagaaaaaaagataagaaaaaaaattaaaaaagaattaataaagatattcctgctatatatgccggtcctccaagatctgttaagattctaattatagtggcagtgagattctgtgaatttgatcttccttggtgaagttctacttaattcctgggatacattaataaagactgcaaaatgatttatatatctatgtaatattatcattgatatcatgtaacagtaatagggccaacaaagaggagacctggacatggatttgatgacttattattattattttgttccaaactagcagcagcagcagcagcaggccttgctggccctccacccagattcagctctagatcaacccctgctgcaccaatatttgaacaagtagtactgtttggtttggaatttgaatttgatgatgatgatgatgatttcaactgggaatccattaatccatgtatccaaacaggaactgaattattatttttgttattaggaggaagaggaaggccatgatgatgatgatgatgagaagaagctagttgagtaaagtcaactactcctccaggcttttgatcatgatgatgattgttgttgtaatctgataatgaagaactaagctccagctgtagaggcaagacgacaccgttttgttgatttttaatatccttgttgtgctgattatcactactagtatgttgaggaggactacaaccaacctgtcatcatttttttcatcagtaaaataaataatcaaacatatatatgtatagatagagaaattattgaataacctttctatatatgtatgtatatataccatgtcaaataggcttgatcttctcttcttcttgtcgagagttgcttgtcttagaaaatatttctgggcatgacttgcaacttgggttggtgttcttgtagtgacaaagcttctagaaatgcctctccagtctccctttcctagcttctcaagcccaatcagaaatgtcctgtgctcttcttctgtccatggaacacctatatatatatatatatatatacataaatattaatcaattcaaacaaacataataaaagatttagttagttaaattagttacctttttttctttcctgaggtctgccaataatgagaccatcagagaggtaaccaatacttgttgctgctttgtgatgatcagaaatattggtttcatcaagggcaattatggcagaagaagaagaagaaggtgaagaagaaggtgaagataaagaggagtgcattaagcaatccatgctgaagcttttcttcaagacatttatattaatattggaattagaacaagaagaagaagaagatgatgaggttaatgatgatggtgatgatgatactatatctactttcactccaaataaacgaagtgatgaatttgcattattattattattactattaacaaaagtagtcatagtagaagatgtggtgcaggtccttgaattatgacctatgtttccacaatgtgagcactttctgcccatctagatcgagatctaattctagctctctcaaacaaaaagttttattgtaaagagctatcaaaaaagatttccaattccaaaaactcaaggagagaagagaagagaagagaagagagagaagacaaatgagtgatatatgtttggtggtatatatgatgatggggtgttatgaaaatggatggatggcacaccaagagaagatgattggatattattctacatatgttattgtttggatattttctttttcctatttttttttcttttttttcccacttgggtttccttaattaattacaaaataatactcttaagtacagctcttctctccaatagaaatatataacaaagcttatcctagggtggacaagacagctttgtcctatgaagtactatcccattaaacattgaggaagtatatatatgtggtatatacttttctcttaacatctcttatacaacttatctagttttatctcatctcatgcaacaaattatggtcctctgaatgattacacacccaaacttatttatggaaaaaatataagtggggtatgttgagaatcatacaatttcttggctctaataatatgttaaaaacccaattaacaatgaatagagtagctcatgttcttatatataactcaatattctactatttgtaacatataatatgtattttatactaataatttactacaacaaatattaacttttcatggaatacatatagataaaaaaatgaaaaaaagaaaaaagaaaaaagggatcgtctatatctttggaggtaggtaggtgtaaaagaaaaaagaagagaagagaagaaatgtcatagaaattaagaggtttgaaagttgaaattaataaactacgctaccactttcgtgtgaaattcatgggaattacaaccaaactgtagtgaaggccaagtttttcagcataaagataactacgggtgaaaaaaaaaaagacgtttcaatttcagagttaattttctacaaaattataagtaaaattctttattgtcaagtcaatcaaatcctaaagctaaaaaacttgtatgtgaaaacaaagtaaataattttctgcaactttgcaaaaaaacttctcatagatgtccttgattcaatcattcaaacaaaatgatgaccaaaattatatatatatatttatataaaaataaatagtgttcaaaacttcagatttgaattgattatcaaaacacctgaaaatatatgaccttgagagttaatttttggactaattaatgttttataatgcatagtagttctctgtacttaaaatataccatttcaatcaacagactgaagaacaaagtagtataatgataacatagaaaatatacatatgtcacatcaattctttttttataattaaaaaaaataaagaagaagaaaagtccattgaactgtgttataatgaatttggctaaggtagtattgtctcaaacagaatcctgagagtttgagtaaatggaattaggagagctgaaggatattctctttccattattggtaaacatatgcataaaatattaatatacagatagagactgagatataaataatatataatggatagatatctaagccaaccagcttttgtcttagttaatgtttattattaaatttacattgtcatggatttcaagctgatggcttttatttatttattttgaaagcaataatttatttatttattatttttaataccaatgaatcttgaagaagccaacttgggagatttttaaatccctctttcttaccttgtctgacaaagaacgactagtgattttatttggattcatttggcattattttaccaaggaatcttccaatcacatgagacgagaagataatggcttataattgtttttataatcttgtctaactcggaattaaataacttgcttgtgttttataaagtattatgtatctataaatatatatatatatttatattaatcagaagttggtgatatactctttgatcttatatgtttcattttgctacttaatattattattagagttttgataagttggtagcatatatcaaagctcgatatcaacattatctttccctaagaaaataaatatatatcaacattatcacaatattgtgacttggataactccaagattaatttcataatactttaatataaggatgagtttgatcaaatccaacttggttcaaaattagccctcatagaaatatgagttttgtgatcctgagaataataatacctcatattcataatcataatcataatcatagcttttgaggcaactagaaatcagaatatttctctttttcaataaagcatggaaatttaaaattgttggtaatagaaactttaatcatgcatctcctaaatcattgaattgttaactatgtaaaaataatagtggagtgaaattgattaaaaatcattgcttattataacaaggtatcaactttatgagaagcaaaccaaagccaccagtgtaagttgatggagtgaaaagcattgctaatttttaacaggtctattgatttatatatacattaatgggtaattaaatagaaaaattaatcataaaaattcaaaattttctaatattacccatttatggatagtacccattaagaatacactcttataaatatatatttaaaatattaaatgttaacattcttatgagaccattattgacttagtccactcttcttctgctttggctaaaatttccacactgttcaattccatgtatttggctctctcatatggctttcttcaacttaacaagtttgagtaaaaaaaaattattagtagtgtttagtaccctcctatgtgttaatatcactattattggtgcaattaagtatcggtacctataaaatttaatgtaataacttttaaagagtattactaaccaattgcaaggtgatacgtctagaaagtattaagcaccactgatgttcaatagcaatactcaacttctctattttggtctatttgttcgtcttgaaaacgagcaacagctcgagctacaaatctctgtaattgtttgcattagtttagaacaactttttaatgagattgttcaacagttttagtattcaaaaatcagaacatagaaatatcatgcgtgcgttaaagtaaatttagatttgattggatgaaatttacatatattataagagaagatttctaattttgattagtctccttctcacatatccctttaccaatctggggaaaaaaaactactaactgctctgataattaataattgggcagcattaaaatggagcacttccttttttttttttttttgaaaagaatggagcacttcctttcaaagttacaattttttattaatgaaaaatgaacgggtaaggttgttgcatgggtcatactcaaataaaggattacaactgctagtttaaaattaattaagcaactggctttctaatctcatttgatgaggatggtattatttctatatcactatccagccacttgaaattaattaaaaagattacatcacggaccataatccagtctattactacaatatgaagaatgtccaaatgtatcagcactgaccatataaatatacataaatattaaaaaataattatattactaatctcgccataacccacatataaggaaatattactatcattttattcaaatgagtgattgaaatagtaggccaagaacacttgtacttgaagtttgtttaaataattattgaatataataataccatattcctcaaattagtgtcttgtaccatatgatttaagatttaagaaggattgttatgcaaatgacaagggaaaaaaaatgtgaatataatttttaatcaaacaacttgacaagcctattcaaaattaagtcaccatatttacagcaaatttcaagtcttggcctttcatagtgttttgataaaagtttggagcacaatgttttgaagaccaggacaatccaaacgttgctatttcttctttattgcataaaggtatctttctcaaagatactttgtaaataaataaattattaagtattttgtcaagatggtgtttacttattaaaaaatgcaaaattaaagtgttgttagaaattaaaaatgagtggtcaagtaacttgctcccagatctgaccagccctaagtagcacctaagctaaattaaatatgttccaaatagaaagtctcatacctaacatattctcaaccaggccagtaggaatggtgtatctttttctttggagaaaaagttgttgtactacaaaatcttggatcaactaaattggattgaaaatccccaaaatatttgtaggcatttcattgatcagagtcaacatatattttcgtgactaatttatcctaagcaatggtgattaaagcaatcagtgaccaattggcatcaaggctttatagaaattgatttaaaagaaatgatgtgaagtaaaagtcttaagtcagctgcagattttgcatggatttgcttatacaaaaaaacaaatatcaacatccaatgttcaatgttcaatatctttatattattcaagtaagtttatagaatgagaaaattgcattatgtaatgtccttgaaaatgcatgagaaaccaaaccccgcaaagaaagctatctaaagaattcaattacttctaccaataagcttgtgttctatttatatggtcatattacaattagcacttactcaactgagttttgtcatcattcaacgaaatttctaagctaattaccactaaacaacacaacctcaactggtcattctttctacatataccttatgatttactccatgccaagtatacacataaatatatatgttatagatatagcttccatcagcatattcttactgtgcttacagcctttatcaatacaaatactcttttaatttaataaagtgagtgccaaagaatctaccttcaaaatttctcaactcaaaagctgcatgttggggtcttcgtttgttcgatatcagtccaggtccttcaccagcttacgtgatgtcaaaagttgggcttaatcttctgaaaaaagaaatcaaaatcactcagttactgcaacaatgaacaactaaaactctttctctagaaacctaaatttgatttgtcatatattacaaagatatccaataaaaatgaatgcacatataatactttactaggaattgagatccaacagtaaatggggtgttataaatataatccatacacgaacataaataaataaaagcacaaatgtatcgagaacaacaatcagttgcgacatactttctatgttcagccaaacaaatgatgtgtaatctaattactgtcagtttgggaccaacagggttaagatgaaataaagtggtatgtttataactgttgtataatgaaacttattgaagacagatacgaaaacatactatatgatgaatttaagagctgttccaaagtctatgtttgcatattcctcgtcggtctccttcaaaagatttgcgtatagaatgaaccatgtaagatactgcaggaacatttgccagtttctcgtcatgctcctgcaacatacaacatagatagagcttttcataaatatataaatatagatatatataaaaataaaaataaattgatgtctactatctctctctctcagtttctctccgagggtatgaagcagattgattcaggacttaccacttctgaaagacgttcttcaaaacccctggcatcttcttgactaggcatgaaaatctttaggtaagcttttctaaggcttgtgatctaggtccttgtccaaagtaatataagttatttcatcaattaacactagaatggacatagtataacttatatagagtgttaatgcaaacctcagtagctgtaaacccattgcgtcgaaggccctctagattcaaactgcgaagctcaggcccatctcctgcaaccatcatgtactttggaacatcatttttaacctatagaaagaaaaaacaaaccaaatattgaaaactgacatacttattatctatctaatagggtaataaaaacactcttaaagtagcatatacaacaatatggttaaagaaaaatataattcattttgtggcatgcaccaattgaagtactgacacatttcaagtagcagtttcaataacttatgtgcatgctgggcatcaacaactaactattgttataaaaaagaaaacataagttaatgatcgtaccattgcaccagcaccaatgaacgagaaagagccaatatggcagaattgatgtacagcagcacctcctgcagtgtgagcatagtcctgcgtagcacttaagtcaatttcaagacaaactttgcttgcaaaacttatgcgggaattggattcatgctacagaaacaagaaaggacttacttcaaccacaacatgtcctgctagaagagtgccatttgcaaaaatattactgtttcctactttgcaatcgtgggcaatatgacaagagcccatgatgagattgttgttcccaataacctggttacataatgcgagacaggatagcatcagccttacttgaaatataattctgttaggagaacaaaacattgtgtaggcttattcacatacagttttatcacttgattttgaagatctgtggattgatgtatgttctcggatatcattgttctccccgacataaaggaaacattcatcacctggctaaatcatggaataaaataaacatatcacaattgagtatagcagccacacatgcctgaaacttatactatagcttaaacgactatgtaacagtggcgatgctaatggtgattaactagcattcacatagagaggagcagaagagatttcatatactagcacccatatagaagatgcattttatgcaccccatacatccatgatgagcatttaaaagcagaggaaaaagtgttcaatcgtcacaattgttgaagctaaagaaaaccacccagtgacagggaacacactcaataatggtgggctaacatcatgtaagtttacattatagtttggttcctttgtaaagtgagtagaaaaaaaaaagttcaaataccagcatagtatcacataatgacattctaaaaagtgattagttcatatcaagccagtttgaaaactgaccttgtacttcaagtcttggcctctaatcccaacaacggcataatgtcccacaacgttgttgcatcccatcacggtatgcccaggaagatcatcaccaaccacagcaccactgccttgaaaaatttcaagcaagtcaaaaatgtggaaccaaaaatacaaaatgttttaccaaaaataatacaatataccaatatccaaactcacgtcatcagaacgcaatcattccccaattctgtattcccatatacatggcttcctgtatgcaatttacaaccattgccaagctttgcagaggacccaacagtacaaaaggggccaatggaaacaccctgaatcatcatatacaagaattttaccaacatacgcaataactgaaactaaagcaactcagatagacaaaagctcatagacttcgaatagttcatagggtaatgttgcaaagtagattacataagtacctaccagaccaactatagcattggggtcaacaatggcagtggggtggatgaaggtggtagtagatttggcaagttccagactttcaacatctgcaccaaaatgacaagagaaaaaacaaggaactcataaaccctccaccatcgcagcccaaaactaaatattatacaggaaaagagagagaaaggtgttactttgaacggaggcggagaagggtcggagagagagagcggtgaaaggagaggaaagtgggtttgcggtggtagctttgaagaggcgacggaacatgtctgtgtaggtggaagagtctctcactcactgtcactcaagtgtcaattgctctttcgcaaagaagagaacagagtaagtgtgtgcgtgtaaatcttttccttccttgtgattggatttgaaacaaaacgcctttcttttggggatgtatttgtatgtatgaattattgtatatccgaaccatcctctttccgatcattttcgccttttttgttttttaccacaatctagttcctcgactctttccgcaccaacatagttcttgtttttttttcctttttttttttgtcgtaagttatatataaaaagaaaattaacccacccctaaaaggtaggtgtgttcatagatgcaatccaatccttatgatccaatccatttcattctgtagagtgtggttatcagtatttgtgcgtattagattgaattcaaaattcaaaatttatatttgtgcggattaaatatgggaaatttacatggtatactaatttttgcttttttttacaaaaatactgccaagcggtatttt

SEQ ID NO: 25196 - DNA, 2270 bp, Cannabis sativa
  modified_base (38)..(38): a, c, t, g, unknown or other
tttcgtaaaaatgcaaaaaaattattttgaagtgtaanaataaaaaaaaaaaaaaacctctttattattattagtatgggaaattttaaaattgaggtttgatgaatcatatatttttagtcaatttttagattatgaccatcacatgatttgagaagagaggatattatatattgttataataaattgtgctaagtgatggggccattgattagtgatgatggagtgagattaggtttttttggcatgtttaataatggcataaaaatatagatatatattaaattaaaatataaattagtgttatctaattatattatgaatgaattagatagagaaagaaagccgcctctataattaattaagtttaatttcaactatctcatgcatgaatgctcttttatcttatgtttagggtttgggataaagctaaaagtttttatcacatttaaaaacgttatacgtacaaactttatttgatcaattagcatatatatatttattgtcaaaaaaaattaaaaaaaataaaaactatgtatttaatttatatatttatatattgagagcaataggtgtcacttttatctttattgatcggtataaaggcatttatgtaagcattttttaagaaattatagctaaatttctttttacatggtttgcattataattatatagatgatcaaaacccttaaagtaaagttaaattatagatgtttgaactttatttttaagatagtaattgattctaaatttttttatgaagacatgtgaattgtgaaatgcatgttataagtataataatatatacaatcatgatatatataatgaaaatatttgagttttttttttttaaataaaatgcttttatattaagatagaaatatcataatacaatattaaagaaagaattttcttcaaccaagtacaatcagtgtccactaaaagaacgtccttagctaataaatgaacaatattattaacagatctgtagacataaaaaatttaaagttcaaaaatattagaatctaaaagagaaatatccgctaacaaacaatatatgaacatttgagttatatttaatttttctaatctaataaaaaagagtacctctaggatataatataatttattccttatgtttataaggatggcaaaaaatacttaattacccaaaataaaagccaatttctcaacaaatggcaaaagatatagctataggcaaataggtataatgtatatacatacattatagattttttttttttttttttgaagagtgaagcccaaaaaataaaatagaagaattatataaattatgttcctcatgtgatacatatatggttctcacatatctatcaattttgtcaaagaattatttcctaaggcaattaatcaaagaaaaatatattataagaaggtgattgcttagtatagtatctatggtactaatactatagtactattctaggtaataaagattcctagacgacagtgtttgcttttctgttccacaacaaaattttcattggcttatatattattctttcctcctttcttttaatttcttttgaggctttacctaacatatctaatgaaatttcaactatatacttttacttgagtcatatcagaaaatgactaccttacttaagtctagatcgaaattaattaatgttaatttaattaaaaataattagtttttttttgtctgtctagaatttttacactaccaaattgtgcattttataatatacacagtttgttaattataagggtactactcaaaatttaaattttacaataatgtaatccttctatgtatcacattttattaaaatttataattaattataaaataagtaaagtggtgaatagtaattgataaataaatacaaattaattaatattctcaacactttttaccttaatgaatataatagaataaaaaacaattgtataataacaatttatatttttagttttagttttctaattattaaaataaaaattataaaatgtatttaatttatacccatttattaactattattcactgcgatcacttatttcacaataaaattaaataaaatatgatggaaggatcacattactgtaaaaattatattttaatggatcttattaacgagtcatataatataataagtacaacttaatagtgcaaaaaattttggaataaaaatactaattattttttgattaattaatttgttttacgtacatataaaggtagtgtttaaattttttct

SEQ ID NO: 25197 - DNA, 1776 bp, Cannabis sativa
  modified_base (46)..(53): a, c, t, g, unknown or other
aaaaataccatataaattggccaaacttaaatgtgccatatttatnnnnnnnncttttaaaatcccatactaagtgtaatttcctcaaataaatatagtaataacaaatgtagttattacctttatttattgtaaaacacaatgtttaaatattaagaagtaattattacataggattttttttgcttaacaaaaaaaagattgattaataattaattatttaagaatagttatatttcttaattatcatgtaactacatacaaatttcttatgggattggaatcatgagaattgaagtgtgtaattaaaacaccttaatttcctctattaattagtgtgaaattctattaggactaactttttaaaagcgccctaaatatgtgtataataaatgagagaatgaaagaaaatttaaaaagaaaagtgaagtgttcataaagtatcaaatccaatttaatttgtacgatgtaattcaattaaatttataaagtacgtatatcaatatttttacgaattaaattagattaaaaactataaaattcgcacttgtgtagattgtatgttgattgacatgtaaaagtaatcgatttaatccaatctacatgtatccatttatgtatatgttttaaaaagttataaatacaattagtgttttaatgtaaaaaatagtaatctaaaaatcaaatgtatgatacaaatatattttaaaataaaatatatattccatatttttttttttttacaatgaaatatgaaaatataatttaaaacaaaattaattatttctttatacatgcaatttttttttgtcttcttcctttgatttttataaaatttttgttttatttattttaatttattgttggagacataatacagcactaaattattttattttgttgttagttatgtgaaaagtatttttttaataaatattaaaaagtttctaatccaaaataaccgatctaatcaacacttttacaaatttaattagatttgagttactatgcggattagattaaatttaaaataagaaattcgtactcacagattgaattatacgaatacctctaatcaaaaataaaattgagtgtttagtggaggggagatagtgaaataacaaaaaaatagaaaaaaataaataaataaaggagataaattaccaatgtaaggaaatagaggagatacaaaatgcataacaaattattaaagagtatttttatttgcaccgaataaaattatataaaatgtatcttttattaacactatttttaaaaattttatctttcttcttatattttttaaaaaatatacctttaaaataaattaaaataattattgatattaagagaaaaattatataaattatttcaaaaaataaaaaataaaattttcatagtaaaaaatttagaggctttttcatttttatacttcaaaatagtttattttttatatttttacgaaattctatataaaaacccctattgcaactaacggagcaacttaaattgtaaccaaaaatcgtatcgcaatccacgtagaaaccactgcagaaactactttaacaacccaaacagtaaatttgaaaaacaaattaaaaataatatatggagtaattccccaaaatttatttcatatttaccaaatatttggaaagaaaaattatttaaaaaatgaaagagaaattttttgtctcttgtttcctttctttctaggggtgttcataaaaaccgaaaaaccgaaaccgaccatcaaaccgaccagaccgtaaccga

SEQ ID NO: 25198 - DNA, 4103 bp, Cannabis sativa
aatgcccaatctgccatcgaacgttcatcctcttgtaaggcccccttcaaaattttaaagacctcaatgacaattttttccttaacctccaaagaaatatagccaatgcccttattgttgatgttatcaacactttggaatcacgctatgagcccatatttgtggagcagcttcgtagtaaccaggttactcacgttcaacgcactgtccagaattggggcgtaaaaggccaatcttgtctctagctcctcgttcacaggagtctgaggcagaggtgctgtcgcaaatggaaaaattccattagtcatgaactaggcaacatagccgcccttcgtgcggtgaatgtaaatattatatatattaattatttttattatttattaatttttattttatgtttattaagttgatataatgaatgaaatattgtgttgttaaaaaatcaataaaatattgtgaaaattaaaattataaaatgaaaatataaatttaaataaattttgaaaccacaaccatgattcttgatatattaaaattgtattgatcactacaaaccacaaaatttatgtcacgtgattaaaattattacaatacaattatgacaaattatattttagctgtgtagattgaaaaaaaaagtttaaaattgttgtcattaccgtatcttactcggtgtcgtcactatattcaaaatcataatcatcattgcatttcacttgtagtcgtcactatattcaaaaccaacatcatcagtaccgtatctcacttataatcatcactacatcaaacctattatcaatactgtatctcacaatatttaaaatcgatatcatcaccacataaaaaatttaccaaatattaccaaaatcaataaaagaaagaaatttataaaatcgtttgaatcaattttttattatgtataaatactataataattttaccagaagtattgattactgtatttatatttgtttatttcaacaaataaatgatttaaacaaacaaataattaaaaattcaaattcaaaactaaaattatttaaaaaaataaaaaataattaaaaaacttatagctaaaaaagtaattaaaagatttattaaatttaaattcaaattatacatattgttaagataaaataaattgttgttaacttttaaataaatctccttagagaaatagattagaattttgatccttagatagtatatactatatagagtgtcatatctcacctttatatatatttatatagatttatcaacaaccattataaattttaatgttttttctcttagaaaataaattcttataataaaaagttaaaaatattaaagaattaaggagagaacaaatattactatttagagagattataatgtgttatgtcaccgtttcatatctcttatttgtatatatatatatatatatatatagatagattctaaacaaggaaagaataccgaatagagataaaaagaaaatcttactaggagttttgaagtctacaggaagatttagtaccctcttcactgggaacccagtggagaagaaccagtattctcagaggtcataggagtgtgatgttatgttaatggggcactgcacgtccagatacttttccaatttataaaatctaatcttgtgtttgttagcacacatgggttgaggtttgagagcatagcaatacaagatctcttctggactttggggttcaactttccccatcttaaatagtacataccacccagacaataacttataagatggtggaatcaactgaaaaggtgcaattccaaccttcgcagaaaacctcgcaaagtaagttctcaggggtaagtgtgccccacttgagatatgggcccaactccaagcgttgaacgctctaggaagcagattctcccgcgactgatagcttgttccacaccagttcgggaatattacagactgccccctcagtagacaagttctccatcatcccgcatgacctgaacttgttagtgttttggtccatctcccagacagaatcattataaacaaggggagatgaagacgagacctttgctttgccatttgctgtagttattctcattttcccctttcgggcagtctcaagggcaaggtcttactgaggccccttcgcgggtacctcaacccttagttcctcaatgtgtcctgcaccaacaatggtccccactgtacggatgatttgacacacgagaaagaaccatcttggggacctaatagtcagatattttatgtattttatcccaatagtaagtgggctttttacagaaaccttaggctggtcatgggtatgtctatgcccgtacattaacctgtaaatactcatttatttttatgcaaaagagggatcgaaaaagagatagccaaagctctatcaaaatctctctaagttttcttgttcttcaagagaaaccaatagagcaaaattagagttttttttactgtaaacaccattgtaatacattaaacaagccttctaaggctcatatactcacacaaggactaagaataattaacacccaaaccacataaaaatctttgtctactttatttattgattttattactttgtaagcttttatttaattagtttttgaaaatctcgataaatactattagaacacatttttttcactaagtctatattgtaatattgcattacttgctcttagccattcgatcagttgtgtttaatgggaaactgcgttcctagataggatttttggaatttttatcaagaatgagaacggaaaagatagaacccagttcagttattgtgctgaacttgttgagatcaagtgctgatttgaagatgaagtcagtaaaatgtttcatctattattatataccaaaacttggagctggaattcaaggatgataaagacaacaattcaaaaaataagctctaaataatgttgtttagtttactgcagtagtttctaatctttacgaagaaaaacactgaagctgaaatccaaagaaaagcctctaattagttttcacttttatgtccaaaaactaggagcttcaaccaagacaatgagcatttttggctagtaacaaaaatccaacccaagagatcaccaaatttcctcccacaaaatctatattatgggtatcttcgtagccctaaagcagtatttgctataaattttccattttcacatattttaaggctaggtggatatgcaaaagaaacacactaaagggcctaaaccaagaagaatcactactaggtatataagtttaacaagaccaacaagcactgctattaagcatcttagagtatccctagggcatgacatatcaccatgactgcattaatttaaaataaatttaaattcagatatgtaagacctatattcatctgtacgaacagtggtataggatgctcattattattaaactattggaaaaatgctctggtttcaataagcaccttcaatttccacttcctactttcttgtaatagtcaatgatgaaacactaaaaatatataagattgagaaatattattttttttccctttttctaagaatcaataacattgttttgataaaaacactaaccagagattggaagatgcagacccacaacaatgctttgatccccaaactgtcaatataatgctaatggaccacaacgagaaagaaggaaataatacactaaattttaattcaaatagatatataggcaaaattgatatgttgaatcacaagaaccaacattttttagtgacaaaactcaactcattgcggttccttggcaatatataccatgattcatataaagaccttacaaggagttttcaaactagccatatttatcatgtcatgtcttctgtagcaacaccatcattttctcctcctggtacactgcttccaagtcgtagccttttcgttgctaaacaagaagaaaaaaacaaagaacaatataataaataacttgataaacctcgtgaagaagatggagattttgtaagtaaatacaagcatttttttctcttatatgacatcataactgataatacattttccagtttgctctgttactccatttcaaatggttgcattacaag

SEQ ID NO: 25199 - DNA, 3880 bp, Cannabis sativa
aatttgcaatgttaattgtgcgctggaatccaacaacatgataagagaatctttttttaactccatatatagaacacataattgctagctagagtagttaataataaagttatccctatatctatagctataaactttatttattaatggataaatataaagccatgcaaaagagacaaacagacaataaaaagtagtaaccataaaaattacagtcttcacacacacacacacacacatagcttattgttaagaaaaaacaattgattatatatataaagaatgaaactgagaccaatttcatttgttatatagctcagaaaaagtatcctgtatgccatattaaattttaaaagcttattatttatattaacatttacatacattctaaattataatgttactataaacagtgacaggttctagccagcatgagaaatagtcaactattttgacttgggagaccataaaaacttgattaattaacggtctttaaactaccaaagtcaaagactgttattataaatatatagaaacatttagccataaaaacatgtatacacacactattgaaaccctaaaattacgatcaactaataataaggggtttggccccacttttcttaaaataataataatcacgccatcactctcggctttattcacttataaataattctcacattaattacactatactccaacctcaccccacttctctcttttattttttttcttctattctctattctaaaagaataaaaaaaaatggccaaactttcaactttgcttatcttatttctcatatcttttctaatatcagctacttcactatctcttgcttcaattcaagaccctgaacttgttgtacaagaagtacaccggtaatatattattaataattacattcataattatcttattttatttttataataatgttagagagtttcacgttgataatatatatttattaatttttattattattaggagtatcaatgcttctagaagaaacttggggtatttatcatgtgggacaggaaaccccattgatgattgttggagatgtgatcctaactgggagaagaaccgtcaacgcttagccgactgcgcaatagggtttggtaaagacgccattggaggcaaaaatggaagaatttacgtggtgacagactcaggcgacgacgacccggtaaaccctagaccgggaacactcagacatgcggttatacaagacgagccgttgtggatcatattcaagagagacatggtgataaaactcgagaaagagctcgtgatgaactctttcaagacgatagacggccgtggagcgagcgtccacgtggccgggggtgcatgcataacgatccattacgtgtctaacgtgattattcatgggattcatatccatgattgtaaacctgggagtagtggtgatattagaaactctcctgaacattctgggtattggagagtttcggatggtgatggtgtttctatatttgattcacaacatgtttgggttgatcattgttcgctttcgaattgtaaagatgggcttattgatgctattcatggttcaactgctattactatttcgaataattattttactcatcatgataaggttatgcttttgggacatagtgattcctatactcgtgataagaatatgcaggttactgttgcttttaatcattttggtgaaggccttgttcagagaatgccaaggtacgtaaattatatattatatatttgttaattaatttcaattagcattatgttcatgtgttttgaactttttgcaggtgtagacatggttatttccatgtagtgaacaatgactacactcactgggaaatgtatgccattggtggtagtgcgtccccaactatcaatagccaagggaacaggttcttggcaccgaacgagcggttcaagaaggaggtaacaaaacacgaggatgccccagagagcgagtggagccggtggaactggcggtctgaaggcgatcttttcctcaatggagctttctttcgccagactggggccggtgcagcctcctcaacctatgctagggcttcaagtcttagtgctaggccttcttcccttgtgggctccattactgttgcttctggagcccttaattgtaggaagggatcccgttgctgatgatcgtgatcatcgatcatcagcttaattttatatgatattataaaaaagaagaatcttattactgcaagtgtaacaatagctaaattaagcatatttattgttgcccttttgcagtagtttaaattaatcttggttattttgtagtagttttctaaattttaatgttttgagagcaaatttagttttaaatttaaagtattgcaacctctgcatgccaactagttatgtaatatatatatatagctagctatagcttgtaacttcaattgtgaactgcagagagagcaagagcagaagtgttgtcttttaatttattagtttttatttttaattatatatattaataaaaatatttattataatatatataagggtattgctatctacgcactcagagtacgtatagtataatgctttgcagaaaagtataatttaatctttagcaaaatttaaaaaaaaattacaaaattaattaaataatttgatacttactcatactaattagtaatataataatatatattagctagcatctctctatatatataaacagtagatttctttggaaataaattaattcatttcatataattagatttaatatatatattaacagaatacatgaaaatgcaaaaaatattaaaaaaaataaaaaatgcaagaaaatgtcaatttttatcttattaaaagaaaaatattaaggagtacgactgcatgcgtacaatgtattatgttggtaaagataaaacttggatttgtcaaaattagacaacatgaaaattgggccgtcaatcacgcatgcatagaaggcccccgcggagtttaatcataccttatttgatcttctgctcagctcacgctacatacaaataaataataaaaatttaaaatataacttatttaataattaatgtaccaaaaaatatataaatttgatacataataaattttttactaaatttagatcaatatttattatgatataaaatttacatcatatttaataaagagtaattggactatttattttattaaatgacaaattagaccctatattttctaaaatagtaaaaatagaatcatgaactcaattttcaaaaaatttattttttaatataaccaactttaaaataagttctaacacgaacagatacagaaaatgtaaccatttttgtcataatatatctagattagattttttaattaagttttactttgataaaaaatcagttcagggttctatttatacaattttagaaaatacagggtctattttgatttaacaaaacagatggtccaattgataacttttgtaaaatacagggtccaaaatggtatttactctataataaatgcactactttttatttatacttatgtcatttgtattattttattagaatatttaataatagcattaaattataaatcatttatattattttaatattatctaacatattaaaataataataaaattgataataaagttagtaattgttattattttaataaaaaatattgattagatattgaattttaaattaaagttttgtaattgtagattggagcacagtattaaaacttaatgtaatctaccacaaagttattttttatgtcaaatatagcacaatttttataccttccattaaagatggtctttactctcgtgggacccatgcttattccatacttaaaagtc

SEQ ID NO: 25200 - DNA, 3537 bp, Cannabis sativa
catcagccacgaccattctgagtagagaacagatgttgttacgggttgccacagtggtgttgttgctgaagaaaattgaggatttaccaaagttaacctgttggcccgaggcatgttcaaagatagtaagtagatcacgcaccctagaagcctcatccattgtggctttacaatatagataactgtcgtccgcaaaaagcatatgtgacaccctaggtgcaccattttccactttacatccatgaagccatcccctcagttcatagtttcgtatcaaagccgaaaagccttccgcacataagatgaaaatatagggcgaaagtggatcaccttgtctaattcccctttgaggagcaatcggccccatcttcttgtcaccatgaacaatgatatatgaagcagaccgaacacattccatcatcagattaatccaccccagatcaaaacccaatctcactaacatggcttccaagtaactccattcgattctatcataggccttgctcatatctagtttaagcgccatgaatccttcttttcctcgtctctttcgtttcaagtagtgcaacacttcaaaagacaccatgatattatccgaaatgagtcttcccggtatgaaggcactttgatagtgcgagacaatactatccatcaccggttttaaccggtttgccattactttagtaatagttttgtataaaacattacacaaagcaataggacgtaagtccgtcattcgctccggatttctaatcttcgggatgagaacaacattggccttgttaatctcattttcgaactttctggttgtgaaaaaacgttgaacaagcttaacaatatccggaccaactgttgaccaattcttttggtagaatgccgaagttaagccatccggacctgggctcttgtcgggatgcattccaaagattgcttgacgcacctcatcctccataacagggagcaaaaaagcttcattcatctcgggtgtaactctcctttccacacactcaacaactggttgggtcaaaggacgagaagagcaaaataaggatgaaaaataatctgtaattacactttccaaacctgaattccaagagacatccattccttgatcattctttagctgttgaatggaattagttttacgtcttgtattagcagccgcatgaaagaacttggtattttggtcgccttccttaagccaaaattgtttggctctttgcttccaaaacgtctccttttggtcaatgatgtgtagaagttgcttcttaatctccttatacctttggaccgaaaccatatcccttcgactcttcaacaaatcaagctctcttttgcacgcattgatacgttttctgaagttaccagtaattgtttttccccactctccaagcttctccacacaaagttgttgtttaacccaaaaatcatcattattagtgtcctcccaacaatcttgtataatctcataacacattggttctttgagccatgcattttcgaatttgaagcttcggtttccacccatttgaaaggtagcctctggttccaagaaaagcggacaatggtccgaagatgagtggtgcaaattatatagtttttcatttgggaacttttgcaaccaaccagaattgactatggctctatctagtctcacttccacccaattatcacctcctctatttttctcccaagtatagggatgaccaataagctccatatcagttaaatcacactcattcaaagcttgcaaaaaaccttcaatgagacctcttggatatctattgccaccacgcttatcctcttggcatactatgttgtttaaatcaccaataatgcaccaaggatggtttaaacgggtattaagctcacgaatcaagttccaagtttgccaccgtaagtgtcttcgaggttcaccattcactcctgtaagtctccaatgctcacgggtcccactagtaacaacaaaatcaatatggttttgtgaaaaaccatatatgtaaccatcattttgtcttttccacaaaaaagctaaaccgccacctcgcccctgggcctccacacaaaacaccccctcaaagcccaaatatctcccaacccaatctactctactttgcacacacttagtctcacacagaaaaataaaatcgggcttcttacgagaaacgatctcttttaagaattgaacagtccatgggttcccaagcccacggaaattccagctgaacagattcataatccatggcgggcctgtgcaccagagcccgccccaattgagtttttttgcatcagtgatgtatcatactcacccatcacgtgatcaatatcatacacttcatgcacatcatctcccacaaccgaatcttcctgagacacctcaacactacttcccatatttattctccttcttttttggtcaattaccatctgcctatcacttcctttctctccattctctccaattatcatctttccttttttatctgcattcattcccccctcattcagctcaccattaatgtgcaagattttatctcctccatcaatctctccaccaatcactcccctaccaaccgcccctgattgcgcttgagaattgccaatcgtcggtccagccggcaccggagaaacagaggactcccctccatgtttcacagcaatttctggacgtaaccacctcgcgccaatggtgtgtgatcgtctccgaggcgctgctttcaatcccaagtcataagctttaaccagtaggtgtggaggtgtgtcaaaagccttctcgcagaacctttcggagtggcctaacagaccacacacaaagcaaaaagttgtcaaatcttcatatttgaaaattgcagtacactctggaccatttttcaactgaagttttctcccttttttcagaggtttgtcaacctgaattcgcacccttattctcagataatctctccatcccccaatgaaattgtttggatccattttaacatacgtaccaacataattgcccagatccttcaacactctttcggatcgaaagccagctattaaaccatgaatttgaatccaaaaacacaatccaacaggagcaatacatcgtggattctcccctgccttgagtctttcgaagatcaaaggaattctatcaaacgtccacgggcttccctccataacacgatcaatatccatatcatgatagaattggaacaagaagagattcagttcaagttccttaacaaaaagtccacgaacaggtcgccatagagaggccatcttgtgttgcatagcttcaaggtcgatcgtacgatccatcaaaaatggccttacaaggcaccatcgatcatcaaactctacttcctcaaccgtatcattgtcatacatcaaaaacccatcctcatcatcccccaggctcatagcagcgtattgttgatccattccagaaagcaagattgaaatagcaccaataacaaaatcgaaatcacacaagcagcaatagaaacaatcaaacactcatatgaacatcaaacacatgtcaaaagacaagac

SEQ ID NO: 25201 - DNA, 2724 bp, Cannabis sativa
ataaagaattgattacagaacaaaaggagaaaagagcaaatgcagcaggtttattaactcacgtttcaagaaagcatcaaacagattccccgtaacaccttcaatagtatcatccactggcagtatgtggacacgctttccatacttaacatcagggcattggtgtacagacaccacatcaccaagacgaacccttaaatttgatctaacgaccttgttcatcctgatctttgcctcctcacaagtatcatcagcaagcgcaatgcatacagtatcctttcgtttctttccctgcaaaaacaatcatgaagataaagggacaagtaaaaaagaaagtgcagcaataacagaaatagaaagtaaaaaggagggaaaaaaaacataaaacaccagagcatttgagactagagtttcaaataatgccagaataaacttgatacataatatgttgacagaaaaattatcaaacagaaaaccaaatatcttatgttttgttcaacagacaatatttggaatggccaattttatttcaaaccacttgcaactcaatcttagaaataactattacatagtctagaaagcccttacctttaaaaactacacagtaaacgatctaagacaaaatcatgtctacaatttgcttttgcattatattaaataacgacacagcaactaaaacatatgaagacacggaaacctgtagaaagtttaacttgttaatatggttcctagaataaaattgctacgaaggaaaatgggtataccaaatgttttcttttacgcatgtacctctacaaaccaaaaaatctaaagaacaaagcacatcggacataaaaagctatcatcaattcagcataaagcataaactttgaaaaccctcatcaaaatcccgaattaatatattcacatacaaagggcgcagttaccagtcgttaccctactcatacccacatttcaactcatatcataaaaaacgtaaaccctaaattttccacatgaaattattcgtcctagccaaaaggttataaatatttctactgtaagtattcgtgtataccccagtaccttgatgaggatcgtatctccacggaaaagctgcaacttttccatggtattagggtgaatcgaaacgacggagttgtcgtcattaatagcctcatccacaaccaatcggttcggcgacttcttacgctccagaatagccgttgagaaatccttcttgctgaaaaataaaatacaacaaaaccgtaaattacaattatataacatacatacacagaataataaaaaaaaaatgtagagcgagttgactcacgtttcggatgattcagctttgtcagtcatggcggatgagtcgatcttagagatcagaaactcgtagaaaaagtgagagacgttgagcgtttgtttaggcgaagaagccaaagaaattcagaagaaagtttgaagacttcaagagtctgaaattctgaacttgtttggcaagaaagaaaataagggaaactatctctgttatgcttggttctgctgtggttacctatttataagagaaagtactcttacttacctgttttatttatgtttggggattggatttaattttagttttaatcttttacaccgactcgctttatttaaaatcaaaatacatttggattatcttttctcttcttttcttttgttttttttttttttttttttgattatctatttttttcaaaagaagatttcattatttagtaaaaaaaattataatgtatatataaaagaaattataaattgtaattttctttttaaattaataaaataatttgttctggaaaaaaatatatataataattataaaactatttatgtttcatatttttaaaaatcaaattaaaatatatttggattatcttttctttctttttcttaaggaaaggaatattttgattgtgtaattttaattcaaaaaaggatttcattatgtatacagtatattaatttatttctaaaagtttattctgttgtttcaaaaaaaaaaaattattctgattttaaattttctttatttattaatttatttttttttattacttttaagtattttatttttttttttgtattttttttttttgaaaaaataattaatcattttaattatctgtcctttgttttaattttttttatatatttcctttattttaattttataaatatacatatttttttgcatctaacttacaataataatattactaatatcattaatatattaacatatcatatcagttaaatatttcttgatttcaattttcgttacttgaatttcaattaattctaaattctttttttttttttaattttactgcgttttcaaaagtaaaattatttatcatgttgataagaaactaattaattacctttacataaaaaaaaaaaatatttttgtatcatataatttgatatacattttgattacctctaaacttatttgtatacatcttagtaattaattagttatttttaaattatattatggtagcttgttattcaaaatacattttgataactttaaaatttatttttgaaactaatgattctgcaagtaatataataagctaccatttttatataccacttattttatatatatttttgttattttgaaatcgacgtgtttatttatttatttttttctttatgatatttcaaaactgcttatgaaactaataaattaca

SEQ ID NO: 25202 - DNA, 4869 bp, Cannabis sativa
attttgtcatttaacaaaacacggggtctaattgataacttttgcaaaacagagggtccaaaatggtatttacccgaaaaataattaatgtttcgtacgtaagtacgtacttctcaacactttcctctgttctccaatctggactttgacttattattcagacaaatcattttattataacgacctatattgacaattgtagatattatatatatatttatgagttcaatttggccactaaactatattattattaaatattaaatcatctcatgacttgcattattaatgcatgccctattaaaccaaacttttttcattgttattctataattagattagatattctcatgacttgcttacatttagttagtctaatcatagcactaaaaaaaaataatgttcccttatttttaatttggataaagacttacactaattaagtcccctgataaggcttaagttttctctttaaatggggattgtgtaattagagacgaggataattaggatatgcccatttataataataaaaagaagaagagaagaagaagaaaatttgagctttataaattaagaatgacacatatatatatgttacatgtattcaaaattcattaggaaagaagagagtataaattattcattaatattattatattggaagaacaaacaaaataaaaaatgagtgaatacatggatataattcatccaatctataaattttacaaatgggtttttcccattacaaaaaaaatcaaaataaaataaaaaagatttgcctagccctaactatatcatcttcttcaactactcttggtatatagattatcatcaacttatgtagacatccacattcaagctagttaggaatgaaatgtatattattatatatatgcatatataaaatatataatttggcctggtcggttgtatttttaaaagctgcttttacgtttctaaggctccaaaagtgtttctcctactgatcgggtgactaatgaatttcaactttcagttctaaaaagctctttgaggcgaaaacagttttggtaactttcttagaaactaacaaaagtagaattaaaagttcagccaaacaagaccataatttaacattgattaattatggcagttaccggagctatgaccagggatattagtacatggatttggacttggagtatcgttaccacccctcgggagaacctgagtaatcaaaggcttgaaccaatattgatgatgatgttctgcttttaataatggcctcatttctccaactattgctaaaccaaacaaaatgcttaaaaccaatacaactctcaacataattctcctctcaaaaaaacccatcttttgtttttcttttctcttctaaaacacaaagtattgagctttaaaaaagtttgtaatggaagtgaaactttggtaaacaattgatatctatttatagagaaatataattattaagatcatgcatgacacaatatgaggtctaatgccatgtgatttgactcatgagttattataatttgaatatttgaaggaatcaaacatgagacgtagttacaaggaactaacccaaactgatcaacttagataggcataaattttgatagttttcttttgtgggggtcaaaaatattgaaactttactaacatatatataatatgtgataccaaaaaagataattaaataaataaaagaatgaaaaaattggcgtatgatttggttgattatgaccaacaaattaagcaaccatgaatgaatgaatagttttaattttgtttataatgtcagcgttgaggtcaatcatctcctttgaattttgagaatcactagtcaagggaaccataaacaattattattattattcattgtatttatttttttttttgagaattattattcattgttttttaatgctcaaatctttaagggcatgtgctcttcttaaaatatataatatatatagagagagagtttgttttggttatttttggtactttaataaattatatttaattttttttatgtgacattgtatattgttattctaatagatattttattttgtttttaagaattttgtaatacttttttatgatgtcgaaaataaaattcaaaatatatttttttaaagaaaagaatttcattaagaaagatcaatcgcctaattacataaacttagtggtaacaacactcctactaaaaatttaatttggaaaagaatacgaaactctagcagagtcatgagtccctctgttagcagaacaataaacaaatactaaagagatttcactcgtacaaaaaattaattgtttaattattgtacacatataaactaaaacaggtatttatatgtgtgcaactgaatattattttcagcagagtaaattattcataaatagttaatttataatttttttatatataccaaaaacaaaaatatcctttattaggagcaaaactaaggctctcacaagtatatgactttttctttggtcttcttcaaacttagatatcgaactcaaaacgcagtgtaaaatacgattgagccaaccttttacttccttgttgaccaagtacacctattgacaaaacagactgcatttttcaactgttactaatccttgtttatgaattatcacctttatatatgtatatatatatatatatatcatttctgaattcaaacaggtgacaaaatgaataacatgggtggtcaaagaaccaccaccacctttgtttctttataatttctttcccatcaaaatcacactaaatttctttatcttgagttgaacttttgatattatgttgatccccaaaatgcataatctgaattgaacattacaaaaatgacaaagtaaatcatttctctgagaattatactaatagcaggatccattatctcgagtattatacagtacacaaggttaatcagttaggcaacagggaaatacatcttatataaatacacatatctacaattcaaatcagtttgatagagcagccagcagcttctccttcagttgctcagcttcaccgccttgagtttgaatggagaatgtatggacgattctatcgttttcattgatggaaacattggactcttgagcaacaatttgatgttccctaaaagctttgatgacatttgaaacagggtgtgagtccaatgggcagctcatcctcaccactgcatcttcctgtctcgattgaaaatcgatctctggcattgagaactgttgctgctggccattgttcaccatctgcttttcggtttccatcaccctgatctttgtctggagatctgtaatataagtaatagcatcaccaagcagagatgctttgtccatctttgagatgttaggaacaaccgctcttagtgcataaaaccgctggttgagcttctcacgcctttgacgctctgcttccacatgatttaagggttcttcccttccatttgctggctttctccctctctttcttggtttccgttcatcaagctgaggcaaggcatcatccttaggaggctctactacacctgtagctcttgtttgggcattgaaacctccaacaagcatttgtggaaaaagtttcatttcatttgtgtcacttcgaccattagaagaaccaattgcttgcaagtcaaaagattctggtggaaaagccgaatcatcttctacctttggagagaagttaatgttaacggattgggattttgtactccctaaacttagttcatgaccaaagatctttgggagtgcctttgttgtttgttgtgatgaactagaactcccagctccaaaaacagttttgaccatatccacaacactttgatcttcaggggtagaattgacagtaccgagctccaccacaccagaattcacaggtacaaacaccactgtttggaatccagccactcttgctagaaaagatctagactgataatggtgggagcaattagatacatcagaagcccaaattgctttaccagacttgtatgactccccaggaccacaaaccgaatcgactggatacttataatacatagaagtgaggtaaaacatctctaaatctgacactccatctagtttcctagcataattatcatcatttgacccaccaaaacaagcatgaagtttctcaagcaccctcttcttcaactcattcttgttctcacttccatcaaaattagtaccactctcactcgaattcttctctgcagcaacactacccttttgattcctacaatgtccatcaccccaaatcaaggccgccccgccagacttcaagctcacaacccgccagaagatgccatagttccaattacagttttcaactaattgacaaagcccttgctgcacacccgaatcgccacccggtttgttcaacccggaaatcccattgtcagaagctaatgagatcaagaactggcatgcttcagtacccaccactgattccaccataaccttatcctcaactttcacccaaaatttctcacccatttctttatactaataatatcacagattcacaaacttaaatagcaacaatcaactcacccaaaaccttaaactctataattgaatgtttaaatctcagtctcttttctaagctcaaaggtccagtaataatctataaaaatgaatccgaaatttcaaaaattcaaagctacccatttatcagaacgtcaagaggatctctaaaccataattaacagaaatttagggtaacaagaactggttttactatatacttcaaaattcaggaaaaaataagcaaatgatcaaacaatacaaacttgattaccttaaggaaatcgatgttggagtgaatttgaatccaagaacaaggattcgtac

SEQ ID NO: 25203 - DNA, 1496 bp, Cannabis sativa
tatatataaaaaaaaagtatatttcaattaaatataaaattaaaaataaatttaattaattgattaataaaagtggtatttttcaacatactccaagaatcaaagactcttttctgacaagagtaattgggcccaaacacaataacagcccaactaataaaaccctaatataaaagctatatattttctaaccctaaagcacagcagccactatctctactcaaaaattcaatttttctctttcaaacttaacagagaatattaatatttcaaggtattcatcagattcatcatctcaaaaattcaatttttgtttttcaaacttgtctacatattcatcacattcaacatcatcaccataccttaacagacaccaaatatctcaaggtacaccttgtggttgcagagaagaacgaagcgtttaacagtggtggacgtacggcgttatttccgattaataggtatttttttttttgtaatgatatttttaatctttttattttcaaattcttagaaaataaaacacataacttagtttaaagtatctaaacttatgataaatttagcgaaaagccaatgtagataaaacttgttagggagacttttacatttcctgctccaaagtcataagactcagtcgatattgataggaacaaggtccctgacaatcaaatgtagattaaagaatactctttgataaattctgatatttttatgatgttttaggtatcacaaggttagtaccctgacttcgatagttcatattctctgtttttgacatgaactaagtagtacaatttcgtatgctcaatctacgaggttgaatgaatttggtgtaaattttccattgtcgtgttttcttctgagcagtggataaaactgaatataagtatattgaagctttactgtgatgctataatctttttcttttaattttattataattttttttgtcaaacgatttgggaatcaagtagctgatgaacttattcatttttctaattttaattctggtcatgttttcaacgcaagatgtgtcccgattagattgcacttattattttagttaattatttttataaaaaattactaattatttgcaaagcgtgctaaaaatgttggatacatgttgatacaaagcgtgctaactttattttctaattttttatataaaaaatttaatgtaaaaagagtgtcataatattattagtaaaatttaatatcaaatccgatatgttttaatttaataataattatagaaattaactaactattaactcaaaataggtgataaaaatagttttgaactttacttgactcgccgtcgccgccctcccaaccgactcagtcgactcgatctgtgtaacatttggctaacgcaacgctctccctctctctctctctctctctacctaccattgatgaactcaccaagccccactgatccgagaaaaaaaaaagcctcaattctcaaaatttcatcaaaaagaaatgat

SEQ ID NO: 25204 - DNA, 1965 bp, Cannabis sativa
agctgaccgacttattcacaagaccaaggtaccgtgagacaacatagttgattgaattatgtggacgccaaggatcattaagaatggagacattttccccattagcaattgttctttgagcacaggcgtggataaagtcttttgcttccagaatactacgccaaatgaaactaggattgtctcccaatacagcagaaaacaaattaccagtagcataatatttagtcttataaagcctactaatcaaagaatcagcattaatcaataaacactaatattgtttccccaaaagaaccaaattaaagtctatatcaataaacaccctaagtaaaaaaaaaaataagcataaactttttattattattataaaaataaaacataagcatttctgtaccgcaatgatttttttttttcttaaataaacaacaatgtttattattgtaaaacatgacattttattatggtaaaaataaaaacattacatttttttaatgatcaaataaataaatatcataattaatgaaataaacataaaaattaatcatttttgcaccataacaaaaatatttactcttgtaataaaggacatttttttataaatatatatatatatatatttatatattttattgtcaaataaatagatcaataaacatctttttctttcgagtgaaaaagaaaacttcattaagtaagaaataaacataaaaatatttttttagtattatagcacaacaataaaagtgtttctttatagtagaacaataaaaaataatcaaacaataagtgacaaaaaaaaataatcaagcaataaaaagttactaaaaataaactcctaaattgtagttataatatgctaaataagatttaaaaagtaaagtaaaatattaaagttattttgaatgcaaaagttatagattggacaatttgttttgttaaatgacaaatgaactttgtatttttcaaaatgatactagtagaattttgagcttaattttcgataattgttttaatataactaacttgaagataatttctaacacgaatagatgttgaaaatttaactaattttatcataatatttttaagtcaaattattattaaattttattttgataaataatcaatctagagtcttatttatactatttttaaaaaaaaatataaaattcattttattatttaacaaaataaatatataagtaatattaaaatgtataaatacatatcaatattttgtaaaaagtggtattaaatcatgtaaataataaaagatgtctatggtaaatcttattacaaaatagttcattaatctaatcttattatagcagtcggccaatgactcgaaccctatatataagaacatctttaatggaagtgtaaatgaatggtgaaaagctaaaacatagctcatttaacaaaaaatatgctccaattatgtgcaaaaaagtgatgtaaatttggcacatagtaaattttgtgccaaatttagcacaacaatttttatgatgtaaaattacaccacaataaatgcattgcgttttcatttacatttatgtcattattttattagtatatttaagtatcacattaaattatgaaacatttatattatttttttattatcgtacgtattaaaataataataaaattaatcatatatattagattttatttttttaataaaatattaaattttacatcaaattttacaattgtgtattagagtacaaaactaaaatttggtataaatttaccacaaaactatgtagcacaatttttacatctctcgttacagcaatctaatgataacaaattcgttgtggttgaattgggtaatgtaatgattaaagtattcaataaaatttaggcttccatccgaaaccaattgagggaacctctcccaacctcaactgtgtggctgaacttctgttaaataatgggcagtgggatattcaaaagctg

SEQ ID NO: 25205 - DNA, 1644 bp, Cannabis sativa
agccatactggtgtttacattaattttcattggcaaattaatgtaggctttattaacttatccctaaaaaaaaagggagattcaaactttatgaccttataaaagtacgtattttgaaaaaaatatagtgttttatttagaaaagtatcaaatttagtatatgttatattaattttgtagataattattattgttcattgattattataaagctgtttatttaccatgacaatatatgtattttgtttaaattatatgttgtgtataacacaattttatttttgtgctaaatgcactcaaaatggtttaaggaaaattatattttaaaaataggtaggcatttttagtttttttttaacaaataaaaaatcaagttttccttttataaaatgaataaataaataaatctcatgtgcttaattactttgaattgacatacaaattaatgtatataatgccaaaccatcttaaaatattgagtgtataattttgaaaaaattgagagtgattcatgttgtgtctaaaaggtaaaaatatttatgatggtgtgatggttaagatagctattaagaaagcttagttcagattctttttttttctttttttttttgaaagggttcagattctttttccatattacatgtttattatacataacttttttttttatatatatttttttttttaaattggcaggagttggtggtgtaaactctttagaatagatagtcattatgaaaatgtggtccaatgtctccatttctcttaattgcctttttttttttggaataagaaagagatagggtggtgtctgttatttccccatcttaccaataatggttccttattttagagggttaccgactaacatttagagccttcatctcatggagcattgatacgagataccataccaatgtatatgcttgacgctttataaatacttaatgatttttttttataatttttattaaattgtaccacgagaatattaagtaccataagtattttttagcattttactattatattgccaaaatatcacttttaagacaaaaattagaaaatgaatctcataagttacactacatcaggtgacatattcaaaaattttactttgtggaagcttatttatcattaaaaaagtatttatatttacattataatcactcttaataaatttatttaattttatggagcttttttactattttattagtctataataatcaaattgaaaaattacatttaattttttaaaagacaatattttttattagtggaggctataaactacaagcatttccatttttctcaaatttgataccaataaattgttcaatattgtagaggttggagaacacaaccaatctctatttttctcaataatttttttattttttcaaaaagatatttcttttatataaaaaaaattaaaaatggtggcacatatcatgatccttaccaccttgccatgaatacaaaatttaatgatgacccattattcaggaattcgaatgccctactaacatgcctgaatttaactgcaaacaacaatatatatatataaatattaataaaaacattaaggaaagccataataactttagcgtatccccaaaatcattaccaaggtgaaatcaa

SEQ ID NO: 25206 - DNA, 1731 bp, Cannabis sativa
  modified_base (705)..(709): a, c, t, g, unknown or other
tttttattttttcaatttttttaattacaatttttttaaatatttcttacgtggactaataaaattatgctatgtgtacaccgtgttcacgtagatgtacatatggatagtctaacgtggaacttaacacctaaaatagatagaaactttaaattgctaacagtttcttaattttaggaattttatcgctaaaatttgagttttgggagttaagtgccagcaaaagtattgaggattatgccgcaatcaactcaaaaaagattaatttaatctttcaatacaatctaaacaattcaatctaatccaattcgcaaaataaaaatatttacttgtgtgggattatgaactctaaaatccacacttttgcagacctaatattaatttacatgtaaatataacttatcaaatttaatttgcatctatatatttaaaatgttataaatgtatttttatattttataaaactaatacatatacatatatggtatatatatttcaaaatgtaacatatcaaatatatatatgcatatgaaaaatataatctagaataaacaaaactcttctttctacatatcattttttttgtctttcttaaaatttgttatttatttatgttaatttgttgttggaaacaaagaacaataatagcatgttttattttgttgttgattatgtaaaaataatttatattttaataaatattannnnntttaatattaaaaagtaattaatttaaagtaactaatccaatccgtactaatataaatcgaattggattggattggatctaaaatataaaatctgcactcggtgtggatcgtatgtactatgagcaaaatagtgtaagtagtagaagcattgtttctagttgttctcctgttcagcgtaacttgtagttggatctttcccataggcagtagggaatctccattgaagcattggagctagatcgtacaaggtgataaattagcctcagttaactcgattgcttgaaatgcagccttgaacaggatattaaccgaacttctgttatccaactggatactattattattgtattttaatatcgagtcccacactctgaacaatatagggaattagcatcgttaatcaattataaaatactatatttatgtagtattgaacaccttcaaatgacaaataacaattctcaaaagctatctacaataatcattagagcagcagagttttactcacatttttttttatctattttctatttataccttgtggtatagttcttccaaataaaaatatctctaatatcattcctggaaagttgtctctgaaaagttaggtgtctcccagaccttgttcctggatggctaacttgtccatcctagaaggagtcttgtggaatgattgtcgagtctggatgggagttcctgaatgactattatgtccacttcgggttcagtctttggataactagcccttccttgaaaaaagagtttcaactggctagttgtctctcctagaatggtagattcagatagtcgactacaatagactttatcctatccggaagcgtcttcagcgagtgtccttggtctgtgagtctagaagcacgtatatgtacctggaggctctgatacttaagctaacgtggaaactcgctcaaagaggagttagttaagttggttattctagctaacttatcaacctcgcttcttgtagccacgactttaggttcttgatcctataaataca

SEQ ID NO: 25207 - DNA, 3483 bp, Cannabis sativa
  modified_base (1645)..(1662): a, c, t, g, unknown or other
ataattgtgtttatagtattaagcctatagttatattagtccacaattataattttaacattttttatattgcaattcgcaatcttgttcaccatgaatatgcttataatttgaatcccattttcaaaattcaaaattattaattggataaaagctatagttagtgtgatgaattctatatataatgaattttttaaaaatttgtaggaggtgctttataagtagatgatgatataccattgtataaactatcaaatatttttaagtattataatggctactataccaatatatgcatgttattgggtaaccataacatgcacatgtgtcaattatttaagtgattatatataaagtcgagaacatacaaaagcacatgttagttacagaaaacacccagtggtacgtctttttcttgttttgtagaaattaagaagttgattatgctataacggtagagttttttgagtcctccgacaactttatattcgatctttcactatctttctcagaagataatatttttacggatccttttcatatgaagttatggacccttcatatctatcgttccaaatggagacatgctagccaagctttaatacttatataattatacataactttgaatatgtacaactcaattgaatatgtacaactcatcatcatcatcatttgactgcattgatccctctatctggcttgacactgatctttaatatctcaccccatcccttcaattatatattatatataaaattacatgattcgaacatatatctccaaattctcaaggttgatggaaccttctggatcaagaacccattgcttacattactatcatgcatgtgaagttgtgattacttgaacataattaaccgtgcatgtgtgacatgtgatgaacgttttgcttaaattgttaattgaccgacgattacatttacaggcccgcggcggcgtacgaaagcccactggctcacgctgtgcctattaccttcttagtatttatacattattattagagcttttggcggctaaatcttctcaattattattttacttttacttgacctcaaattttggcggtaaaatttttcgaacgactgaactgttagcaaattttagatgtcatcccgttaattgccaccataaactatacactcttgtacacgtttgtaaaaataaaaataaaatagttaaaaagtaaaaaatattataatttttaaataatattatgtgtaattgggatgttcataaaaaaatcaatctccgcacttgtgcggattagattggattggatattgattgacatgtaaaagtaacaactctaatccaattcacacatatttataaaaaaattaaaaaaaatatacataacaaataattaatattttaatgtaaaaaaataacaatttaaaaatctaatatatataatacaattatatttcaaaacttaatagatcaaatgtacattccattcacaaaattaaacatttctttatacatacaatttttttcttcctttgaatttgctattttttattttatttattttaatttatttttagaggcataaaataacaataatttattttattttattgctagttatgtgaaaaaaatatttttttcataaatattaaannnnnnnnnnnnnnnnnntaaccaatctaaaataactgatccaatcagcacttttgcagattggattgagttgttgtgcagaatggattggatccaaaaaataaaatccgtacttagtgcggatcggatacagtatgagtaaaatagtacgaatttgattggatgaatactcttaatgtgtaccaatataaatgtgctaagaagtgtacacacaagtagtccatgttgacagttaactatgaaaaatagatgataccttaaatttgctattggtttagtagttggagggttttaccaccaaaatttgagcttggagggttaagtacaagtggagtaatagttgagagggtttaaccgtaaaaaactcttattattattaactatctttgatcgtttttgaatgaaattacatagaactatggcttcaaaacaaaaaaaaaaaaaattagggggtttctacaatgcaacttcaaaattgagtatacaacctttttttttttttttttacttatttaagacatgtagtaaaatttttgaggaattcagaataatttaccgtacaaaaagtagggtttaataagcagactattacatgcttataaaattgactgtttgataattaatttgtattagtttagatttgggtaggtggatatgaggaataagtgtttaatggttgttatggtaataatatagtgaagtagtgatgttgttgagtagttgttgatttagtatataagaatagtttggcttagaaaagataattgtatgtaaagtagtaagattttattgaaagctttgcagctttggctttttggtgttgtgttacaatttggaatcctttatgtatatttatagttgctagccttcaagcattaaggctagaattgtttgctctagatctttctagttcaagaatcttatccatacacttctacaaattttttaagcatgcataactagaaattatagactaaagtcttctagaaatgcccgtcttctattgtatttttcatatgtctaaaatatcttacaattatctaaaaaatttagagtatatttttttttacaaatgtgtagaatattctagacttaattgagtattgtagaaatgtgtaacaatttgtaatacttctccttggtacatatttctgtaactctaatcatgtctcgtagtagttcaaactttcctcttagtaacgcctttgtgaaaatatttgtcaactattgttcagtgcggtgcctgagttatatttctttgtcagcttctgtttctcttagaaagtgatacttgatgctcatatgttttgttctgttgtgaaatacaggattcgtcaccattactatagctgatttactatcgcagtagatctttgtagcttctttttgtgattctctcatgtcttcaagaattttttttagccatatagctgggcttgtagtcatagctaatgtaatatattctgcttcagcttaggattacgcaacagttgcttgtttttttgatgcctatgaaaatatttatgatccaaaggtgaaggcatatgctggcatgatttacatgtcatatacggatcctgcacaatcacattttgtgtagctaattagttttgagttacttgtaacttcgtatcatattccatagagttttgttccttacaagtatatgaggattcacatggttgctccatagtgaacttgactttgatcatgtatgaatcttgataggagactaattgtgtacattatgtctagtcttgttgtagttagatagagtaggttgccgatcaaattttgaaattttgattcatcgagttttagtgagccattttccttctt

SEQ ID NO: 25208 - DNA, 1843 bp, Cannabis sativa
tgctgcattactactatgaggcttctcatccattattttgtggaacaaatattttataacagatattactaataataacatgaaaaatatcatcactagcaaactggcttcatggttggagccttccatataaatattgatatattgtactgataagatattgtataaaagatttataatttaatttgttatataaagagatacatatatagggtatatatactttcttttatttcttgatttgataatatatatctgactatgttctctcctaactatgttctctcctatttatatagtaaaatgatgcaattcgtttgcatgtgagtcattatggatgggagaaaaaataatatagcatatgccctaatatatgtgagtcataatatatatatagcagtgtatataggaaagaataagttatatgtattatatgggaaatgtaaaatacaagtggttacatatatatcgatccaatttaatagtaattgattgattcagttataattgaccgctaaacattagatattcaattatatatgatcgaatcaaattgaatattagatggagtgtccaaatatccaatacatctaatatctaattgaattaattattattttcatttaagtgtcgtttggtaacacttttattttctaattttgtaatcacaaaaagtaaaattttatttttgaaaaattaaaatgcgttctgcaactactaggtccgggatcgaattcgggttcgggtgagaggccgagttcagcgtcagggtcgtagggggagatttggatccaaatctggtcggagttcaaaatattgattaagaaaaaaattgtttaaacaaatattgaagtgtttttttttttttgttttcaaaattttaattcccaattaaaaaattgaaaagtgaaaacagatttatagaacatgttttgaaaattatttttacttttctaattttaaaaataaaaaattaattaaaaaattgttaacaaatgccacattagtttaaatgagtaatgtgctttgtatcggtatatatgaaaattaatatttttcttttagattagatggatctagtgtgatttaatcctgtactagatctaaaatattaaatggataggattgaatccgattcaaaaaatatcagatctaaaatattaaataaatcgaatcaatccaatagatttacatgaaatacatatggatagaatattgtatgtggtccaataaacatctttacctttaattacctctaattacacaattatagtacaattacatggtcaaaataatatattaaattatataattatttctaatcacacatatctagttctttaatgtattttattatttaggttgaatatattctggatttaaatattgattttttttttaaacaaaaatattgaatttattttgattgtcgataatatttaatgaaagttagaacaacccaacacaaagtctgttttcataatatctaatacattacttaacttgaatttcttctccatttttgtttaataaatttatttgccatataggtagcctaggcttatgagacaataagctaagttatatatatatacatgtttttttattttttttttcacattagagcacttacaacaagtgaggtataataattaaaatgtaaaataaaatagctaagagattaaaattaaactccatcaaatgctttgaactcttagccattacacatatttccaaactcgaacaaattaatccttctctacatatagctcaatgaatagtggagaggtaaacatattttatattttttctttatctcttttgtttctttaattaatttttt

SEQ ID NO: 25209 - DNA, 3020 bp, Cannabis sativa
ttctcattagcagttcttcactaatacagagatcaaattaggtaaaccacttaagcagcagaaacattgttaatattggaaatttgagttcccaggcagctgaggatataataagttgcattattataatgaatcattagacttttttgcaacatttgttttgaaatcacattatgtatctacctgagattgcatatcaaaattgatagaatccagcttattttgattacaccttgtttttttttctattttgcagccagcaggctggaagttgaaagaggaatttttaccttcgggttggttgtgcctggtaattctcatatcttattctataaaaattcccttgaaagtgttcatcacatgagcatgtacactttttgttgttgttgttgttgttgtttttattaatttattttggtgttttactattattaggtctgtggtgcatctgacactcaagagcttcctccaaatttcgtaaagctagcaaaagatgcatatacacctgatcttatagcagcatctgactgtatgattggtatgtatgaataatgaaagaagtcaatgcaagttggattttgttgttacagaatagaatgaattgaacatatcatttgtggtagggaaaattggttatggtactgtgagcgaggcccttgcatacaagctaccttttgtttttgttcgccgagattatttcaacgaagagcctttcttaagaaatatgcttgaggtataattgctttattaattacttttggtccttatatcactcttgccaaggatttgatgagtttgggtgcaataattgtttgaacagtattatcaaggtggtgttgagatgattagaagggatttacttactggtcattgggcaccttatcttaaacgtgcaattactttaaaaccatgctatgaagcaggcatcaatggtggtgaggtattatcctctttcactttggagttctctgatttcttaaatgtttcaattaagtgtcatcatggtaaccatatatcactagtctaaagaagttttaaatcacaggtagcagctcacatattgcaggagacagcttttggtaaaaactatgcatcgaataaggtaaacgatgatttctctttccctcttaaaagttgtgttactgttagccaatgctcaattggtttgaaatgtagcttagtggagctagaaggttgcgtgatgccatcattcttgggtatcaactacagagggtggctggtcgagatatctgcattccagattggtactcaaatgctgaaagtgagcttggccttggaagcagatcacccactttccaagtgaccgagaaaagctccttaatgaactcgtgagatttaactttttcattgcagttttattccattgctattgcaatttgttttgctttacatcattcaacttctgttttcagattcacagaagatttcgagattcttcatggagatactcaaggtcttccggacacattaacttttttgaagagcttgacagaattagatgctggttatgatgtggggaaaaatgctgagaagcgccaaatccgggagcgcaaggctgctgctggactttttaattgggaggtcgtctaactattttaactcaaatttcacaagttatttctttctagtttatcacatgaaagtatgcacaatagttccataacatcacatcttataaattataattgcaatgaattacaatttggataacattgattttcatattattttcaactatcagacatatttggattagttacaacataggcacactacttatccacaaaaaataaacagataaaaaacttcactttactatgataagtagtgcttgaacatgtttgtcacaagtcgtttcaatactttgattacaggaagaaatttttgtgaccagagcacctgggcgattagatgtaatgggagggattgctgattattcaggaagccttgtattacaggtgctgcaactctcactatattgcttagtgtacaactctcactatattgctcagtgcctcatttttgttaacagatgccaattagagaagcatgtcatgttgctatccaaagggttcatccaagtaaacatagactttggaaacatgcacaggcccgacaacaagctgaaggaaatagtttcacacctgtcttgcaaattgtaagttcaacttggttttctcttctagtttccataggcaatggctgaatgaatagagtttattgaattcataatgtgataatgtgagcttgttatgttatgctattttggtaggtgtcatatggttcagaattgagcaatcgtggtccaacttttgacatggatctatctgattttatggatggagaaaagccaatatcatatgagaaggcaaataaattctttgctaaggatccttcccaaaagtataccaatcttctttgtttaatatgcctgtctgtatctttgcctgaatatcctacttacattaagtggtttgtgtgctcttaggtgggcagcttatgttgcaggtgctattctggttttaatgacagaattaggtgtgcgctttgaggatagtataagtattttggtatgtctttcttagcatcacttttaatttttcattattctggttttttgcaactggtgtcatttcaactgcatttctttaaagcccatttctgaatattcaaattttgtgtacaggtagcatctagtgtccctgaaggtaaaggagtatcttcttctgcttctgttgaggtcgctaccatgtctgccatagctgcttctcatggtaactttattattttccattttccaatttcatagttttgttgtatttaaagtacatatcagttgtatagatgtatgggatgtatttttagtttatgcttgtttcttataaaatttggataagagtgttttcaaatgtttcaaatttgcttttttcttcattttcagcataaactactaattgtcaaaatagactattttgcatagacaaattatttaaaccgac

SEQ ID NO: 25210 - DNA, 1926 bp, Cannabis sativa
  modified_base (68)..(72): a, c, t, g, unknown or other
  modified_base (1604)..(1611): a, c, t, g, unknown or other
aagtaatgaaaataaatctgtttctttattgataattgaatagaaaagattacattgaaatagagttnnnnntagggcacaaagcccaacatggggttattaatttagggtagaaaatcagaatgggggtataaaacttggtgataaggtttttatgtggaaaaaatcacatttaaaaagacaaaagggcccttggaatttggatcctgcgtctggaattttggttggtgcaaaaataaacctaaattttcaaaaatgcgccaaatttctttttttttttttttacccaaatgactccaaaacttttctaacaccttaatatgacaaaataaagatgctcaaataggaaaatcagaaaaatgttaaaaattgacaatttacagtaagcttttcaaaaattaccaagcaaactagaaccttatcaaaaatgagtcttatgcaacgagattgaaatattaattatccaatagtttaagaatataaaatttgaggtataaaaacttatggaattgaaaaaaaatttaaaaagagaaagtttggcaaaaatcactcttttaggcctaaaatcctataaatcaatatgtagcataccaaaaattagttcaatgcatatttcaattataacaagcttataagcacactaaatacacttaatatgacaagttcaagcatatagacacaaaatctaatcatatatgcaaacatttacatgttcacttgtttcaaaacaagtctaaagttcaccaaaagttcacataatgacctataattttgatttttcagcaagtatagttcatgtaggtcaagcatcaagaaattttctcatctatgcatataagtcatgtaaatatcatattcggaacaaatatgcataaatagctagcaaaccttatatttaatttaagttggtcatgcctagctctcttctaatgaaactaaatctctcatcactaagaggcttggtgaatatgtctgctagttagaattcggtgctcataaagtctaacatgatatcacctctttggatatggtctctaaggaaatggtgacttatgtcaatatgcttggctctagaatgcaatattagattcttagagaggttaatggcactagtattgtcacactttatgggtgtacactcaaaatcaatatcaaaatccttaagagtttgtttcatccaaagtatttttgcacaacaactactcgaggctatatattcaacttcgattgtggatagggctaccaagttttgtttcttggtaagccatgacactagggaatttttttaaaaagtgacatgttccactactactcttcatatccgtcttacaatcggcaaagtcgacatctaagtagcttactatttctaagtttgagttcttaggataccaaactcctagattaattgtgcctatcaagtatctaaagattttcttaacggcactcaagtgggattctttggaacaagattggtacctagcacaaagaccaacactgaacaaaatatctgatctactagcgattaaatatagtaaagaaccaatcataccactatacttggtgatgtccacatcctcaatactttcatctttgtccatctttannnnnnnnctcatgggggttttcatggactttgcatttgccaagtcaaacttttgcagtaggtctttgatgtacttggttcgacttatgaatatatcatctttttgttgcttgatttgaagtctggggaaaaagttgagctctcccatcatactcatctcaaactcactatgtatacacttagaaaattctttacaaagagaatcattagtagtaccaaaacaaatatcatcaacataaatttgtactataataatgtcttttgattttctttttataaaaagtatattgtctgctttacccattgaaaaaccatttgaaata

SEQ ID NO: 25211 - DNA, 3977 bp, Cannabis sativa
  modified_base (2423)..(2434): a, c, t, g, unknown or other
agtaaaaaagtaaaaaattccgtctgacagtatttttgtaaaaaatagcataagttagtataccatctaaatttccctttatttacccaaattacaagtagaaaaaagcccaatttcggtaaaatgaaaaagcccaatccaaaacgaaaataagcttaagttgtacacgaactcatcgttgacagagctcaaaccatttcccttccatttttatttatttcgttactctcctctcctgcttcgtttctggaattttcttccctcaattctggattgagttgagtctcggccatggacgactctggtgtggtacgctctctctttctcctctcatttattttctgccaaagttttcaagatctgcttgtaaattttgtttttgttgtattttgatttataatttcaagatctatttgatgatttgatatgatatcttgttttgataatttattcttcatttttgtttaagatagtggtttgggattgtatttttgggtctgcttcgttagttgtgatgtttatatactgttatctgggctcatttgcatgtttggtcattggatcgttcgagaaagatttcattttccttgaaaacaagtgactttttggaaaattgaactcgttatggctctgggaatctcgccaatttttttttatttggtgggtttttaaaacctaatgattcatggtgctgttttttgttttcaatttttgttcaattgatggtatgatcgatctaatgttttggcacccaaaatgtgctcaactttccattggtaccatacttttcgtgaaaagacaaactttttcttttgaattttcttaattacttttaaattcaccaaggaatataatttaataaattctcatgctgagtttctattcaattgtgctgctttttattcgatataattagaggaagaatacattttgagattctgttgtcttttcttgtgaactaactctatccttcaggtagcttttagtgtacttattcagatttaaaacatgtttatatatatataaatgtgtgtgtgtatttatatatattagttagtctcagccttcagatttattatctgtgatgctgaagtcagcatattcaattacaaagagctctatctttcaatgttgattctgcattaactcactgatattggcatcttctgcatatgaaattactaattgtatttaacaatatttaataaaacatgtcttaataagagatacgtttaactcatgtgttttcactttgacctgaccaatgttgattgtcatagtaatggtttaagttctgttcatttatttattttgattcagtggatttcatgttgaactgatggattccttgtatgtcatttgtttggataattgataaaaggatgccaaacccaaagggcttaatggaggattgatagtgttgattgttgttttcggactactactgatgttcctgataggaaatttcgtactctacacttacgctcagaagaatcttcctccgaaaaagaagaaacccatctctaagaagaagatgaagaaagaacgactgaagcaaggcgtctctgccccaggagaatagatgagatacaggaaaactttaactctctttgttgatagctccatcttttgattattttgttgagaaagttttcaccatttcatggtgtcaagggaggagttgtcaacctattttcgaatcttttttttctcttgacatttatagtccattggaattcaacttcttcttcaccataagatcttactgcatgtgtttagatctttgatttagtatgttgtttgaacttgacatatgttttgcatctattaatttccttcttgtagtctcgcatttcattattacttttctttgttaactcatgtctccattgatagaaagtgttacttggagaaactagtgttctggtaaccatgtattaattatggattcaaaaatcatagattttgtgggagcaaactgcatatctggctaccaggtccagagcagaacatcgagaagagaaaaaaggaaaaattctgttatggtagtgatattgaagttggaacaaatactatttttttttctccgtgagttttgttttttgaactttgtttttttttttttaagggtaaatactattttgggatctgtctttttggaatctgtttttggaatctgtttttgaactttgttttgttttttaaggctattaagatattaactgattgtaaaatactattacgctatactcaaaaaaaaagttactaattggattttttgttttgttaaatgataaaatagactttgtattttttaaaattgtacaaataaaatcttgaattgattttttgttaataatatgatctagataggttatgacaaaattgattatttatttgtattagaaattgtcttaaagttnnnnnnnnnnnnaaataaaattgttaaaaattgaattcgtggtcttattcttacaattttggaaaatataaaatttattttgtcatttaataaaaccaatgttgaattaataatttttttaaaacaaataggtttaaaatattatttactcttttttttctataacactatgcgcctagaacaaataaatttgatttccgccatcttaagttcgctaaatagattttatattgcaactatacatgttctctcataatggcatcgacaaattattgtacaaattatttttaaaaagtgaatagaatgttatagtttggggctaaaattctcataaatcaaataggtaaatttctacaatgatagagaagaaattttcaggttacacattatcttgcttgcaccataaatgttttacagttatattccaaaaactgaacaaataaaatatttaaaatattatgattatattataaaaaaaaaaaaaaaattataaaacgtatcctaatctattgtgaaaaacaacaaaagaactagataggaattatagtaaaacaaatgcaatagaattttatttggttcagcagaaaatagaatgttacaaagatgtttattttattgatcaatagtgttagaaaatagagatgttacaagaatgaaatttgtcctaaactaaactacgcaagatttcacagattaatacactccatttctctgttacaaactcacaaattaactcttaagctcttagtgtttgaagtgtaaaaactataaaaagcctctcgatcgaaagactacataatacataaaggcaaagagcctataactaacttaactgaataaaaccagctaagataccacatcagccatttatactttttatttattgagtaaaatgataatatcattaaaagacatctttcaaacagaacaaaaattcagatacatctagatcaggccaccaaaccatagctacatcaggagaaagggataacttagccaaattataagctacgaaattagaaagcatattacaatgaaaaaaactgagaacattaactcttttacacactaacagaagatcaataataaaattaccaaattctgcaactacatgtgtttttttggaaagagcctcacacacttgagagtagtcagactctacctcaacattctaaaattccatacgagagaagagaatcaagccctggagaacatccacaactttagcaactggaggctgtcatcgcaaaatcagagaaacatccattaaggcaagacaaacactaaatgaatgaaacactgccccacatccaaccttcagattccaacgcaagaccaacatacacattaagctctaggcgaccaactggaggtgagacccaaggtcgaataagagcaagaacaaccctccccctgagcgcaacccatggggtcagtaggagaagcatgtttatgccctaaataaaatttattttaatataatcttatttattaatcggctaattagaatttttaccctctgaactttgacatgtactaaatcatgccccttgaa

SEQ ID NO: 25212 - DNA, 1627 bp, Cannabis sativa
tattaagttcatgtcgtgttgttttgtcatgaattaaattgccactcctaatattcaacaacataaaaggtgtgcttgcacattaaatacacaagttttgtttttttttttttttcataaagaaagaaatgtgattgtaccaccattatgattgaaatgagaaagacaacattatctttgcttagaaaattatatcggtatagttgaaaatattaatatttataaattcattgaaatatcatatatattttcaatatcgacaaaaatttagaaaattactattattgatatttgctcactataataaatctgatttttaattacaataaaatgacaaagtaaaataattatgactaattataaattattatttttatattgtgactaaaatatatttttagtcacaatacttattatgactaaaactaaattagtgacaatttatatcttaatactatgttttaattacaaataactttttattatgactaaaatcacatttaactacaaaaaatttatattgtgaataaaaaattatcactaaaagtagttgttttttatagtcacttaaaaatataaaatttgatcataaactaataaaataataattataattcatataaatataattatatttgatatacactccataagaaaatattaataccaaattaaacttttaaggttcaaaattattagttacagatattaattctctgcaccacttcaatttaaaatgttgcttattttgtttttaatatacatatataataaataacaaaatatttatgaatattttaaaaatatcaaagattgaaaatatctataaatatttcagggttttgttcatgttttctattcacacgagatatggcttcctcaaggatgcccattatacaataagctcatttagggcgaagacgtacaagtctcgaatatgagatctaggaaggttgacacattactctcccaaaaagtagtttggcgggtccttcacacagattattcatcccaggagtgaaatcacgtgtaagtgcatgtcaggaacttttgggaaggtaagggggatcaagttaggttccacactcccagactcggaggctcaacatatgagtatgacaatcaaggctccttatctcagtccttataacaaatactaccacggacctccgtgaatacgcgaagcattgtccaggatcgctaactatctctgatgcatccaatgtggtgcacctctgacacaatctcacaatatctaggcagttgtcccctgttacgacctgagccctaggctgtggcagatatgtaatattcacaacttgggtggtcaaatgtcacactttgacccttgttgaaaaataatacttacaagcgatccttttgtttatattacaaaaataaataaaatagatatttaaaataatagaataactactattacaaatgaaaaataattataataaaataggaccactcatcaatatacatatatatgtagaataataatattcccacagttatgtagtcaccaaatgattggatttaataataaaaaaacactaaaataatgttaagcatccatcatattcctcatccctagttgttaatagctatttaaatgatacag

SEQ ID NO: 25213 - DNA, 2440 bp, Cannabis sativa
tataaatatagtagtatagctttcataaggaaaaatagttaatagctagcttggacttttgggttctttctaatataaaatacaatcaaagattattaatgatttccttgttattactcaatatgaagaagaattattaaaagaatggatttgtttctgttttggaaaggaaatgaccaaatatgggaattattttaaaatgacttgggtgtgtactatgtggtgatcattaatttatgtgatgcgagtgtatattattgttaattaatgaaataagttcgtgtttgaattgatcaagtggggtgaaaataattgtatacatattcatgtttcgataagtagcaagtattaatttctgattttttttttctattttatataaaggaacgttcctatgcataacattttttagtcatcacatctaaatcgaaaatgtattttataagagtataatgtcattgatacatttcaatattaggttacactcgtttgatttaataaataataataaagaacttctaactaattataaataatgttacacaagtataataataaacaatttaagatgttaaataacaatattctatagaaaaaaaaattaatggaagtaataaaatttcaatagaataaaaaagaaataattcatttcattttttttagttacattttagagtattaaaatgttattatttgtaatggaatagtttttccattattttggtaaaatgattattctatttttaaataaataaataaaaaaagctatttcaatgtaagatgagaaagatttaataaacattttattaattttttttatatgttaaatttgattcaattcatattcttatttctatatttttatttctttcaacaaactacctaatgttatcttcaattcctcaaactactcgagaaacaaataaaatcactcatcaattaactaagtacactacagggttagatctagaagttatttcattcagaaataaccataatgttttatcttgtatatatattctcaacttttgattactattttaatgggtaccttctttctaaaaaaaaatgttatcttactaaggcaactcatagcctcaaaatagttgtacgaatgatttatatggttccttgtaaatgggaggttctcttttctttcttgaattcctcttaattataacaatccggtatggccaacgctctcatttgaatataacaatatttcatgtatgtatgtatgtgtgtgtaaatatctatatatatgtttatacacttttgtcggcttctcatggacacacatacatcattaataataaagtggccgaggcaattatagctagtactattctatatattattactcgaaatatatgaaagttacaaacaatttcttttttgaaaaatgagaaagttacaaacaattaataattaggtatctgtattcctttcaaataataataaataaataaagcatctgtacatacgtacgtacatacgtatacaaaacagtatatctctaaacgacattaattggtttacctaattaagccatagataagagaaagagacagagggctcttcaccaaaaagtgggacagaatttttgtgaacattttatcatgtctaaaacaacaatgtagttctttatttttattttttttcctgaaaaatatcactgtgttcttatttaatattaaataaacaaaaatgaagattccataccccaattagtgtttctcatgggttcatttaattaattaattaattaattaattagtattaaattatgagctgggttcatttacatacggatatttggtgttatcagcttaattatcaaccacataattatccatgataatgttctgttctaaagcatctttttaagaaaaaagattataatttaattcttaagtaataattgattagaaatctatgcatgattggttacattaataataattttatttatattatatttgaagtacagaagcaataacattatggtatgacatttaactctttttgttatatatatttatttaaatgtgtatagttatattcaattaatatataataatatgatgtattgatatatgcacctaattataatataagtgaatatcactcttatatttaactaccattgttatttaactaaaaaggtgacactgattttcacttctccctctccgcccatctaattttggatgtgtttccctttcacatttcaaaaggtctttttttcttaatgtgaatgctcagtttatacaccctttaattctttcatatcaattttcgtactactttttatttttatgtgttctgttttggctcgttgtcattaacattgtttttacttaaaatgaggagcaaccagctacagctattttttttttattgtttcctttttgcctttaaatatttctccatgacaaat

SEQ ID NO: 25214 - DNA, 2092 bp, Cannabis sativa
  modified_base (2025)..(2029): a, c, t, g, unknown or other
gtattttaatgggataaaatctagaccatgtgcatttaccttcttcatttattcatcttgacaggggtgtaggccttcactttcgacgacacccttaaccaacatgcctctaacctaaggcctattcctaacagatagtcaagcgacctctctccttcttttcttagacatggtctccttttgtaaatttgcaacggtgaacaccgtggatgtttctatctctcttcagctctcaatgaaagcaccaaaatatttaccgagatttttggaaaccaaatatttagagcttaggaaataaataatagattaaataacaaatgcgagaattttacatggttcaggcgttaactatccttagtccacgagtccattttattaggcactttggccggtaaaaattaatacaaattttgtgtacaatggactgaaactctttattcctcttatttttcttgaagaagaagtaacttcaaaagaatttttgtagagtttttaagtaagtagtagtacacaatgtttttttttatcttctaagagtctttcccctatcttatggaatgcaggggtatttataggccaacttccttccatgcactggcttgactgatcacatttagaggagatccgaccattgatttagtaagtggctgattcatcacatgatatttaagggtgtaagatggtacagaccggacatcatacacgtgtcgtcctagggtcttcctttttgaattctccttgacaatggtcgttggatcattcaggcaggtacaattggacacgcatgctctgtactatggcatatcgtgggggaaaaatcctcgcgccgtacctaaaaaaacttggttactatgtccgtagtctgacatgtacgagcatatcctccgcagaacggggttacagtttagctagatgctttccaaggcaacttcgagcactttgtgagaaattcaaaccctttgtgggagcatgcgacttcaatccaatgggattagttggcttcaattctcacgactgggagagtcttctggtcgcgaatatcccccacattgttgccttttctttcataaaggctcttttctgcaagctatggctcctatcttcctagaactgtggtcaaaggtgttgaccagctaattagcattgagcctttctaggttagggtccacgtgtcaagcttacaaaaatctagacaacatcgtagaaaaaaacgttaaacaaccaaaattgtcaaaccaagaaattctattagataaccacttttaatatataaagataaaaataaagataaagataaagattaacagataaaattaaaatttaataataataataataacaagataatgataaaactttattaataaaagttattttggtcatttcttagccactaagaaatttctaacccgtatttggtcaattcgagtacctaaaataccccggtaattctataatcggcttatattgataatcccattaaaattttaactaaacccgttgtgacatatttggctttcgatcgggtctccaaagtcgccgaacctacaaatatttttatttcactaacaactcacattatattcacatattctaaatatatctctataattaataaattacgcttattcatccacttatggtaaaattcataatttacgttgaattaaaacagtaggatcataatcctctctaataactcataatatataataaactttaattatttataattaggttttcgagatattacaattaggaaagtcaggatttcataattatagatcatgttcccaaccatccatattattagattcccaaaataaaagttgtaagaatcatattctttaagaaactttaacgattgaatcaaataaactaataacatgaatagggattcatgattactcagaattcatgtcgatctactattgatcatttgtatgatatgaattaggtctttatagtacacaacatatttgataaagataattgaattacatatcggtccatgtcatatataannnnnattatatacaacaccttcacttagatgttatactacatgagtaattcgaattgagattacttg

SEQ ID NO: 25215 - DNA, 2737 bp, Cannabis sativa
ctttctttttaatcccaacttatattaccttaaacatcatgatatttttgtctctctcttttttttttttatatatacaaaaaatgaaatattattataaataaaagtaactttaggaatgaatttaattagtgtaaatttataacataaaagataaataataatgtaaaatctaaatagtattacacaacattagattgaaaggtgcattataatagagatttattagaatatgcttagagaccatttcaaaaagaaaggaaaaaaataattaaagaatatgcttggagataatatgataaactttacttttatgtgaaaatgaagtaaagattacatttttttgcttgtttaggtactttaatttggcccatgtttagggcatatggtttggacaacaatggactaatgaagttgactacataccaagattatgattcctccttaaataattatcatcaaatcataaagaattaatattgtcaaaaacaaacattggcaacttcaatgagggagaattcaaatatttgcttccacttgaactccactataatttttcatttattgattttgttgtaattttttagttcttattttatttcttaacccctcttttatgcctttacaaacatataaacttgttaattaaagacaacaataataataaaattagggtcaattaatttatataaagcacatagtagttgaaaaaaaaaacttaacatcattattagatctcatgaatcacattcccacactaattaattatcaatcaagactatgaaattttattttaattttgttaagtgggagaaatctttgtaaagtttatattaatctagtgtctaattttcgtatttaaatctagacctttaggttaattgtatttgtctataaaaataaacatagatggagtattatataaataggccaccactagtgttaccatttttttctcaatattagtattttaatctttggttaattggcacctaatgatatttaaaaccatgaaatcaatcaaggtcggttataataagtaaataaaataaaataaagtaacacataaaaccttatattataggttcaattatagcttttcttagcctctcacatggagcaatgtgtttcccaataaatgggtatatttcatatggagaaaaagttaccaaaaaaaactatacactataaaggaaaaaggagaaagtacatgttattttaatacaataatttcttttatttatttaaataaaaagagggtgtttgttgttaatgctatttgtttaagtttcaattagtgaaattgttgttaagttgttaattaatgctattattttaaagagtactagctaggaaagtgacaataattagcatataaatataatcttacaagtgacacgtttaatgatcatttaacttaattggtatgcaataataagccaaaattaatggtttttatgattggagaaacaagaacaaataagggtgagtgtaagtgatatgatgtgtttataatgccttagaatttttttctatgcatattcatgtgatcttaaaatagagtttatatctatgtggaaacattgattaattgctctttctctaagggcatcttgtttgcatgtgtggactaaaaagtaagacaaagatcaaaacacatgtagctcccttgaaagcaatgtagagaccttaacaaaaaatagaaataagattgttagttggttaattttaaagggggtatttgagaaataatggagactaatagtacaatactaatctaataaatttttttatctaggtctttaaaacacaaaagcagattatcaaatcaacatcagtatataattgtgatgagacaatatatattaatagactcaaattgaggacctagcaataaaactctagttagctaggcctcctcaaaggtctcaattatctagaaaaattacacttctgctttaattagacttcacacaaatgtttagcctattaactaagagaaatactaaagggcactagtggtacctagccacaccttctaaaatgtcgtatcgttgttgtttgaattaagtattgtcttccacacaatttaacttaataactattatggaatatcgttaaccattcgtaagacgacacctcatcattgtagtactaggtaccaccgatatcttataacaatactcattaactatagatcactaactatataggctaaaacaatacaaattatctatcaacctatattttaataaaacatttaaaaccttaatgtaagctcaaaataaaattcttacacatattacatatatgttgttaagtttgctctaatgtaactgcatattgagctgcatttttactgttagtactacatggcatgacatatatattttaattataatctataattttagtatatatattattaattaaaaataaaataaaaaagaatacataattttggtgttgttgtgattagaatgaaaaaagaactttgttatgaggtatcggagtgtctatcacctctatgacatgacgtcttataattagttagtaattttttataatttttattaaattaaaattagtgagatccgatattaaattataccaatagaaatattacacatcataaagatactaggcacacggatgccttttaatatttctcatgaaaaaaaaaatatagtgttatatattttaatgttagttgaacagaatatgatacactcaacat

SEQ ID NO: 25216 - DNA, 2988 bp, Cannabis sativa
ttttaatgagaaattcattctattcaaaaaagaaaaccaaataaatcgcaatgtatttttaaaatacaataaatgaaaagataataatttttcagtttaataaattgggcttgtgattgactatgtaatttcttttcaaagactatttagacttttttttttcaataaaaagaaataattgaactactgtttatgaatttttttacattttcttttatgattttgttggaatgctttctccacaaaagtaattgtaactggatgataattgtaaaataagtcgcaaaacttaatttatttttggagaatttatataaaaatgttagtgttagaagtatttacctgaaatattttgataaaaaaataaattttaataaattatgtaaatgtgtaatttatattttaaattataataataaaatttcatccgcgcccaatattaataatttcttaaaattatatattaaactaattaatttattatttatgaattaaattttaagtctagtatttttaaattgcttattaataaaataaaattatataatatatttatattatatttgattagcacaaatattaatcataatacaataaaaataaaaatatagattgtacgaagttatttataataattaaaaactatcaaaaataaaaattcattttaaatagtcggatattaataataattaataaaatatttattattgtagattacacattagataattttaaaaattataaataattatttgaaaaaaataaaaatggcaattttttttaatataaacatataaatatataaatacatattattatagagtatagattagatgaattaaaaaaaaatcacaactaattaattggttatgtgcgataaatgtaaagttattgctgaacgacaatgagtttggagctggatgaagattgtacatatcgagacagttcaacttggagtgttggatctttggaacagccagaactcacaattttgtagtcgatgtgcgacatcttttgattatatatatagttaaaaaatatagatatgagattccatattttacaaataaaatacaatttatgtttagtaattaaagtttaaattaaatcacctttacattaaagcttttgattagcaaaggttgcataataattgagaaaagtaccgtagcatgcctaaactaataggatgttacagtaagctcgtaaccctaagagtaaaatggtctaattccattaccttgatataactcgtatccatgtgacttaaattgttgttcgacctatttctactattatcgggtagaaaaatataaaaatattttatacatagcatgcatatcacacactagaatctcataaaacacaaaacacacatataaccacgtaatacaattaattagtgctaagtgccttactaatctcatgtctaagtatgacagtcattacacttggacctgaaccccatctctagaccccgaccttagacccgggacctagacctagacccgtaccccaaaccagacccagatcaggacacgagacttgaactcgggactcagacctagacccaaacctagcctcaaactttggacctgaacttgaaaccccagtcagactcgaggtctagggcctgggtttgggtctgggtttgggccagggtccaactttgagtttcgggtcagggttagggtttgggttcgagtcggggtctaagtccgattctcgggtttgggtaggttttagggtccgaactaggtccggggtcttgtctcggtctcgagtttggctcgaggttcaggctgggtctgggtctgtgtccgattctaaggtccaacctagctctaggtactgagttcaggtcgggctttaggttcgagtttagggttgaggtccgaggtttggggccagggttgaccccagaccctttgtaaatatcataatacaagctaatacaaataatttgttatgtacgaaataatacgattcacattgtattaaaatataaagtcatgatgattaatacaatacaacattttatcaaaatataatgttatttgttatttaatacagtgccacccttatatggcccactaagtaagccgaaaatttataaaataattttttttaaaaggagaagattatctatatgtaaagcctctactaccaagaaaggtgggtgtgaagaatcgtaaaagtttgcaatttatatatttatatataatattttaatctttaacaaaaaaatgaaaaaaaaatattcaaatattttataatattttatttaaatgattttttaaataaacttttatgatgtggaccaataaattttttgacatgtggcaattttaagaattacaaacaaagctattaaattacttagtattaacacttggtacttttagaaatagttaatgaatcatttgacatgaggactaacagacttacaaaaaaaaaaaaaataaaataaaactattactactattttttaagattgagaataaatctacatcaaaataaattttggggacttatgttgctattttccgtaaaatttataatttttaaattttgtatgaaatcctattatgttaaaatatatagtttttttacggaactattatgctaagtacttaatccaaagaacatatataaacttttcttcctaaaaaaagagtatataaattctataacattaaagaaagataaaccgaacaagtaattatttaaattttaaaaacataaaaagaatatatgaagtattatttcaaaaaagtaaatcaaatataaaatcctcagtaacatatagcaaatacacctttctttcttttttttttctctagaaaaaaaaaaatcttctgaaaaagaaaaaaaatatttttacatgtaaaattaagataaccagttaaatttgtttcccttttaagtggtataaaatcctaatatgcatctttattttttttttcaaaaaataataattataaaaaa

SEQ ID NO: 25217 - DNA, 3446 bp, Cannabis sativa
atgtgtatatatatatatattaaaggatcatattttaaattatatttaatactataaaaatataaatttatattaattttctaacattttatattatttaaaatataataattaatgctacaactatgaaataggtattcttaaaaatagagaaatactaaaatgtactagtgatgtttagcactcttttacgtgttaatatcgttattggtctaactaagtgtcgattcttatatagtttaatgtaataacttttagagagtatcgttagctaattgtaaggtgacccatttaaaaagtgttaagcactactaagacttaataataatgttcttaagaatattatataattgtgattatagatataatttaataatttcacatttttccttgtaaaggagtaccaagttcgcttattctttttgataaaaagattggtgattaggcttctacaattaatgacatggcccaataaattaccaattaaagactaattgtgtcacactgtatacatttgctttaaatatcttaggatgatattttactacttttataaatatatcattttcaactatatgacaaaaaaaaacaataattggtaatgacatattgctatggctaataaacctagccaacccagtaattgtaacttataataactactagaataaaaacaaaatcatgcactacaaaaaagttactagtgataattttttaatcataacataaattttttgtaactaaatgtgattttttagtcacaacaaaaaattatttatgactaaaatataccatttaagtacaagttgtaactaattttattttagtcaaaacgagtacattaattaaactattttgaatttgtgccaaatttaatacacaaaaaaaaaaaaaaattgctatatttaatttactatttataattatactttaatatataagatgtagaataagttaaaaaataattaataatattaatagtcatttaatattttattgagaatacataaaaattattaattttaatttcttcaatatttaaataataatagtatcctaaatagagaatattaagtttaataaaagttaatgaaacgtaataattagtagtgctgtaataaattaaaaagtattgtttattattgaccaaatttactacaatgctatatgatatgctaaatttagcacaactattttagcatacttttttagaacaccaataataatatttcttaagtgtgctaaaatataagaatacactatatttttagtgccctattagaaatgttcttaagactgtaatataaaatgtgatattttgatataataattgtatatctataaaaatatacatttttaaatttgaagatttcttgatttgaagtctaccaagtattatagagatattgtaagttaaaccaatatcctatctttctcttagtacaaaagtatgggtctggtaggttttgtgaaatacaagtttaagtgaactgtcaattattgaatatcaacaataaattttgtaatgatatcatttaatatgcatgggccatccctatctcatctccattggatccgtatatgtatatgtacatatacaatacaattaatatattgtatgcattgtaacaaattattattatttagaattagaaaagaaaattttaattattcatacttaaattgtggccaaaattaatatttaaaaatgcccaccgagttatttgttaacatgggggttgggtactcattgttgagttcatgagatctcgttttaatacttttaaggttcttaaatttgagaacgagatttcttttcttgttttttcactatttcaaattcattagtcgaatcagatttaacatttgagtaatcaaaaacagtgcactagattgattgacaacctaggcgttgtgccttgtttctaggggttcgggtttgtagttttctccctgaattcgcttaaatctttattattttttatgataaaaaaaatactcaaaacactttttcgagaatttgattgggaacaacctaggatgacaatatgccaacttgggcgctgggcctagtgtcaggtgttaacctaagcgttgggttctagttatggcccttaagaagtttcgtttggtccccaaaaataattgaatcttaatattttctaaaaaacgcagaagatgctcgaaagagttctcagaatacatcatcggaattgacccaagttgacaaaatattaacttggcactgagccttgcttttggaactcacaaagtgatgtttcttccctaaaagtacctattttttttttttcgatttttatgaagacaaagaagatagaaaacttaaatcgtcgatctgatacttgaaaggcacccagattgacaaaatgtcaacctggatgttggggtgcctaggcaccgggtaataaaaattaaacttgctttgaatttgattctgatgcctcaaatttgtctgcggtatgtctagctgatatcctaaagcaaagtttgacccatttttactaagacggtcccaaaaattgaaactctagttgggaatgtcaacttgggcgctaggtgaaaccctaggtgcccaagttggcttccgggttgcaggttcatgtaatttcaactcatggagcttgtatttgattgattttatgtatttatggtacaaaatactgaaagataataagttagattcaagttattgaagtcattaatagaaatagaaggagaaaatagaactatagttcaattagaagatttacactattgaaaagtacaatttaaagatttgttttgcctcaaaaaagattcattatctattattttaatttgtgaaagatcataaaatattgagtattgctgtttgatactggtgttaacaccaccatgacacgaggtgctccttagttaactatatttcataatattttgtgataatgttagatatcgctactacctttaacatttctcgataatattaggggtggaggagagcattgataataagcactaatattactcacactacccttttaaaaagcattgataaaactcgtaattaattacaccaatagcgatatgaaaccgaacaataacagctagagtgatccaccattaatgatcgttggggaagttggcatcatccaaaaatctttaaatgcattatatagcctttcaactgtaacccatcaatacctattattattcttcttcttcttccttactagctccatttcatttccctttttttaaataaaaaacaaataaataaaaatattaatttttgctgagcttcaaatgactttttcggtgcctctttaaattttggtcacaaaatcacaatgcattgctcttaattttaacaagctgttattagcttttggtggttaggaaaatgggattgtacaatttctcaatttaaaaagcaaatggctttg

SEQ ID NO: 25218 - DNA, 3463 bp, Cannabis sativa
  modified_base (47)..(58): a, c, t, g, unknown or other
  modified_base (1470)..(1486): a, c, t, g, unknown or other
aaccattcaacataaaagcgatttctgatcttatattaattagtaannnnnnnnnnnntaaaatgagttttatttagggcacaaaaccccacatcttctattgcatttttactggaagaattagattccacctgaacaaaaacacaaaaaataaatgaaaaccagtttcatcatacaacaacaatgaacattatgaaaccaaacaaaaactagttttctcacacaacaacagtgaagactatgaacaaaacataaatgataatacaatgaaaataattaaaaccagtttcatcagtcaatcaaatagaaaaaaaaaatactcacaaatataataaaaaaactcgcaatgcaaaataataatctaaaaataaaatataagtgtaaaaatctgattcgaacctagaaataaaataataaaaagaaacttaaaataaaaaatagacaataacatcataaaatggagcaaccccatcacagaacccacctgtgaaacttgtttcgaacttgtgtaccctgtgaaatcagtttccagaaataacaaaaaaattcaaaactcagttacataaaataataaaccaactattaaacacataaatgagttacctaaagacacttaaataataaaaattagttattcaataaaataaagaataaataaaattgagacataaaaacgagttatcccataatatatataataagttattaaattaaattaaaaaaaaattaattacttaaaaacaattaaaattctgaaacataaaaaccagttatttttttccacaaaataaacaaccaattaaacatctaacatggaaaaatcagttacgcaaagcaattttgaattgattaattatgtcgacaaaaattaattacttaaaaaagaatacatatactacacatgaattcttaacaaatgacttataaaattaaattgcagaaactaattacattaaaaaactaattaaaaatcaaacaagaagaaactatttttataaaataaacaaattaaaaactaacaaataataactagttacttgaaataatataaagatttttatcatgtagtttcaaatcatcaaacccacacttaaattaattgagttgtcaaaaaattttatggaaaaaataataaaaaattataataagcaagcgttctaaagtaccaccttaactttgaaagaaagacataacacattaaaataataaatgaaaataaagcattgaaactagtttcatcaaacaccataaatgtaattgatcaaaaagaaaacattaaaactagtttctataaaaatacaatacatgctctagttcatcatgctcatttctgaatgcatactataataattttagctgattaacattatccccaatgtctacatgtttagtaagaaccagtttctatatgctaaacaaatgaaaacaaaataaaaataaatgaaataatgttttattattattattatnnnnnnnnnnnnnnnnnttattattattattattatttcctaaacatatttaatagtagtgatttagtcccccaacttctttttttggacttaaaatttgttgacttaaactcttaggtctccttaatttgatgattaataaatatttgattattatttgtcactaataatttgttaactttgtagcaaattaaagataaaataaatttttctaaggcaaaattaactctaagggtaaaatgataatttttaccaaatttcttgaaagtgacccgaagtggattccaagcctcgagaaactcaagacaatacttcatgaaagtttatttacatttcatagtcttgtatagtggttttcaattccatacttaaaaagttttaagtgcaaattttagcccgctaacttgtgcaacaagttatttcacaaaaatgatatctaaattttttaaattgactaagatcacatatcatttaactaagagaacaaaactggaatttttaaaatcggataaacgagtaaagagttatgcgtattttagcgcccaaaaatgggattttgcccctaccttgttttcggtctcatgtaatctaaacaacagcccgtttttcgtaaaaatggcataccgtttagaaaacggtagattgttttttctaggaattttttgaaaagtgtgctaatgactatgaactactagtttttatttcaacactatataaactcaatttttgttcaaaaattcaagttggttgaacatttatttcatataccaaacctatttaagtaattttaatgagctcccaagtttaaaatccaacaaacacttttcacacactttgagccaaaatttgtgcttaattctttaagtgtgcttgctaatcactctaggtttttcattgtttcgtcatacttctaaagtgggttttcttgtaatttcaaacacatttcaaaattgtgattgaggtgaggttagtaccagtattgtaaataactcggttagagtgagattgtcactacaataatctaagaaagagattgatagtccttggcagtacaaaactattgtaagaggtttggaaacaccttggtgaaaaattcccggttgtaagggttagtcaagctccttaacttggctcgatagtggaactcaaagttaggtctatagctttgaagaccaaggacgtaggtagcttagttctatcgaaccttgtaaatatggagaatttgcaatttcatacccttaaactctttactttacaagtttgattatttgctctatataattgcttgctatattatttgcatttacttgattaagttgttaattgcatagctttgtgttaaaagtttcaatttaccaaaattagcttaattttttaattcaccccctcttggaaacatatcttgggttaacaattggtatcagagcaagggctttatattttgattgtatttcacgatctagagcatggtgtttctaagtaattcacaaaataacatgttagaaggtttgagcacaaataaagcatcatactttaatggagtaaattttccttattagaaaattaaaatgaaaacttacctttaatctatagattatgatttgtggcatatagtgtctaatgatccttacattgctaaatatgttataaatggtgtaaaagttgttaagacttataaggcatatgatgagaatgataagaaaatgctttctaagaatgctagagctaaatatgcacttatatatagtttggatatagatataattaaaaatattgaacaagcctctaccacctttgatatgtcgaaaatgcttgaagttactcattaaggaactagtgctatgaaagagactaaaattcaaataaattccacttaatatgagaactttaagatgaaagaggataaaactattgttggcatgtatactcgttttaccataattactaatggtttgaactctcttggcaaggtacttactcaaaaggatatggtg

SEQ ID NO: 25219 - DNA, 1652 bp, Cannabis sativa
tctctctctcttgtacacgcccaatagggccttctcacttcctatctcacaagcctctaaggatacacctctctctcattagtggtgttcctacttaatccatgcgttgtaaccttatatagagctatatcagatctcacttataatgatctaaacagtattatctttaggtatcaatacaacaaaaaggggagtaggttattacacgctaactaagggggccaaacctttataaaaatccttgtcttatttactttactgttcatgttgtgcaacacgtggtgaacatcaaatttatacgatcctgttgtcggttgatcactttttgaggtcaataggtacctaggatacattcagaagggctatccaagattcacgttgaaaattaggttgaagctatatggcgatcattagacactgaatctcaacgtatcacagggttgtcccctatgtcagaatctaagagtgcacgtaccaccaaaaggagcaccccttttccctacgacaattattctaaaactacagtatgcaaagttggtgcactcaagaaacctatcaacatcaagtgttcccctgttgtacagatcataatagcaacacgggctgggccttagtctgtggcctaaagtcagtgtattttatgtatttacccaattagtgggccaagattacatgcaaaccctaataggtcacgaccagtatgcccatactcggatcttagcctataaatactatgttataccctcatgcaaagggtcagaaaattcacgttgtaaacaaaatagcaaagagctaggattcttaagcttgttaataacttttgtgaaatacttcaagacttctcaacctaatacaactcagtcctggactaggatacattaatacccaaatcacgtaaaaatctccatctttcttttcatctatttgatttattttcttagttgttactttaatatgcgcagttttcaaaaatctcggtaaacattttggtgctttcatggagagctaaggaaagactttaagacaaatagtatctgaaagaatggtggctactagaaacatgtcgctaacccactacccatggtcaagacgttatcatggacggcgttaacccacctccgtcggtgcatgcctaaacgagcactttaagagacggagaaacattaaaagcttgtggtcgtccagatggatggatgactgagaagaagaccctgagggaaaaccaacaataaggatgatagaggagatgaaaacgagattaaagatgggtattttaaggaaaactattattatgagaaagatctcaaggtatattagatggctaaagaacgtgcagtaacttggcaaaaactggtagcataagaagatatctctcatcagatgcagtaaacactagcgcgacaacaggatagattcaacgcctatgaggaaattttagaggagagccttcccctaagaaaaataaccccgcaaaaaaggtgaacccaatttatgttagaccttctgtcctgcaaaggacaaaggaaaaagtgttaggggtgaacgccaaaagatatactactccaaccgttcccaggacaaaccataatctagttaacaagcctctacagaaatattaaggacagcccaaccccaaggctaggatgcccttc

SEQ ID NO: 25220 - DNA, 1611 bp, Cannabis sativa
tcttccactcttgtttcttgggacgtttttaacagtgactccttagggtttctctctctctctctctctctctctctctctctagtctaccatgtcttttgttgctaccctcctcttctccttttctttcttttctacaagttttggtttgtgtgtttgtgggatttcttcattttgtgatctcagagtgattctgaagcacatgtttggtcttagttttggggtttgaaagtttcctagagtttgttagttgaagagtgcttattagctgtgatcaacaaaacttgaattgcatggtgtagattttttaagctttcaagcgaatctgttcatgctttctaccgcattgtaagttctatcaagagtttgagtaaaatgagcatgttgagctgatagttgagctaaaatttcttagtgcatctgctatttcttctctagaacttgttgaaattttgggttttatttttctgtttttttcacatcaaagtttgcaatttgtctctcagtatcatacaagtgaacttcgtgtctctattattgaacatttgtttatagtgaaagatgggaagatgagcatttgtatgtttgtattgttttctcaatcctatttatgtctaagatacttaccaagggcatgtgttttctttaaactatttcagttatttttttacatgttacggtttgctattaaaaagttgtttgatgcaattatgataaactagttatagaaaaaaataaaagggccatttaattttgtgctagatctgaaacatggccactgaaagtgtagagattgatgatgcttgtttatggggaccaactatagaaaatatttttatagatatcatggttgatgaagtgaataaaaggaatatgaaaaatggtcaatttagctcaaagttatggaagaaatttcttgagaacttgcaacgcaaaagtaagtaaaattactcaatgaaacaagttaagcaaaagttcaatacgttacgtactaagtatcatgagtttaatgagttacaaaaacacactggatttggatgggatggtgcaacacagactgtggttgctccaaatgaaatatgggagaattatctgaggataagaattaatttagtcaattttttatttagatagtcttaaataaagttgataaaaatagttttcttttttattataggcacacccaaaggcggcactctatcgcaagaaaggatgtgatcattatgtattgttggaaataatttttagtaagtttactgctagtggtaaattccatcggtctgctgctttaggcccaccaaacaccgatgttgaaaaagaaattgaaaatgaatctgagcacataggcctgaatgacattgatgatagtgctagttgtatgggcactcgacttattgctgacatttttagaagcgaaacaaaaacctctgtaacaagtatagagcgaaaagctaaaagagaaagataaaaacaaatgagtgttgcaattgtcgctgggacggaagtagctaaagtaagagtagagacaactttagctaaagctggaaaaaacaaagatgcaattgaaggcaaaagtgaaaatgatgagtttgttggaaattattttacgag

SEQ ID NO: 25221 - DNA, 1195 bp, Cannabis sativa
tttttttttttttttatataatatcatttctaactagcaaaaagccaaaactaattgggtcccctagcggagggacacaaactaactcccctggcagaaacaaagccagaattggaaacacacccaattgggagtgtaatcagttgcgagacgagatacaatttctgataaggaaaaagcatgcctctcttcaacgatatgtgcgacctgaagctgcagctggaggaaatgcacctctccagcctgtgcctatagcatgtacgctcgatatagtgatcagaggcccacacctgattaggaatttgagaaaggccttagagaggtatgcaaggtctttacgacataaaccaagagcagaagtattggaggttgcagagcgtcttccaaaatctcaacaccacgagtgtgatccaaccacatttagagaatccgactcagatcatgtcagctaccctcacaacgatttattagctcttgagctgcaaataacaaacatgatggtggcaagagtgatgatcgatgacgaagcatcttcgaacattctatttaaacaaacccaagagagaatgggtttgtcactcaaagacatagagccatacgaacaactaatgtatgacttcagcggagctgagatagctccatgtggtaagatcaagcttctacttactatcggcactgacccaaggcagaccaccatcatggacacattcatagtggtggacgtgtagtctccttacaacgtgattcttagaaggccagctttgtacgacctttgggctatctcgtcaatataccacttgatggaggctttgagactagctcttatggcttgcctcaggaaaaacccagacatctttgcttggtcacatgaggacaagatttggatcgacctcgaggtcattaatcatgccctcaacataaacaaagaaaaattcagacctatgcaacaaaaacagaaactccttgataaagagtgctttaaagccctgaaggaagaagttgaaagcttatgggagaaaaacttcattagggaagctttctactcggtttgggtatccaaccctattttcgtgcctaatccgattggtaagtggagaaattacgtcgacttcactgacctaaataaagcatgccctaaagactgtttttcctctatcctgaataaattaactggtggacgctacagctgaccatg

SEQ ID NO: 25222 - DNA, 2471 bp, Cannabis sativa
aatcagattgtaaagggttttatttagggcacataacccaacagtgatcgcccctggtcctatccatttgaaccatttatacgcgattcctttacatgtgatcacgaaaaaatttacatcttgccttacatgaaacctttcttcatcttcatcagctcattaaatacatcgagatggtactttgggttagtggtaccattataaggtgtcatctgtggctccttgaagttcaatagttgtggctccatttgaatctacctcgagagaggtaattcttcatcaaaatcctcatcatcatccaagtcttgttgcgtggcgatagctatctttcgacgtaggtcttgcattcctgcctccaactccttcatcctgtcgctcatcttctctcgggggttagtgaggggaactttggtcttctttgtggttttcattggaccatgctcttgggggagccatatgcgatgtgccctctaatatgagacctcttagataagtctcttacttaggttatgggtgtttccctcagtgaaatctccttacagtgagtaggctcgagttgtctcgggacagtttccttccgtattcatctcttggggtgctattagtggatgacatggaatcacattttcttgcatatgcagttgagatctcgtttcccactcgacaacttttgtgacggaaatgcggggcttgggttttgcctttgagtttgtcattcaacacattttgcataccagccacagtagtttctagcctcttgttcttctggtgaaggccgcttatttcctcttcatagcagtgaacccgagagcttgaactcatcaagcacacttgcttttcctttctaggtcccttttcggcgacaagaggttgatgtcctcttactgtggtgaccgactggttttcatccgagtgaactccattttctcagaggcgatgggaatgtcttgacatcttaaagatgatggtgaatggtttaggaactaacgtagctagcaattgttgttcccacagacggtgccaaactgttgacggtgaaaacttgtcaactaaacttagttagaaaatcaaatgcaaagggatgaagatgaaaacttaagaagagctcaaaacataaaaaagaaaatggtattgtattgaatctctaaattaccttacaaatgattcttatccaaccccttcttcaatggaagagagaggtatttataaggagctctaatggctccaaaatacaactgtgttaacctggaaacttttcttgatgatgtcgatatcaatgtttgatacgtggcaagaagggtgatgtcacatagagtagactcgagtcatagcagttgacttgggaggggacccaagccttgcgccaaagttgactttaggatcttcgggatggaagtttgaacttcaataacttgaattcaactcattatctttcagtattatgtaccatgaagacatatagcaacctaatccaagccctggaagctgaaattacacgaacctgcaacttggaagccaaactgggcacctagggtttcacttggtgcccaagttgacatcatcaactagggttttagttttcgggaccgtcttagtgaaaaagggtcaaaaattgcaatgagaaataaactagacatactccatacatatttgaggcattagaataagaatcagaacaagttcatttttaagtacccggggccccgagcacctagcgcctaggtgacaatctatcaatttgggcgcctttcaagtatcatattagagatttaatttttgcatcttcctcgtcttcatcaataatagggcaataggtcctttcgttgaagaaacaatacttcttgggtgccaaaacttggacccaacgtccaagttgacacctggggctggcccagcacctaggttgacattttgtcaaccaggacccttttcaatggagttttctgagaattctttcgagaatcttgttccattccagaaaatattgagattcaagtgtaccattttgttttactatttacacttccatccaaataattctgttaactgtctagtagaatgcccaagtgtacacaaatgtacatgtgtctacgtcatattaattatttaaatattatgaaaaataatttaaaattaaaaataaatagtaaaaaaataaataaaatatttcttttttttttcttttctacttgtttccctttcatgttcttcataaccagccaccaccaccatgacaaacaccaccactggcacaaccaccactttgaaaaatatccaaacaatattagttaccacatcatcactccacttgaaccacaaaatcaaaaaatcaaaattaaaacaccacagccaccaaattgtgtacataatcattatgatgtattagaaataaaagattaaaaattatatatatgggtatgcttttaatgagtattacccatgtaggggtattttattcttgaccattgaat

SEQ ID NO: 25223 - DNA, 2018 bp, Cannabis sativa
aaaaaaaaaaaaaaacccaattgataaccatttttcatttgataaaatataccaacatttataaccatgcacctgattttggtaaaaaaaacaagaagttgttttttttcttttttaaatatagttattattagatatttctaattttagaactaatgttataattataattaacaataaagtttatcaaatttgagagacattaataagacactatgagcccgtttggtatattttttaaaaaagttagaagctgttttttgaaaaagctgtggtaaaaatgtttttggtaaacagtcaaaaaaaataactttttgaaaaaaatttagagaagctacggctaaaagctgaagttaccccaacttttagaaaaaattgttttgattaaaagattataataatttttttatactaaaattatatttacttatacattacatattaaaaaaataaaaataattaaaaataaactaattataataaaataaataattattaaacctcttattttttttaaaaaaaaataatttatattttattttattattaacaaacaacatgaacctagcatttttctgttaattttttcatttgataaaacataataaaaataatactatagattatttttattaaatgcatataaatttatatttaaaaaaaataaaatatttataaaataatttttatatatttgtgattataataaactagagtataacattatcgttatcattataatagatcttaataattcacaatattttaaaatttacaataccaaacaatcagctcaattttttttctacaattttgttacaactactttttctcacagcacagttacaaaactgacctatctttcacttataatttataaaattttatttttcaagtgaaaagtaaaataaatatatataaagcaataatatatgggatctgataaaatttaatattagttaaaagaataataaattctaatttgagaatctaaaaataaaaataaagaatgatcatattttattttatatataataatagcataacaattatactttttcttataataacttcataaaaactattttcaatatagatcagcttaacttcattatgcatatataatatactacatgtatatataccatcattagttttatctgattaattggtcattattataatattttatgcatgcaagacagcgacgtgaaagccctggtttggttctgcttttcggcaaactaaattattaaaattagtttctcttaaaagagttttttaaaattaagagctaaaataatttattggttacccaaagagcagcaaaagtcttttgtgactttaaaaactgatccaaaaagtggggcaaagaaaatacttgtgatttgaagatagtgactcaaaaaaatcacttgtaatcgaactgtcataaaataaaactcatactgtatacactaagccgaactgttcttaaaaacccagccaatatccaaatccatccaaatccaacattagtggcatgacattttttctatgaagagcggcatgacattattggatatatctaagaacttgataagaaaatagttagccatacatattatgtttatttgcttatataatataaaaatgggatttatatatatgtatagaactggtagtggtaattttatcaaaagtaaatggtagtagtaatagtaatatatagtaaatattagtaccggagtgaccactaacgagctggatagaaatgccattgcccaagaaatcaccaacacggtcaagcagcgaagagtcgacgttgacagaagcgcttaaggggttgaactccaatacattcttcttcatcaacaccactgatccctttacccttttctgatcatcatcaccacgattcagaatcccactcactctgtccccaattttcccaagcaacattcctttcttttactttacttttttttccatgtattttttagatattaaattaggattaatgattaagttgattttat

SEQ ID NO: 25224 - DNA, 3084 bp, Cannabis sativa
tttttatttatttatttttatagcaatatctccttaacttcactattgataacaaatttgaagcgtcaattaaatttcaccattaaatgtcaatagaaaatgccgctatgtatacctgcacatacgtgacactaaaatctcaaaactaataaaaacatgccatgcatacacgggtatgcacaatgacaatccaatcagcatttaacagtgagaattaactaacgcctcaaatttataaacaaaagtgaagttaaaaagtattgccacaaaaaaaaataaattaaacgtataaaattaaaacataaaaagatttaactgcgaattacccattacccaaatgaataatgtttgagctaaaatagctaatcatcttattcatctaatggagagtaaattttgacatcttaacctatatttttaggtattagctattttactagtgcacagtagaaatgacaaaataatcgtcataaaaatcgtaatctttatagtacagccaaatgaacatccctcttcaactcattgacaaaaaagacttagtattaaatataaatcaatataataaaggaccatggaatgaaagccaggatcaactttagttaaaatcttataaacaatgacacagaaaagaaaaaaaaataataaacataaaaatctgtatcaaatatcagattgttcaacttgtgttatatgtggtgcctataatgggtttatgggtattctcaaggagcaagtatacaaatttcaccacatccactaagcaagtgataaggtgctcatcaaaaccctcttttaccacgattctgtattagctgcatggagtggaaaaaaggtccaaaaactgaaactcaactttgaatccatagctattacttcaagctccagcttcatcatcatcatcttcactaaaaactatccaaatctagtcataaaagtccctgttttatttttatttgggggataaaattgtgtcaattcaactgcttaatcttgtaatatcagcatactatacaataatcttcctcacagcagtgtaagcaaataataataaacacatacatacaaatccttgaaagagaaaaaaagaagtgtctgaaatgtcctaaatctagaaccagcattgagtaaataagcataaggacattcattatgttctctggcccagccttgcaatttaaagatactaattcaatattaaacatacagggtgggtgacttcacttgaaagacattatcagatataaacctggatccaaaatcaaagatgagcaccaaataatgaaccattttgcagataaagcattaccaaagcttcccaaacataattaataagttttacatactgaaaaacatatcatgcttacctcacgctaatccaaggttatgtagcttgttacagtggggtgtaggatgattcttattccagtgccgtctttgaagctctacctggcagtagcgcagaagaatacttttataatctttgatcacactatcttcaatatcactccgagcagaacttccaataggataattattgtcgaatgctgtggacttaacataaaattccacaccatatttctcagttgtcttgggaacttgataggagtaattcttgtgcagtgaatattcaggctctgaaaatggcagatatgcaagcaatataatgagcaaaaagggcaatatttgaagaaggagcatgaaattaagtcctcccccatgaaactcttccctcggttgttgaccgcccattcctcgggccctataaacatgactagctcgaaacatttcactctgaccaaagaatgccctgaatatttcattagggtcaaactcatcctcaaaaatgtcctgctcagttcgcctccgccgtcgccttacattgttgtgttgttggttatactcaaattcatcaaccaatccagtctgatcatactgtctccttgattcaccatcactcaaacacctaaaggctttgctcactgtcttaaacgcctcttccgatccaggagccttgtttttgtcaggatgaactttcagagacaatttcctataagcctttctaatttcctcaactgaacaagtcttctccacaccaagaacagcataatagtctttatttttccttatctgcctaatcaactgaacatgttcctcagaataatttctctccctagtattaagcgggtcaaactcattcttaatctcacctacacttctcccatttctagactctgaaggagactcagaagaaccaagcttctcacaagcagccaaaagctcggcaactggcaaatcaccattgagacgctgagcaattttaatgaatttcaaagcacgtcttttgtcacctgagctaattgcttcttcagcaatgcgaacacatctcagtgcttcatccttgttaccatccataacagaccactcactgaaaaaaaaaccccaattcacaaaatgcgatcttttcaaaacatgattcacaaagcatagaaaccctataaattaattccataaatctgattctaattcaaaattcagaaacaaagaggactgtgagagtccatatatatcaaaatcaaatttattagggtttgattgatcagagtaagaattgtaataattaccatatgatttcaaaaacgaaataggtaaatcaaataaaaatagtctaaacagagaagaagaaggattaccagctaataagattgggaggagagctcagagcctgaaagtagagagagaaagcatagagagagaaagagatgagaataagaaaatgggtttagtttatttagttccgtattcactatacggtggtacgtcactcaagaaatgatagtccacgaccgaataagatcgtgccacgtgttgagaataacaatttcaatgggctaatatgggttaagagcagagagaactccagcccggttaatgatggtccacataacatttgtaccgacaacttccttttgggggatattttcattaataccccaaaaagtcaaaacaattacaaaaatatgaattttaaatattgttagagcaatgctaaaagacaccaatagtgcctatcaccctcttatgtat

SEQ ID NO: 25225 - DNA, 3391 bp, Cannabis sativa
aatatattaaaaaaaattgtaaaaatatttaaaattccgtgaaacagcatttttgtaatttttttgttatttttatgtatttgtgaaataattatatagataaaacaattatcatattactcgttgaatatgtacatttataaattttgtcaaaataattatcatgatacatatttttttttttcaactacaaagaaaatacatcgaattaaatttgatgataatgctaaaaggcattcatggtgcctagcaatcctgtgagatgtaatatcgttattgatgctacttattttactttattaaataacatagagaactgctaactaattatagggcgtcatctcatagtggtgtctcactattacaaaaagggcctttagatacaattttagcaaaattcgcaaccgtaagtgttacaggggttgctaaaggggtcaaacaaaaccatctctcactacaaaaaaaaaagtattatctttagtgacaacattttagtcaaaacataaatttatgtgacttttagtcacagtaaaaagttatttgtgattaaaacataatatttagatacaataaattgtcactaattcactttagtcataacaagtattgtgactaaaaatatatttagtcacaaaaaattgtgatttttgtgactaatatctctagtcacggactttttagtcacaacatacgaattattgtttaacgttagtaacaactttttttacttttgattacaagtttttttaatggcatgcagtttcaacaacggagaatgataaatagagcaagagagtctgattttaccaagaaatcatagatctaaacgtaaagtgacacttttttttaaaaaaaaaaaaatcaccccaaaatttaagtttgttgcaagaatcacatgcaaactacaaaagtaaatcggtaagagaaaacacaaagagaaaaacatggcaagaaaaaaaaaagagatgggaccttcggtggtggttaggtagtcaaggttaggtgcagtcgatgttagagagtaacagttttttcgtcaacggtggtggaatcttcgtggttgaggcatcgtcggtgctagggctagcggtaggtgggctaagaggtaaagaagaaagaaaaaaataccttttatgaaggctgacggtggttggctagtcaaacaaagagtgaaagagaagagaaagagagagaaagaatgggcgtttctttagggttttttttgtggtttaggcggctagaattttgttaggattttattaagcttcgttagggttttcttatgggttgaagtccatttagaaattcccaacccctttagagatgattatttcataaaaaccgcctctaaaggggctccaatatatttctttcccttttagttatagtaacattttttttaataattgaaaaaattggtaattaatttttttttattattattttttttttattttagtgcccccatatataacaatgctctttagaggatgaatgtctcgtcttcatccgtccatccctctctctcttctccttctttcttccattcttcaaaaaatcatcccggccaaatataaaaatttagaaaaagtaatcatgtgtaattttatttcttaattaattattattttttttttctaattttgtttttaatatatggaagataacatctctttgattaatttgtatggagttttgtcgattttttattctctctccaaatcacttaatttactcccattcattgcttctgcaatgtgactatatgatgtaaaaatatgggtaaattaatgtagttttcaacaaaataagttatcaagtgatttgataagaaaactctcgcgacccaattctgcacggtgaaattcttatttttgtgcaaataaaatagattcaaatgaatcgaaatgaaattgtcatcatgatttggcatatcattatgcatgtacatatataatataatttcaattttttatgttataatttattttataattatttaagacataaaataaaattttgagaaattgagaataatttttaatatagagggttcaaacaatttctttgacatgcgtattgtttgctaagattttagaaaactaattatttaatatttgagctaaaaaaaagacaattaaaagatcgataaatgaagaagacactcagagtttttatgtggttgaagcgttaataagccttaattagtctacaggtcagtattattatcagataggcaaaaagcataaaatacgttgaagacatgtcagcactaacctgccaggattagtgttgtgcagcctcccaacctttgaaattcccttgctgcacggtagacacaagcaaagacaaatgtacaaacctaccagtaaattcctacttggacctattactgggagtgatagcttcaaagcactgggcaaccttcaatagggctggccgaccaagtgtacaaaaacacaccagcacttgtgtttttctcacaagccttgcaactcgcctttagcattctcacgacttcagaacagattaaagtgcccacaaagatagggattctccatcaaaaataacaaccctattctttagggatcgttaattatttactttgtattccaaatataaagtgtaaatttcttattttccagtgatatcactatgtacagcttataaaccccaatactatataaagggtcataacctaaacctgaatggatgatacaagtacgctcggtagcactatagcaataagcctctctcttttctcatactcctcacctacaaaatacattctcattgtaatactgaagagagcctagctagaaattacaaggttttagcctgtattctgcttgattatctcaagagtgaatacaactaaaaggggtcattatctaaacaaaagggatggaacctctataaatttgtgtgtctcttacatttattatcattctcacgtgatagtcataagcaaaatctaatcctagtcggattcgcatcgattggctaaatccacagtaaacattttggtgctttcattgagagcccatagttctcatttagaaagctcttatcttttgcatggctgtcacaagatgtggaaatttgactgaaccatgagagcctatggtcgtggatcctaatgtctaagtgccacctgacgtgacaaatccaaacatggctagcccgccacaaaattccagctagctacccagatattccaccacagaggtccaactaggagagcaagttaagctggacccaatgcccagcccacaactgaaattcttggcacacgggttcactacaagaaaataggttttcagcgactaaattttttgtgactaaatcaacttagtcactaatagttagcttttacgactaatatttagtc

SEQ ID NO: 25226 - DNA, 4197 bp, Cannabis sativa
ctatattttatttatattcctaaatcatatccaaaataataaaactatattttcacaatattaaacacactttcttaaaatttagttattgcaattaacttaattttttcagcaaaaatattctgtaaacaaaaaatattcacacttgcaattaattaatttaattaatttgatgaaatcttcattttaataaaccgtgtcacttaagtttaattatctaaaaccgcgtctaaaaatactacaaaatcatatttataatgtgttaatcacaacatataatattattaattaattacacaagcaaaatcaaaaccaaacacaaacacacaattaagtaataaaattgtacaataataatattaataatttcaaatcaacacacaattttgtcttttgatccaaaaaaaagaaaaacaaattcaatcaattaattacatgagaaatttaataaaaaatcaaaccctaaaacaccaaacatgattatgatggtggtgatgatgatggtgatgatgatggtgttgattgagagaattattttcttgatcaatgatggtttgaacggttctgaattggtccacgtggcaaggaatgacaattggacccttttgatcaaagccatactcttcttcagcctctttaagaagtttaataaagagagggtggtttatgtaaataacaggaataacaaacctttctctttgttcctcttcttctccaaccattacagccaaacacccttttgggatatctttattcccaatttcatgatcattattatgattatggaaatgaatgtggggaatattgagatggaaaatattgttggtattttctaatttctcactagaaattgtcatttttgaaagaaaaaaaataaccaaacaaagattatttgatttaatacaagtagctagaggagtaggaataggtttttgttcttgttttgtgtttggatgattaattagctaggtgttgtgttacaagaaaaatttgatagaaaaaggccaaggatcagaagaagaaattgctagcttgaatagagtaaaggaagaatcggtaagagatcttggaatgttgctcatgatataatattttctcaagaaacaaacatatgagagaaaataaggaaagaaaaataagatgagagaggttttgttatgattttggaagattggtttcgtatttatatggaaaaataaattaattaaaaaaaaaaaaaaaagaaagaaataggtggatgtggtgtggtgagatgtttctagctagctaactaggtttttttttttcttttcttgcttagtatgtactcaaagtttttgattctatatatggtggggttttttaattttttattttattaacaaatatagcaatattaataatattatatagggtacttctacaatgtattgatgtaatttttaactgtttggtcatttaaaatttttttttagtctaatttatttttatattcttgtatgttatagttatttaagatatttaatattctttcaaacaatctatttcatatacgtgtaaaataaaataatcatgcatgtaatacactgaataaactcaattttctacgtattaaatttttctgaatttcttaaaattttacaagatgttttaaataattataatatatataattataagaaaaaaattaactaaaaatttatttcgaataacaaaatagataaaaatgtatcggcgtatgtacatttttttcaatacatatatttttttagataattaatattgttgttgcctcctgaggtaggtttttttgaataaatgttttatattttacagctggaatagtgtttttttttcttcataatttttttttttggcacacgctgtataattattgcatcataataataataataataatattttgatatcttagctagctaggttttcttcctaaaagatgggattctaatctaatctattaatacatatggcattatctacggctcatattaaggaatattaatatattaattttaattatcatttttaaaaaaaattaacacggtccatccactagtcttaacaaatacaccaaaaaaaaaaagcaaaattgaaattgaaaacttattttccaaattaaattaaattataaccaaacagtgcctaattcattcaaagtttcaaactaacctgaattaatttcgaagatgaaaattcaatctcaaggtgtgtggcagccgggacacgtggaaagctgtgattggctgaggcagcaaaagtggggtccacgaatgagaaagacgaccgacaatgaggtgtcttgtccacgtcagcactctcatggagcaaccaatagcatggcccagacatgttggacctccgagtatgacatcattcatacgtcactttagctttacatttataatgtaataattttgtaagagaaatttacatcaacattttttatcctttaatcaatttttttttcagtattattcttaatattctacactatccgtatagagtaatatatctgtataaattaaaaaatatgtgtattaaaattggactaaaaaaatatgtcaaaatatgtcatatataataatactaaaaatatgtcctttaatccaaaattataaattttaatataaatttaatatgctatttaatgcttatttaataatttattaaaaatataaataataatatataaagataaatataaaatttaataataattacaaaattatttaatgtaaactagcatgctaattaaattttaataataaaatattaaaaatgggcataataataaatataaaagtataacattaagtttaacctgtaaataaatgtatctaagtttaatttttagcggtaataataattaagttacatttttgaaactctgtaggtacttgactgttaaatgttaagtcattatccacgtgtcattttcttattagtatattttaattattttttttaaaataaatatttaatgacttggaccaattaaaaattgccacgtgataatttacataacagttaataactaggtatctataaaagtttcaaaattacaacttaaatattattaccgttaaaaattaaacttatgtatttatttataattagaagttaaacttaagtatttatgccgtaaattactctaaaaaaaataataacaatgtagtaatttattgtgagattagggttattagttattaccccacaaaaagggtcaaaattcaatataggagcggattttgaggcagattgtgttgcagattatgttgtgttctaattctaaagcccatttattttgcttatgtgtttagtagtagagatgcatgtgatcttgacccctcaacatattcaattcaattccaccattatttttaaacctaattcatttattacacccacacacaaaattcatattttaaattttgattcctctaatttattttttattttttaatttaacattgaggtgacagaattttatactacaattacaagtggttgatgtcttaaaatatttgtacaaatttaagatttggtttcaagagttcattatatttttttttttggtattttttatttgtacaaatttaagttgatcatttataaatatgatggatgattggttagtgttattttttattttatttttaaataatatattagttttataaattagtttatatatccattcgtattactctcatacacatggatgttaaccattttcaaacttttgcctaggtcaaaacttgtagatattttgggtatatttatgattaagaaataagaaggttggttatggcctttacttgataggactctttcccatttatatcttgaccaagaagagaaggaagttctataattgcgatttgagttaaagcaatgaaacaagtgagtgaactacgtgtatgtgtaggacataatcgcaacactaagagctttcgagggagacgaacacatgcaaaatacttgcatgcttgcagggagaggcccttcttggacaaaatcacaataagttgagatgtgaacactttcaatttatttgtttcattttacttttatatattgaaaaacttttaggtagagctggttattaagagttagtctcacattgttaatgtgtagaaataaattgtgatatataagatgaatgggctactcctcccattaccaattggtttt

SEQ ID NO: 25227 - DNA, 2299 bp, Cannabis sativa
tacatcaaactccctattacacttgcataagggatgttcttcattgctcctctttccaagtcgttcttaggacattgctgcttagtgaacttgtcccctttcagaataggaacagagacagtcttacataaattaatgttaaacattttaagaacacgattaatgcatgcttcttgagataagctaagaaattttttattcatgtcaagatgaatctcaatctctaacataaaagatgccccttcaagatcattcatatcaaagttggtagacagaaaaaaattagtctcatttagtaatgacaaatcattgctggtaagtaaaatgccatccacataaaagacaagaaaaatataacaaatctcactaatcttcatataaaattactagttaaacttgttcttgatgaaaccaaacgatgtcacaaccttatcaaacttcaagtaacgttggcatgatgcctgtttgaaactagaaatggattattttaatttgcaaacgaaattatttccattttccttgaagctttcgggtcgagacatatatacttactctcccaattctccattcagaaaggtagttttaacatccatgtgatgcatctcttaatcaaaattttcaaccaaagccataataattgtgaatgaatctttagtgaaaataggtcagaaagtttcattgtaatcaataccgtttctttgagtaaagtctttgccacaaaacgtgatttatacctttcaatcggtcccttattatactttttaattcttaaaattcacttgcaacctattggtttaaaaccatcacgtaataaaactaactcccatacattatttttttttccatagactcaatctcatcatccataacttttatctattttgaagattgtggactattaagtgcttcactataagtgacatgatccacaaaatgaccaatataatattctgcttctccaaagtaaacaaaattattatcacgtcttgttgacttcttttgtccttgagatcttcttagaggaggtccttctagaataacttcaatgtgttgatcattattttgaatgacatcttccacaactggaatttcatcgatactaggaccctcatcaacaacaggtgcttcttcaatagtaggctgcttgtcaatattaggtcattcatcaataataagtccctcatcattgattttaggagtagtatattcatcagcaatgagagcattatcaactggagtatgaataagactgtttttattatcatttcttgaaaaggacacaagaataaaaattcccttagatgactcccccatttcaagagatgttgaagaaatattttcatcaacattaaattttagacatttagcagtttgagaattcaacaattcgcgtatcatgagtaagacagtaaaagcgatagccttttgagtgcattgaataaccaatgatataacaaaaaactgatctcgaatctaactttttcaaattaggatcataaatccttacatcagctgaaaagccccatacatgaatatgattcaaactagctttctcctaacaactcaaaaggtgttttgggaacatatttacttggtacacgactcaaaatataagtagcagtcatgagtgcttcaccataagaactctagaagacttgatctactcatcatgcttctaaccatgtccattcgagagagatttctcctttcaacaacactatttttctcaggtgaaccatgcatagtgtattgagtagttatatcattttcttgtaagtactccgcaaaaagccccatatgtttctcaacctcattttaaaagattttgagtttaccaagagcgttatattttttttaataggtaggtgaagtcatattgagaaaaaacatttataaaatttataaaatgtttgtttctgcatagtgtagtggaataaggtccactaatcactactataaaaacaacctttagaggcggttttttaggccttttagcgtcggttttcggcaaaattctctaccgacgctgataagggcgacactgtagggttgaatatatataaccgacgacatatatacccctatggcgtctgttattagataggaactgacgccataggcgtatatatggtgtccgttcctagctaataaccgacgctatatatggcgtaagaaccgacgccacatattcccgaattttattttttttaatttaattaaattatatatttattaatttatgtattattttattaaatttaaatttaaattacatatttttttaaaaggtaaattaaat

SEQ ID NO: 25228 - DNA, 3918 bp, Cannabis sativa
attgaatcggatgaacagccctactctgaagtccagaatttcatttaagtgtcagtatgatgaaattctatatagaaaaatgtggaagtagaaacgaacatgccaagttgaacttaaaatttatgatgccttcggtggtaacagagataataaccaacaatgttcatctagcaaggaaaattctatttttttgtcatcatggtcttagatgaattttaaacatttattttatggtagctgatattaagtcacaaataccatcaaaagaagagaaagaaacaacgctaatctttagagtttatactaaaatcaaacctatagtttgaatcttactactactgcaatatttacaattgaaggattactgtactattctctcctgttatatagtttgaatctaccgcaaacaaaatccaattctactaacaaaaatgaaagagaagacaataaaagagatgcatagagatgaaaacttttttcctttttatttcacttcattgatacattgcaatcacaagaacactgagaagaaattaacctgatcgttttcaacttctagtcccttaacaaaaattggggtgagagagactcattcagaaaccagatcactctacattaactttgttgttgactcagcaggagtaaatcctctgcgaagcatttcttctaaccatctgtgtgcttcttttgtcctcccatgtctggaaaaaccttgtactaagatatcaaaggtaaactgatccggcacataaccattttgacacatcctaaggaacaactcacaagcactgtccatattgatcgagcatatccttctcaacaacatattgtaagtgaatacatttggtgtaaagcaatttccaatcacttcttccaagtgttctacctgttcgctcaccctaacacggccacagaaagcaccaattagcagtctaagcattgaggtatcagatttctctgcttgatcctctttcaaacgagtccaagcctcataaagctcttgactttggaaagaatacaacagcagcgtgttaccaatgaacggtgtaatggaacggccagttttctctaaatcatcgataagtatcaccactgcatcgtatcttccatttaagcacaatgactttataagtaactcgtaacactccatgcttggagtcactttagctgtcttcatttccatcaaaaattcaagcgcaagatccaccttgttcgctttgcaaagaccagcgaccatgacagcatatagttttcttccaagtactctgctggtgcgcaaactattaaagaaatttacagcatctaagattttttcactcttcaaataactctgtaacataataatgtcagattgcaaattgggctttatcccacacttcatcatcatctcatacactcctctagccaactcaggtttctttgcgtatccagcaccttcgatgaaaaagttgtatattgtacaactggggtcagagcaagacatttgcaacttcaacagctcgaggaattgagtttctggttcctgcattctgctaagggaacgaacaacagccctgaacaaggtacgactgggcttgtaacccttttcttgcatttcaatgacgagtttagcagcaacatctcccctatctaatctgttaaaaccatgtattaagtcaaagaaagtactccttgtggcaacctcgtttatcttattgagttcctcatatatcaaatagccatcttctaccctattagccgcacacaaagctgatataaacttgccataagttgaagcactaggtttaacatttcgttccaaggcaataagaagcagttccttcatcttgtcaagttttccctctctgcaaaaagcatctgctagtatagaaattgcctttttacctggaaaataaccttgctcggcagaatcttgcaatacaccaaatgctttatcagtgctcccatctaagcacagagtattgatcaaaaaattgtaggccatgctattaagagtgaggccatactctgacctcgcattgtacagttcaactgcagcatccaccataccagctttacaaaagaagcacaatgcagcattcatagtgacatcatctggggaaagctcactctctttcatttccatcaacaagtcaaacacatccttaagccggttctccctcaaaagcttacaaatcaaggaattatatcgaaacaaatccggaacatacccatctaaaaacttttgcttcttcataaactccaatgcctcatcttgtctaccagcccaaacaagattcattacccaagcatcgtaggacttagtcatgggaacagtctcggtgtccttaaactcctcaatcaacttctccgcctgctcaaacttaccatccttacaaagagaagttacaagtccaccaagctcatctcccttcaaggaccgtccatcactaaccaacccacgaagataagctccggcttcttcaaagagcttctgcttacagaaatttttcaccatcacagaccatgtaagctcactctcaaaacccctcatttcaatctgcttagcaataaccttaacagcatcaaaacattccatctccaccaaagcattcaaaagcacgtggtaaccaaaggcatccaagtcaagtccctgaaagcgcattctaccaaacagttggagtgcaacttgaggtttcccagcaacagcataacccatcaccaatgtgttatgaaaccgaaccctatgaacgtaacgttgcttgatatagctatcaagaaaatccagcataagagaaaaaagcttagccctagagagaataccgaaaatggcgtggaacgtggcacgggtatgcacaaatccaggttggcgtccagcccaatcgaagaacttgaggcaagagagtacgtctttgtatttcccataatttagaacatcaagcacaaacgactcgtcaagatggatcctcaagttagatagagccaaatctgtgatgcgaaacgacacgtcgtcgccctcgtttcgattgctgccgatgattttgaagatctcatagaaaagggcgttgttgttcctagtcttaaaccattccttaagggataccactacagggtccatggacaatcgaccatagtaactaataccgtcattacttacttgagaggttgtagttgatcttgaagctagccatggagttgaaattgcagaaccagtgccgttaccgccataaggaggaggagaagaagaagaaggagaaattggattggtaatggtgttgagaattacagaaagttgcgtttttgaaacagaactagacttgtttttggcgagatgcttcagtttaagggaaagcattattgatttcaaattgggatttcttcaaactaaaataaaacaattctaagtgaagaaaagaaagaaactttgggtaccgtcgcattgagagaaaattgatgcggagaagtgttcgataaaatctctaagagaaaattgaataaggcgaatggtccttactccatagttgagagttgacgaacgtggcggcgtgagggaccgtgtggtgcgtttggatcctccatcagccacgagtacgacagaagacaccacgggcgggttgctcctctactcctacacgatgaactaatttaaacctattatcctatttatatgtgtctgcctatatattcatcttcttcttcttttttttgtttaatgaacatatattcaattttcattagtatttttttttttaaataatgatttttctttttaaaaggtaatggaagattttgttaatagttcaagatattcagtttagaacatgcggtagtattactctaatggcacgtttactatacagtaatcagaatcggaataaattaatggagaaatgtaacggaataaatgaaaaataatcggaatcaatatttgtaatatgt

SEQ ID NO: 25229 - DNA, 1238 bp, Cannabis sativa
tcactcatctgccatcaaaattttgagcatatattaattgaattgtgatctagtatttgataaatcagaagggagcatctttaaataaataaataaagtggctttcaaatataatctacacagaaaatgaggggggtctcaaaatgacatctatcatgtgtcctaggacgacatggtaagtcaatactaaaaccctcttctattataagaaagaaaacaactaatacattatatccataatataactagatctggaagagctacatcaagtagtaagctttcttccaattctacaaatttcatgaaagatccaaaaaattctaatgaactaaaagatcacaaaaggatataagtagatgcatctgaacaaactagaaaggtatatctggtgttttgccaataaaccattaaattcaggtttttgcactaaaaatctaaatttaaaatccctctttagcataaaaactatccttctgaccttgtaaaacaagcagagcaaccatggcaagaaactaaggaaaatttctttctaacctcgtaaaagtacacaacaaccatccatgacaaaaacacacacacacacaacaacaagacaggaggtattattaattttttagaaaggaggataaagggatcgataatgtttttcaaggcttcatgtttacagtttttttgcttatgtagatcaattaccaaattggttctaccactcaaaaaatgttgctactcccatcgatcttcaaagtttagcttccaatcgttttgggcttccatggattcgtaaacaccatttcagaggcagaagacggtaaccagacacgccaaagttatcagacaaaggtaattctattcagattggttggataaaccatcattatttcactcacagatttcacctctaaatcctctcctctccgttagcaattagaagaggtatacctaaaatctattatcatatatatttatctatacatgtgtgtgaaatctggttcaattcataatgtaaaatctgttatggatatatataatattgaattgggtaagaggagagaaatctagattttaagaatacaataagggcagttgtcgaagaggggattcttgggtaaggtggccagggatcagggttgtgaggtcaaggagctgtgggatactgttgctggtggcgattccaaggataaatttcattgttcattgttctgtcttttattttttttttcaggtttctgatttagtag

SEQ ID NO: 25230 - DNA, 2671 bp, Cannabis sativa
ctgttgttgttgggaaaccagtaccctgcacagatgggaaacaacttgccaaatttggcacaggtgaattagtggttactggtgttgcaccagcagttgtttgtggtattgtaggtatgacagcagatgcaaaaaattcatgataggagtaagagtcagtgtcaattttaggcatggatgagaatgggaaggatgtttcatcaaatattacatccctggaaatgtagacacgacctgaagcatctaaacacttgtaccctttatgatttaggctgtagcctaggaaagtacaaggtgatgacctgaattgaagtttgtgtttgttgtaaggacggatattgggaaaacatttgcaaccaaacgtttttaacacagtgtaatcaagtgttagggaaaagagtttttctatgggagacacatgttgtaatacaggagttggcagtctgtttgagagataaagagccgttctaaaagcctcgtcccaatacttgagaggcattgatgcatgagctaacaaggtaaggccattttctacaacatgcctatgctttcgctctactaaaccattttgttcatgcgttgtaggacacgggtgcctgtgtaaaataccaaatcgttttaacagatcagaaaatggtcgaaactcacccccccagtctgtttgtaagcactttatttgcttccccaattgcaatttagattcagctttgaattgagtaaaggtttttaatgcatcagatttgtttttaagtaaatatagccaggtgaatctcgagaaagcatcaataaactgaatgtaatatctgtacccattgacagatggagtttttgcaggaccccataagtcagcaataacaagttgcaagggttcattgtaaacagtaagagatgatttggggaatgggaacttgtggattttgcctaagcaacatgcagtacaaacagaaagagaatctttattgctgatttttatattacaagagtcaagaacagatttgacaatcctttgagaaggatgtccaagccaattatgccacaaatcatagtcagagatgtgtgatttattgcactgagtactatcagcaacagtatgctcattattttggggtagagagactgtcaaggcacttggtgggacatcaggtgttgggacttgaacactgaaatgggaaggattaaaagtatagaggccattctggtgtatcccagtgagaaggatggcttgtgtgacctgatctttcacaaaacaatgatcagcatgaaactcaaagaagacattgttgtctcgagcaaaacgagaaacacttagcaaattttttgtaagttcaggcacatgcaagagattatttaaaacaagagggtgagctgtattagagttaataaaagattgaccaatgcgtttgattaacagacctgaaccatctccaacgtatagttgttctggaccttcatactcagcactggtggtgaggttttgagcatttggagtgcagtgattcgttgctccagaatcagggaaccagctggtgtcatctgtttgggaggtctgcactatattagcttgagtattaggtgagttggaacctggaaaaaccctagtgaaacttttatcaaaacgataaaagcaatcgatcacagtgtgtccaagcttatgacaaagctgacactggacacgatttggtgctataggaaatctgccacctcctctattcgaacccgatccaccacgaccattagtgccaggatacaggccatagttactcccagtagacattcctcgattgatgaacccacggccaccaccacgagatgtggttattggagaaggagtccgattgtagctaggaaatctgttattcctatttgagtagttctgataggccacattagcttcagatacttgatcagattcaatcacagcaatattgacactcagatctgagtcttgatcatgatcaattttttctattcgagactcagatgcgagtaaaagtgcttctatttctgctactgagtattcttctatacgagtgttagaagagataataaacgtgtcgtactcactcggtaagcctttgaatattgctgctatatgatctctggcactcaacacttctccaacagatgctagaagatcaacgtgttgtttgactttcaagagatagtcatttaaggacatagatcctttgcgaagcttctgcaatttagttcgaaattctaagatcttagaggagacttgcagtgtaaaatgtttttccagagcatgccagatttgccgtgctgtattacacccaaccatgcgtgtaaggagactctcagtcattgatgacagcaaccaggacacaagtaattgatcctgaacctcccaatccagaaattctgggttgaaggtgtttgaagcttgatctgcatcattcaagaattgaggtggtggagctcgatcttgaatgtacctgattaatctatttccactaatagctgctagcacctgttgtttccacaagagaaaattatggtcatttagtctaatggacatgttgtgattgaagtataccggattcgattcctcagaactgtttcttgatcgagtgaatgcagggactccactttgttgattctgctgtctgctggtgttggagttgacctggtttcctccattgttggcaactcc

SEQ ID NO: 25231 - DNA, 3807 bp, Cannabis sativa
ttttcttcttctgttgcagataagcatttatctttctttgtcaatcgtcatcacatatcccatactactagctagctagctacctatactatacaaatgccaattcaaacatatactcacatatgtatatataggtttatacgtataggtatataataataactacgtataatttggtgtgtatatacagtggagaaagttatgggatcacggctgggaagctacacttattgaaatcatgatatgcttatatcgaggtcaactaagtcaagtaaatgcaatttaattaaacgagtttttttatttatatatatagagaaaaaaaaaagtcaagtaaatgcacagctatttatttgatcattttcacttacgcaattatagaaaaagactaaaacctaatctataatttgatcgtttattcagcaaagtacttaattattaccattaatgttttttgtacaagttggatataatttgtaataaataatattttgttcgggctttgtgtagaacaaaatttatctaatgcaattataagaagtcaaatatcaattttgtggctaattattagaaaaatatgtaaaactgattcaagggagaacaatgggatattatgaataaataatggttagatataactatatatatatataggtacatagcccaatgaggaagctgcaaattaatgcttctcgagggagcactagaaaatggaagattaataattaatatatattaagcaataggcatggttttgacggcatttttctaacccaaaagaggagaaaattaggttttaattcaattattcaagaccttgctatgatctaataaaatttgttatgcaatacatatcgactacttataatagaaaagagatccattaattaataccatttgttcaagttcagagaaaagtaaattataagtcaaaaacattaattaatatctactgcaattaatccaaaaattaattttgctgtaaatatgatttatttgaataaaaaaaatcttttctgttgcttattattttttacatatataaaagaagtggtggcctcagtaatattagtccctatatgcaaatatatgtgaaattattgattattattacattgtcacctgcgctttacatatatataactatatatttttcatgtcatgttggggcaacctaaataattgtgcgacttattcattacgagttataaatttattattattattatttggatgaaaattacgagttataaattaaatatttgaattttcaagttattacagtcaaagggcaaatagattatagtttatagtctcattgataatgattttgttagcgagaagtggaaatatcactccaaaacaaaaatacatgcaacgacgacgactatacataacgacgactatacataatttgccaaagtctcttttgtttttttttttttttttttctctaaataaatatcggtataaatttctcacactatcttgaatagttgtatattttgtattatagagagtcaacttgggctcattgttctttgttgggaagtcaaaagtcagaactctaatacaacttttttcgaccttcaaaataagattttaagccacacaattttgtagggtcgtcgactagtttagggcgcatattatgagagatcgtgcttctctaaataagcgttaaaagacatatatgtgctatatatatttatttatatattactctatatatgttgtcaaagtctataactgcgtggtttaaataaacgacactcacatatatttgagtaaaacccatttttgaagaaaaacaaaatatgcaataatgtattgattaataatactattatcttaatcctcatattaattagtgttaactaacaagtaacaacctattgcttagttctcaaatctcaactctcgcattatttaaaaaccaacatacacaatcacgagtagtagtaatctgtaatctacacttggtgtgtggatataataaatatataggcatacagtgatgcaaaagcatgatggtgaccgtgattggcgaatgggtataatagtaaattaaatagtattcttttttgaataagaaaaaagagagaagcggtcaaaaaaacagagaccatgattaaaggaaaggaaacaagtggtgccgacgtgtaacttgttactaattaataaaatctataaatatataattacttattaagttgagacctgaaaagagtaagtccgtgttggaatatattatttgtttagtgtcccatttgcactaatttaaaacgttttgacatttcgtcacaaatcatgtgtaaatacataaactacgacgagagattctctcttttattaaaataaaaagaaaaacaacaataatatttgctgctattctgatctatttcgtaatattgtcgactcaacgttagcatgacatgaatgccaacctacactaactttgtctattttgctttcaaatttgaagaccattatcataagtgtttaatataatacaattatagagcaggaaaccccccagtcacagtactaataataataataaattaaaacaagtcaagactcatgctgatcagtacagagtacagttggtatcatcggtcgtcacagtgagacataaacgtttgatcaaactcacctacttcttagatccaaaatcctttttattttttaataattctaaatgatgaatccccaaaaatgacaagagagctgtctgtggtgtcatgtatacttataaaatagctaaggaagggagtagtgtgcatgcatcatatctcattagattccatatatatttgcattatgtttcgaatagcgtcgaaattcgcatcatcaaggagaatataacaattgaaatcgtaaatggatacgtaaatatatttataattttatataatctgattgagtggaacatgttgtatcatttatgattttttagagaaaaccaagagggcaataaaaagagctctctgaaaattattacattacaaaagtatagacgacaagatacaatcctaaggttaaaaaaaatatatttagtttaaaggtcaatgaatgagcgtttaatatgatcttagaatgggaaggaaaaaggaaaagttcatgactacagtaaaaagtgaacccaggaccaatttgtataattgtgttgtgtggtagcaattccatcccatgcattgagctgtcaatcaaaactaacaagcatatactcagcaaattccacgtggatacatatatatgatacagtaagggaagaaaggaagaaggtgatggtgatgatgatgcctttgttgggtcagtaagtaaagtatatattctgatacattgcatcctggagacagaatgaaatgaattcccccacagaggacctcattggagaataattagtttgaaagaagaagccaaaatcttcgggactggagcagaggagagcataatgttgtaggtgtttcttctcacttcaaaatcaaccaaaaagcaattgacaagctttctgaaagttcccccctttctatacgttttctaagtaagcatgcataaaagccatgatgatgagtcaccgaggagttgaaggtgattgcaatgccttggcgtgttgactctccatttcaagattcatcaaagatttttgcctttgatacctgttcctcttggcatacaatgctgtcaagtagaagtagcatatcagcaattaaaaatttaagtgttagtagaaaggcccaaatagaagcctaatgcctaaaaatagttatgcaagaggcttaaaatgcttcgaaggtttctaca

SEQ ID NO: 25232 - DNA, 3023 bp, Cannabis sativa
atgcccagggccgggcctgattgtggacttggtgaggaactacacggtggacgaggttaagacactcttttatgatttcttagtaccaatgtttcaaagaaaattattttttcatataaaaaaaaacttaaaactattactccctctgagatgaagtgtctagatacaataagtgacttttgacctatatcttgttgcaatataaatgatttataaagtagcactcaaaatcaaccataatcattagacttaataacactcaaaaccaagatgtcttcgttcatgagtgttgtggtataattccttcaaataaaaaggtctccacaattatcatttttgaaaagttgtttctctcgcagttacctagtcccaaaagaagtcttgtggaatgatagtcgtgttcgaaagggagttcccgattgactattatgttcactttgggtccagtctacaggatagctaatccttccctagaaaggagttccagttggctagttatcctcctgaaacggtagtgctggatagtcatctacaacatgccttcatcctatccggaagcgtgtccagggaaggtcctggcccttgagtccagaaactcgttcatgttcttggaggccctggtacttaagctgacgtggagacttcgctcaaatgaggttggttaagttagttgtttttaactaacttaacaacctcgtttcttacagccacctactttacgatcttgatcctaattaagcctataaataccacattttactcaacttttggatacacgattgagatacgagttggagaactctgttcagttgaaattgagagagaaaagattgagagagagagagaggtgcaaagaaaagagagagagtagatgaagaagattcttgagtgtaaagtgtgagagttaaaacactttgtgagggctcaacagagaatcccttctcgactgtattgtacatattcttgctcaatcaataatggaagattacagtggtgttctaaaattggagtagagccataaatcacatcgatctatcggtcttaaacaagtatatatcatggtgttgatttctttttttttctgcctttattgttttcggtttcttatattagaatatttcatttatggaataaaataaagtgatttattttgagagatgaatattttatattcattgaatctggacaaaattaattacgtgatattctatatattgtcagatttcgatatttattacctgatttgatttcttaataattaattgtcaaaatattttgacaattaatgtggtgcagatactgatagagtatctcacctataaatatagggtcttagtccccaagctcttcactcattctgtgcaaacagcaaaattctatctaaagagagttgagagagcgaggaaggccaaattcccataccgaagctatcgtagggattgaagctcaaacatcaatgactggaaatatcttggtcctttcattacatatactatttcaatatatttgtagttattctgcattacatatcgtttatatatgctttattttcatattagattatagtctaacagttagtatcagagcaatttttatctctgtcttgatttatattttcagtttttatatatgtatatatgttcatacaatcggtttaattttgattttatgtccggttgtgactttctttcatttaatcctttgattcatgttattgttaactggagcctatataaatattttatatgcattaaattaattatttttttttatatatgtactcattttcacgttcatatatatacacgtgtatattttacacatatatatttatatatattttacattactttttaaattttattgcatataattgattataataatccattctatatatataccatgtttgtacggtataatgattatatgagactttatatacactaattaatttttattctgggtttgccgaagttcttgctccaattttagttattgttttcttttggtgttttcaattcatatatgcatcaatacattcatattgtattgaagatcatttttaagcatgaaaaactaatttgaaaataaataaatctaaaatcttttggaaaaatactgttcagacttgagattttttatgaatttaaagtctttattttatgtgtttttttatgcgtgaaatctatatgaatgtcttatttttgcatttagaatcatttggaattgatttgggctattttggtcgtcagtattaattacgattgggtttgggtgggtcggatccattggacccatgtggctaaaattgagtcaaatttgacccgaatggaggttgatgaagactcaaaacgacatattgtttctcctgtttgtggcagccttcctttttttaaaaacgacatgtcattttttgcatatagcaaaaaacaacatgacgtttctggcaagatttttccaaaaaaaaaaaaaaaaaaatcgatttttttttaatttttatttatttggaatattatttattttcttaatttgtcttaatttagtcaataaattatatttattcaattttttaaattttttatttaatacatatattaagaatttgaatgttatttagtataaagtaaaagtggaaaaaatttaatttgataatttattacatgacttatttaggcatgtaataattgtgctaattttaattgcgtattttaatatattaccaaatttatgtaatttatgtaatttattctctaaattaataaatgtgagaaatttgccattaattatatatttataaatttgtatttaattaattatcatacaataattacattcatttgtatttatttggtaaatttattattagtacaattaatttagatttgtatgatttaaatgttatacataagttctatatataatgctagatatttttagaaaaatattcaaacattaaaataggttgaatattttatttagcacattaactttcataaaactttataaaattattcataaaa

SEQ ID NO: 25233 - DNA, 1310 bp, Cannabis sativa
  modified_base (1284)..(1284): a, c, t, g, unknown or other
aactagcgctgcaacttaaatcgcaacaaaaaatcgtatagaaatccatattgtaactagggctgcaactcctttagaaatccaaaccgtaatttgaaaaaaaaaaaaaaattaaaaaaaacagtatatgaagtaattctccctaataataatgacgatatatataatcttatataaagtgcaaattatagtgtaaataaattatataattttatttgaaaagtcgacatatcatatttgaacgaaatttgtgaatatttatagcaattagcaagtgtataaattgattagaaaaaagttttgtgtacatatatatatctcaaaatctgaatatagcaaagttagaatgttatccatcctcattaatttaatgttttacgttaagatcaacatcgttttctcattaaattataaggcagggctggagggagacaacccactcgtgacctgaacaaagccacgtttaggttttcactttcagtctcttcttctgattatttatgaaaaataatggctttgacattttgacactaggtaggtttatagctgatgttttgtctttttcttatcatgaaaaaatgacaaatcaagtttgatttaccctaatcaatcaattaatgcattatatcctccctaatttgcaccccattattaacaatacacaacttaagagtaagtaataatttccaaaacaaattattttctaaaaaaaaaaatgctataatactacttaaatctatatacaaatatataaacttgtaattataaataatcttattaacataatccattctcttgggtttcagtgtaagtaacattattttttttcttcaccttccatctttttattgttatttctttttttttttttgccaagtactctagtacataaaggccgtacaaacaaaactagcatgtgatatgtggaaagtggtacatacacacatgggctccaaatgaaatgcaaatcttctactttttttttttaacttgcttgcccatgtggtgatattatgaatgaggagttttgatacggatagagataaataaaatatctatatatctacacaaatatattatgtacataaagaattttaatccacaatatgtttcaacaaaattatacaaaagagaaagatgagttttgctaagatgtccaagaaaaagcaattgcatgacagtacggaattgtgaaataataaatgataacaggataatgatgtgtaaacagaaattgacccatgagagaaacaagtaagtgccatttcaaaaaaaaaaaaaaanaaaaaaaaaggaaaggaaaaaaaaaa

SEQ ID NO: 25234 - DNA, 5607 bp, Cannabis sativa
atggacggaaatgttaaattactatcagaacacgagtattgggggttttaccgcctaaatttaggttttgggggttaagtgaaaccaaaatgaaagttttgggattttgcccccatttacccaataccatatacaatgtattgttttgagtaactcatttatgtcttgtaacttttataagattgctcgttcttgtaataccacgacccatgatgcagctaatggccttcaattaatgtttttttaggttctattgagtgtaactcgctcttatatcacattctctgtagaggccctatgagttaactgtttgatttttagttatttatacgcttctttttttttttaaaaaaaaaaaaaaaagaaacatattagatttttttttggttaaatttatttgtattaaactaaatgtggtatcatttataagctaacaatttgtccagttctttaaaatattcttcattgcaattttttcttagtaaaattgaaagagaattaaaaaataaaattgcaactgtatttttttttaaaaagagtgttcattgataaagtatattaaaccttacggtcattacaaaataagtatgcacgaatagaagaaacatacaagctaccatactatttgtgggtaaaaaagtccacttgaccacattatgggcgacaaagttacaagtttcggggatacaagtaaaaatgcaaccatcaaaacatctagagaactagagaatctcaagtaaaaagaaaaaagaagaatagttctcaatctcccaacaagaagacatgattaagagtattgatcactactcttgagtcgctctccacgatgatgaacttgtgccttttgagctttgccatttcatgtgctaagcaaaacgcgaccacctcgccacaacaagcatctaaaaaaatccaatctagccgtgttaacccaaaccacttcaccagaatggtttctagctaccaccgatgcaagaactttccaaacccagtttaacattacagtttagtttgagccaatcttgaggtggaggctgctaatcctccctctggaccgaggcaacaacaaaaatgagagtaactttcgaatctacataagaatagtggatataatcaatacaatagttcacattatttaagaaattattgtgcaccttttcattcctgatatgcaaaatagtatccactacaatagaagcatagataaagacttcatctacattgatgcccttaattttaaaccctaaatgaacttgaccaatcccacatacggataccagagttagacataggatagataccccacggaaaagatctccaaaggtggaaagcaaagttgcacttaaggaacaaatactccgttgattcctcctccatcccacaaattgggaaatttacatcatccacatggaattccttattgagaatggccctaagaggaatattattatacatgaaactacgtcaaggcaccttatgtctctccatgactctactattccagagcttgttccatagagaaggggcctcctcacaaagatgggctcttctaaaagcttaaataagattggtcaatttgcatgaaaaccgcccactatgttctttggtccaaatctatttatcttttccttgaccagacaggttgccccctttcaaaatagcaaaaatggtgtcattgtccaatatacttgtcaacttctgactgtcccactttctattgacggtcaacaagtcaaccagctagtttaagccatctgcaggacgcccattagatttaggataaaagaatttaccatgagccaatcacagatcctcccaaattctcgtatccttaccattagtcaccactttacacactccttttcttaagaaattattcacttttactacactcttccagaaccaggcatttgagtctttgtatttgcaattaagaagctcattccccttcagagacttggctttcaacatcttaaaacaaagagattgattgtcgtttaacaagttccattcccacttagctaggtaggcttgatttatctcttttgtttttggaaacccaagtccccccttgatttggggaggcaaatcttatcccaagcctttaagtggatcccatggttccctttctcaaaaccccaccaaaagtcccagaccatgctatcaatcatagagacaagatggttagagagctttgtggtttgcatggaatacataggcatcgaaagtcccactgatttgatctgagtagcactccccgcttttggaagcactttttctttccacccttgcaatttcaaggtacttgaaatctgcatctttttgtattgatcgaaaaagaatgagccccaagtatttcacattacctttcagccctccaatccccaacacatctctaatgcccttctttaagtcttatggtgtattgttactgaaaaatattatgttttgagcttattgacctattgaccagaccaagtgcaaaacttcttgaggtagtgccagaatcctttagcttctactagagaggctctcctaaccaagattaaatcatctacaaagaaaatgtgtgatagagtaaggccttcacgggaaagacaaatgcctctgatattaccatttccttgggcctcttcaagaagtctagacagaatcttagccgcccaaattaagaggtaaggggagaaaggatctccttagcaaaggccacacgacggagtaatcatgctaacctgacctccattaaggcacacattcaaagaagtagttgagatacattgtgaaatccagtttctaaacacatctgacgcaccatagcaggatcacaacacatgatcaatgaattgccatctaattttatcataagctttcaccagatcgattttgatagaaaaaaaaccttctgtacccttttcctattgaacgaatgaataatctcttttacgatgacgttattgtcttggatattcatgcatgacacataagtagactaggtagggcagataagtcttggcagaaaagacttaatcttattggcaattatttttgagatcaccttatacgacacattgcaaagagaaatcggcctataatgatgagccctttttgggttctggatcttcggaataagcactaaattagtagcgttcacccccttatgcatagtaccagtggtaaaaaagtctgagactgcccacaaaaatcctcccccaccgaatcctagtaatgcttaaagcaaagaactgacatcccatctggcctaggagctttattgttgcccatgacaaacaaagtttttcgaatctcatcatgattgaagattgtgactagatcctcctgctcatttgcggaaagtttgtcttgaattaaatctgagcagtttagatctagtctcgatccggagtctgagaaaatatccctcaagaatttagtgaattcttttccaatgacactttgtctggtgagccaattgtcattcttatccaagagactttcaatagcgttgcatcttcctctaatagtagtcgaaaaaaagaaaaacttggagcatttatcccattatttgagccaagagacccgagctcgttgtttccaaaaaatttctttcctttctaaagcctcattaagatctctgcggacctcactctccacatccaagtctcttgaaccagcagacagctttttctgatgattccacctacattccaactcttcaatattcacatcaaatttgccatactgagacctatgccaatgaagcagggaacccaagtggcaccaatctttttgaagacccgagtcggggcccaatggtgcacaatagacctccatgcatgggtaaccaccaatttacttctttcatctcgggttcacccttcttcaaatttaaagttccttttaaacttttctatgtcacctctagggaggatacatatgggcctatgatcagaattatatggctttgaaaagcgtacaatagcttttgggaaaaactggagccatccctcatttactaaccccttgtctagagaaaatttaacatgaccctctcctgaacgattattatcccaagtcaatcgatccccatggataggcaaattaatgagaccctaagagttcaccaaatcaaagataatagggatgaattgatcttttccctttgaaccttttctttttgattcattgagcacgaaattagtgtctccaataatcaactatgaccctccaaacctatccccctccttcataagctcagaccaaaaaaacttttttgcgtgaaagtacggcgggccatacacacaagaaaaagcaagggatgagttggagggttcgaatacaccatccctgaaacatgattacaagagcaagagagatattcaaaatcaaactcggatttctaagccagaataataccacatgcagtaccaatagcaggcacagtaatatgaaaataaaagtgaagtttgttcaaaaaaatgtaccagtggagaatcgtcaacttttagctcggtcaaaaaaaaataaaattaggagtagtcgatcaaactagggacttcagttcacgaactatagaggtctgtcccaaccctctacagctccaatccacgactcttatggctcctgtggaggaggtgcaccatcctcctccacagaggtaccaaaatgatccgacacacgagatccaatatttttcaatcagaggcctgctagcagcctcctcccctagatttagcccaacaaaatctcaaaaaaagtctcgcacgacacccgggtgttgtcgaagaattttcaaaggtttagaacacactgatgtggagcctttaacgagctttcttttcttaacagggatagtcctttcattttgttcagaggttggttggactccaatatctcctttaagtttttgaagtttatacaaatctaactcaccaaattgtttaagctcttgaagagctcttgaggttgaaatttttttggctaagatctgaccttcatccacgggatagctcatttcttggcctaggactgagccgtttttctcattaatttcgcccaaatgaactggcccaacattgtcttcattaacctcaaccacgggcacaccagctttggagcttctctcgccaatcgctggcccactagttaatattagtcacattaacttggcccaaaagaggcggcccatttaagtcttttataaccacaacctcgggtccaccctcactaaaatttcagcttatttcttagtaaaaattacaccatatatgggaaaattttaagagcttacttttttatagcataaataaaaaaaagctaagaggttatgagttttttttgttttttttacatttatatgagtttttttatgccatatttttgtaaaaaaagatggaaatcccatatttgtaaacaataataagtttttccagaaaagtcgtcagagaagttatcggcaccggaaaagttactggaaaaatcaccgccgtcggaaaagtcaccgaaaaagtcactggaaaagccatcgtcgtcggaaaagtcactggaaaagtcaccgtcgccggaaaaagttactgaaaaagtcaccagaagtagatgtctcaaatataa

SEQ ID NO: 25235 - DNA, 3786 bp, Cannabis sativa
ctatttaactttctactgctcaggtaggatacattgcagtcggtagctactgtactcaattaatttggctgaacaaaatgcttactgattatggatacccaaaacaaaatctgaccatttttcgtgactgtacaagtgccataaatgcttactgattatggatacccacaacaaactctgaccatttttcgtgactgtacaagtgccataaatatctcttaaaatccagttcatcactctcgaactaagcacatcgacatcaagtattatttcattcgtgatctagttgattcaaatatgttgtcaatatctaatgtgtccacaactaatcaactagtagatttattcactaaagctttagatactcaaacttttactcacttaagaacatgtattggtctctgtaccatctaaactgttcccagtggcatctggtcaaatatttttgtctttgagtaaactttgttcttaaagtcctaacatgagaattttttttttcatttctatgaccttctcctttgatttatttcgtacgatattgatcttgtatcttctccagataaaaggctacctcttccatatgcaatggaaagagctctctttaacccatctactaataagtagtttgctccttctatattagtttttgtagttcaaagaggacggctacatctctggaagagagtgaaagccatgtctgggtaatatagaaaaagccagagtggttcttaataaaaaaaggcatacagaaaaaaaaatgtcaacaacaaaaaaaaaagcaaaagtttgtgtttatttgagggagtggtctagaagatctcttctcttccttgagcacatagggacacttaaaacagagttatggtgtacaaggtcttgtgttgcttggtttgtcattggagtttggtgtgcttatatgatctgttgctcatgttttgcatttttttcgtgctcagtggcttcattcttgttattgaacagatgttggctatcctatttttactaaaagattttgagtatctctaagtttctatttcttatctcagttgacaagtctgggctgttggtttatattgctggcatatttgtaattgttagttcattttgctcacaatacctaatgtctatgtgtttgttttgatttttgtgccaaaacgtgtggtgaaaactgttctatttggacgtgcatatttcattttgcaaagttaatttttttaaataaatatcatttttttcctttgcatggtcaaactttgtcagggtattctctacttaaggcctaagaaaagtgaataggctctttcactttactctcaagaaaccctaatcactgtagtcctcaaatctatctgtctacaatggagaatattactcccatggttgtgtcccctgaaggaattctcattccaccatcaatatctcctgtcgaacctgcagtcgtgactagtctgcccaatccagctcactttccaagtctagagtcatccccgtctccgccattgcctccagtcagtcaaaagcctcagacatttcaaggtaaccccccccccccttttctaaaaacgcttctccttcgtcgtcatacactcagtccaaagagagtcacccgttcctcttcgagtttaaaatctcttgtgtactctgtccagtcttcatcgttgtctaaatcaaacccggcccataggaccacctcgtcctccatataaggtctctataccttcccaaagcaaagaaagggttcagcccaaaagaaaatcatcgcatgatatcacttatcaactacctgtcaaaagtccaagacaaagtctattcttgtcccatctatagacttgtctcccaaacagtcgtccaaaggctcccaaaagaaaaaacctccaaaataccctatctcaactgtcgacccattctctgtttaatgctttgttgatgcctccaaagcatctatgtaccaacgatggtttggtagtcgtgagctatggttcgaacaaatagtgattttagatgactttcctgacctgcatgattttttataaattaggaaatgggttcacattgtctctaggttgtctacacctcatcccatttaattcgtgaattctatgccaatctagataggactgttattgctgagggtcatccaggatgagtgagtgcatttgtcaggggtactcgtattctttttggtccatctactattgcatgcattttgaaagttgagtcggtcaaaatccaacatatgggaatcagttcaatccaaatcaaactatgatgggtagagtgctaacttgtagggatgactatctatgggaaaagcaggaaattttcgctactcatctaactccattctatagggttcttcatcaggttgctttgtacaattggtttcctaattcccatttgaactgagtcacacttgatattggaaagttcttgtatgctttaggaactcatgtatccattgatctgccagctctcatctttgaaaggattctcgaagcctaaaaaaaatggtactcgtaacgaactcccctttccaattctcattcaacaagtgctcatggttgctcaccctcctcttacaactcatgattatcaagttccaaatctcgttgttagtaagagttttttatcagttgttaacaggcagccctcttcaaccactccttctactccaaaaatgagcaaaggcaagtctcctctattcaaagggttatcggactacagtttgaaggtgaaatttttttctgagttttaatcctttgtcaaaagatataagaaggatcaaaagcgccagctttcctttgaggcctccatgtacaaaatggttcgcatcatcaagtctactgtgctgcaacatcattatggggatcctttaactccatgaattgatatatctctcccccagtttcatagagattcgtttggtgcatcctcagatgggtctggtagtaaagcacatgtgcagggggagccgtctgtttctgccccagtctcaagtcgagtgccataggatttgtctcctacagctggcccgtctccagtaaccactacacctaacttggtgtcttctgtgccactttcccagggggagtctgacaaagatgtggagtaatcagctcatgttcaatgaagagggagatgtctatagtctcaagtttttcttttgatatggtttcatggtttgctatgtttatggttgcaaagacattttatagtcctatagttctgtgttactggatatcttttgaagtcattgtctttattttgtttagtttttttgtgatcattgaatataatctgtcaaggaggagattgtaaggttcattgttttgacagattatattaatagggagtccaatcttatctgtggttttaatctgttataactgcataccaattttccgttaaagtccttgtgagtctgttatgttttaactgttaatataaattgttcttaggtcggttgaactattgtctataaatagctagtttcattctgtaaacgggttagctagctaattcataatcttggttagttcagatatatcgtggggtattgtgtgtggtatcttgcattgttcgttgctatttttcaggtctgattgcatagcttgtgatggatatccatagcagaaagatcagagcctggtgttgctgagttcagactgaagggagttcagtgtcatcttcgtcatcagatctgaaaggatttcagattgaagaaaagtgtcgaagaagaacttagctctgttggaagctattttactaggaacttagatctactca

SEQ ID NO: 25236 - DNA, 2516 bp, Cannabis sativa
ttacctattgcgtcacttataaaatgaagcacaaatataagtaagggaaaattgcaaactaaatataaactaattacatatacaaaagataacaaccataaaacttgtttctcagattatgcatgaaaaatctttcaacacaaactattagctaattaactatatcatgtttgaagaaataatgaacctatttttgaaattgacaaatgacaactaaatcaaaatttacaatttagtttggtaacgagaagcattcaatttgaattgacagagacaaacaaaccatacaacatttgataagcaaacaccaaacaaagataagcaaaaattgccattttgttgaactagtttcacctctgcattagccttttaaataagagagcaaatattactcatctgattgtcaatgcatcctgacattaatatatatcctttatattacaacaaaaggaacaataaatatacaacctcttttttcaaattaaactatacaaactctaaaaaaatttcttctcttcttttcaaatatttccagcaattatcactttccacatatgatatgagtaagtcctacttactccaatctagtcattgtaatccatgaaatatttcacaattgacaatattccatatccacacaaagtgagaatataaattttcttagatacacttgtacaaacaacctaaactgaattgaaaatagtctaagcatcataacatacctgtgttgtaggtcttccctttcctgagaagaacccgtcaatcaaaactgcgagtggtgtgagtccctttatagcaatgtacattggaatattaactcccttcaagcttgccaaggcaaatgccacattagcattatagaacaatgacactggaagaagcttcttggcagttgacatctctaatcctttagcttttgtataccctgatcttcgaccagagtatatataagagctgcaatggccaattgctaccccaaaaaaatagagagaaagacagaaattaatcacccttcaactttgaattttcaataaataagtacagtttctgaaaattaaaagattattgtctgtttcattaggtaatacctgcacagtgagaagtgtcaatataaatattgcataagaatggctttgttaataaagaccatggccatggaagcaatcccatatgacaaagcagcaaacaaactatgaaaataaatctaaattacagaaaaataattacaacccaaataataacttacaaatcaataattcccattcaatttcatcaaatcccaattgtaattttaggctttggagttcaccacttaagtcattaatgagaattgataacttttttcattgtgacaaataatcaaacgtctgggccacattgtattttgtgttgttgtttacaacacgtaactatggagggagagttttaccacaagtcatgctttacgtgtaatcatggtggttgcttcctgtcaacatcatcctatgctgctttggatggaattctttactccaagcaccactttgcccagttattcaaggagaagggaagctataatcacctaattaaaacttcttcaatgaagaaaaatggagttctattaaatcaacaaaagcctgagataatagacaaaactaaagctgaagaaggaacagaagtaaacccagatgaggattcagtccaaacataattagagtggatgaataaatagggtcacctatgaaagaaaataaaacgagtaaaaaatgacaaagaaaacttgtattgacttatttctcaccgtagagactatgagacagagtgaggctccatgaaggtggctgccgagaaagggaagatctacttcgttcagtacttaggagacgatggagtgttttgggcaaagggttaccgcgagggtgaatatatatatatattatagcaattaagcataatacaaaaagttacacagaaaaatcacaatccaagtgaagatttagaagaagagttatcgagggtcaaagaaaaagggtaatgtgagggttgtaagggaaagagaagcagagtggttgacggtggaggatcgacaatggagacgaagaggagagcggagcggtcgacgatggaggatcgacaatgggtcgaagaaggcaaatcctcagagcttttttgtcttcaaaacgattgaagacgaatgtgaacagtgggatcgatttgggggtttagggatttagaagttgttcctcgctattttatttctcgtcaattttaaaagctgacaaaacttttactcgattacaattaaccgacgagataagatctccatttttaatttttctttgctttctttgccgtcagttttatttgtagcgtcattttactatacgacgcaaatcaatattttttaatggcgtttagtaagcgacagtcctatcttttgcacactattcacgtcggtcaacgctgtgaatagtagcgttgaccgacgcaaaaactagtttttgtagtagtggtatatagctataaaaatataacta

SEQ ID NO: 25237 - DNA, 3988 bp, Cannabis sativa
  modified_base (3686)..(3689): a, c, t, g, unknown or other
atagaattaactataaataacataactaaaaacttatttattcattaaaataagacaaccaatgtgttattgttaattatataataacacatatgtataactatgaaaatgttttatgtaaaagggtcggatctacgataacactgcttttcttaagccctcataaagtgttatggtatcttttcataagacttttatggtcttattgaaagcagtttttgttgtagtgtgctcacttgaagaagtttaacactatcatgtgagtctcaaataatttgcactgcattttattcccaacctccttaactggagctgcgagtagctggtttgataaatttacccatcactccataacctcctgggaacagctgtccaaggacttcaaaaagcaatttagagacgctagagaccgatgacctgaagcattgtccttaaccaacataaaatagcaaccaggcgagtcacttaaggcttatttaagtcattttagcacggccgctgcaaacatcagaaacctaaatgacaatattcaactcattgcacttcaggcggggatcacaattgacctatccacgtctggaggtgaattatgggatgatgtacagggtcgcccattgaggaacattaatgaattcaatgaaagagcacaagaataatttgtgcataaagaagaagataaaaattaaatgaagctgttgaaaactggctcggagataaacctagcacgagtaaggcaacaacaagtacaatctcaactaaagtggacaatcctagtggctcaaacacaaaaagaaatgatgactcgagagattcaactatggataaaaagaaacagaaaaagaaagcatgacaagtatgtttcgatttatttagtatacaccgagttaaatgaaactagcgagaatatattcctcgcttatgaaaacagggttgcatttcgcaagcttgaacccatgaggcatgcgatacataagcgagattcaacaaaatactatcgattcaacaaagacgtagggcatacaactgaagaatgtcgacaactgaaagatgagatagagagcctgatctcacgaggatatttcagacagtatgtaagacatcaaggaaacgagcctaaccagcctaaccagcataacaacccgaataactagagaatgcaacctcctcctgttgagggcgaggatatactagtcattttaggggagtcacacctcactaaaaatagtaataatgtccagaaaaggtttattaatgaaataaagaatggataatcgacatttgctctagaaccactgaaaaaggcaaaatccaatgaacctccgattatctttttggaggaagatacaaaacatgtacaatacctgtatgttgatcctctcattgtaacagtctagctcaccaataaaaggatgaaaatggtggtggtagacaatgggtgttcagttaacatcctctacaaggacacactaaaagagatgggattagagaatgcgaagttgaaaccttgtatggtaagcttgtgtggatttacgggtgatagtgtcgccagccaaggcatcattgaacttccattgactgtaggagagccacccttatcaacgacgcttatgcaagaatttttagttgttaatctttcatcagtatacaatgtattgatgggttgcccaacactaattggactgcgggcagtaagctcaatcaaacacttgtccgtaaagtttccaacacaggtaggagtaagagtagtctgaggtgaccaattattggctcgagagtgttatcgaatagaacttcagaataggagagccaatcatcaattgatggtaatcttaatagaagaaggcgagaggaaagaagaagatctggatcctagaatccaagacgaaaaatagtcagctcaaacctattaaagagttggaagaagttattttagatccaaataatcccacaaaatttgtatacattgggaaaacatcagaagaaaaactaaaatagcaattaattgattttttaatggaaaaccaggatcaatttgcatggagccactcagatttgatagggataaaccctagtgtaatttgtcatcatttaaacatcgaccccagctatctagtaaaatgacaaaaatggcgaccattagactccgagagacaaagggcacttaaagaagaggttgacaaactgttgacaatgacttgatacgtgaggccttctatccctcgtgaatttcaaacctagctcttgtcccaaaaccaaacgacacttggaggacttgtatagatttttcaaacttgaataaagaatgtcctaaagattgtttcccactgcccaggatcgaccagttagaggatgcgacagcaggacacgagctggtgacttttatggatgcatattctggacatcactaaataaaaatacacgtccctgatcaagagcatacaagctttgtaacaaatatgtgactttactgttataaagtcatgccatttggattaaaaaaatactagagcgacgtaccaacaactggtgaattgcatgtttaagaaccaaatcagacaaaatatcgaagtctacgttgatgacatgctggtaaaatcgataaaaagtaaagatcacacaaaggatctcagggaatgtttttatatactcagaaagtataatatgaagcttaatccaaagaaatgttcttttgggctttccttaggaaaatttctaggcttcatagtaaatgcaagatgaatttaagccaacccagattaaataaaggccctaatcaagatgtcctcaccaacaaagccaaaagaagttcaagatttgatggggagaatggcagcactaaatagattcatctcaaagtcaatatataaatgccttccattttttaatgttttgcaaggcactaagagattttaatggatagaagaatgtgatgaagcttttaaaggcataaagaagcatttgtcaacacccctagttttggccataccaataactggagagactttatacctttatctagttgtctcagagcattccattagtgcggccttagtgcgagaagagggtaaacaccagcaacctatttactatcccagtaaaaggttactgggggcagagtcgagatacccccctcttgaaaaacttgcattatgcctatttcatgcatctcacaaattccgaccatatatctaggcgcatccaattagggcccatttggtacgtaggactggactgaaaatgattggactggattggacaagattggattatgctgaaagtaatcatgtgtttggtttaagaatagactggactattttatttatttccttttagaaaaaaaaaacttaaattaaaaaatatatataatattaaattaaaattaaaatatataataataaataaaaaataattaaattataaaataaaataaaataatatatcctatataatgaattatatatcacaaatatataataaaatagtttatcatattttttatttaataaataattaaaatattaaaataaaaatactagaataatataaaattaattatgttaaacacttatttaatataaatattaaattttaaaaatatttctataaattttctagtaatttaaaaatcatatataattttattgtcatattgtttctcttagaatcaatttaagtaactattgttnnnntaataatattttaaattttgaaaacttatgtataataatttaaaatcatacattttcactaattttaatgaataagttttttataaaaaaaattataataaatgtgtgataattctttcaattaaattttcattaagtttaaaatatattaataaaattaaaatttaaaaaacaataaaaaaatctcacttgtatgcgattatttatcccaccctgctggatgggataaataatcccagacatatgagattagctggattagttatccaaacttctaacatgcccaaacactggattgg

SEQ ID NO: 25238 - DNA, 6968 bp, Cannabis sativa
atatataaatcacatcacacccactagatgatatgatgtaccacaaagctaaatgggggaacacccttttcctaaaaaaataaaatcaatgaaagaaaatgaatattagagagactattccaaaatattgggtggaaactggaaagtagagtaccatatgtctagatttgtttcaatctgataagactgaccccaatattttcttctttctcttttttgagaggtcactcatgtttatgtttatcatggaaatggaatgtaaaaaaatgatttaattaataacaaaaatgtccttaagaaaaatgctaacaagtataataaatagaataacccaacaagtactttttttttttttcatttgccatcaactaccaaaaatttccttacacatgatgaatgaagaaatgaagctgtacaaatctgcagattgcaaacaagcaagaatataatgcaaaaactaaagaaagggatgaacaaaagaaagaaacaaataatctaaacatgtgtcttattggaaagaatgtggggggagcctgatcttatgagatatggcattgacaatagaaactttctgtttttttgttttcttttcttgctgtagaaactgttatgtgtagaggagcatggtgtttagaaagctgaagcttttccatatagagtggacaaagaaaagcaacctgagggtgaattcggttttgtgctatgaagttccgaacatggctcgggagagactaagtcagaagagcctgagacattagaacattcccaagtggtgggagcaccagaattgattgataaggagatattgtagaggcagatggaagtgaagggagattcttgaatcccattaaaaattccagcaacactgatctttttgccaaccacattctgcaaactgatgtgatctaaaactgggatggcggttggatcatacttgtcgtcaggatgggaaccacattgtcccgaggcactaaacgccacgaaaacatttttaatcacaacatctgatatggtgatctgtttgatataaccccctctaccctttgttgttctaaattcaactccactatgtgaattgtacaagtggacctgctccacaagcacatttgatatgccaccagacatttcactaccaaatgcaagagaagaaccagaagatgattgcaaatcgacccgtctgatgtgaacattttttgttggtctgccataggcaatgccatattcatcccaaccacttttgagtgaaatggcatcataacccgaggttattgtgcagtcctcaatacaaacaccatcagatgaatctgaaaaatgcaaaattcagagttcaaatttgttctatagaattggatacatattgttcataacataactataccaccattaaaagaatcaagtgtgagttcatgaatagagtcaatcaagagatcataacattacctgggacaataccattagtgtgaggagagtctaaagggatggagactgaaatattgtgaacatgtacattactgcattcaatcaatgaaatggtacataaatatttaaattaacttccaaataaattgagtgaaattttagagaattagagtgaataacttaatgcctcagtttaacaaacctgcaatatactggatgaatgccataagcaggagcattcacaaatgaaagatttgatacaactacagattgagaatcaacgaattcgacaagatgagggcggctatactttaaagaatgagaattgaaccagtcccaccaaactgagccctggccatctatggttccattatcacctagtaaagttaataacaaaacagaaagggaattagtcttgcctaacacaaaaaaaatagaattacaataaaaactttgattgaacagacaaatacacacctgttatcaccacatcttttacattgtatccattgatcaagctgcgatatcttgacccgggaatttcaatacctctaccatatgatggtaaaggatcaacaacttcccaatgactagggtcctaaacaaacaggaatgcaaattgtgtataagaaatgattcataaacatcttatatcaaatcacaagtactttttctttttggtacaaaacaagtggtagtagtagtagtaggagtacctgagatccaagaatgatagcccctttctccaaaaacaaggtgagatggcttgtaagactaaaacttccagtgagccacctacccgggggcacatagagctgggcgccgcccttatcggcgaaagacttgagataaaagatagcattttgaaaggcaatggtgttcaatgttttaccatctccaacagcaccaaactcagaaatggatacactgtgtggtcttggttgtaaagtttgcttattgtaattacattgtccatggctctcatctccattgattttaacagcattgctcaatgccagcagcaagagcaataccacctgaaaagagggcataaaagacagaattaaggccattgattctgtgaacaacttacacaaatatgattctaatcatttcattgttttgtaaataagtacagacaatacaagagcaaatgacagaacatcataatatgaagaaaaaaaaaggaaataaacaaataaggataggaatcggaataaatcattcagaattgggaagaatatgaaacttaagattcttagaaagccagaaggaaaagaggaaaaaaaaaaatccatgctttattattttaccaaataatgccatctatattcctatgaaatcatttgaaagtgaccccaaaacataagcaaaattggattcaccatttgagcaagctattgatgataaacagaagcctaaagaaaaatgtccaaatcaaccaaaataagcctcaataagaaaaaatcccaggcacccatttggacaaacaaagaaacaaatctgaaaaaaccaaagaaaaataaatgaaatccagataactatggtctggcatcctaaaattggtaaatgagaaagctttaaactaaacaacccagaaaaatgaaaataaaaagaaacgtacttactagcatcttcttgggtcaaagccactgcaacagtggccaaagagactaaaacagtcactggttgtgatgcccaaagaccaaactggttcagagaagaaggacaaggagaagcagaggaacccaagaaaaaaaaaaacaaagaaaaaaaaaaggaaaaaaaaaaaagaaaaagaaaaaaaaaacacagaacttttgtgtaagtatgtgagttatgggcattaattatataaatgcctcaaacgtaaatagttatatattactagtaagaaaaatacaaaagaaaattatagaattgccactatggaaaattaaaaataaataaataaataaataatgacagctttccatatgcaccaaaattgttataaagaaaaaaaaaagtccagagagtatattaagccattaaaataataaaaatatattaatagaatattagttgccgctaatcactaattaccctttatgcatatatgattaataacgtctctcgccgacacaattgtttaaaacggccacccatttaggagaaagagaagagagagaaactgtctattaaattttcaggaacagtgttgtaatgtttttgtttggttacgttttttatttttattgttattaattttactattagtcctaatattctatttcttttatagtttagtccttccaatctttattcttacaattatatatcccaattaataatttatattttcttgtcatatttaatttatatatattgaattcttttatggataaatatcatttattaattggacttcatgttttattaaatgataaaataaactctgtattttttaaaatggtaaaaataggacgctgagcttaatttttgataatttttttaatataaaaaatttgaagacaattcttaacacgaatagatacacaaaatataaacaactttgtcataacacctctagatcatattattattaaattttattttgataaaaaatcaattagtatcctatttgtaatatttttgaaaatacaatgtttattttatcatttaataaaacaaatagtttaattagtaacttttgcaaaacacaaggtacaaaatagtatttacccttttttataccaaagaattgaaaaaaattcacaccattccacatcacattccactttaaaaatcttataaagagatggtacaattagtaacttttgtaaactatagagttaaatagtatttacccttcttttataccaaagaactgaagaaaaaaaaatcacaccatttcacatttcaccttaaaaaatttatggaattttcctttttaaaattaaataaataaatctatttgaaatacccatttttttttcaatttttatattttaatatacaatttattttttttttacattttgtcaaattttttaagaattttaattaagttttaccgctagtttttttctaaaaaagagggcatgcatgccaataaaaagttttatgatttttgctctatgaactatgacatatgcattattctgtcctctgaactttttagtccatcacaaataatttttgaactattcatagtattataaattagtcattctatcaaattttgtcacacatgacaaataaaatgtcaattgctacaacagccacatgtataatttagtattaaaaaatttaaaaattatgtatttttaaaaaatcattaaactaaaaataaattaatgattaagaaaattatgtacaacttaattaaaaaataaattatattttttcaaattaattacacatgtagtgttaacatggtactggcgtggcaactagctaagcagccgtgtcattattttgtttgtcacgtgtgacaaaatttgatagaatgatcaatttacaatattgtgaatagtttatggaccatttttaacgggttgaaaaatttaagaagtacaataatacataggttataattcggggcaaaaatcctaaataacctttattaaatgtagattaaagaaacttttacatatatacaaaaaatttggaaaaaaaaatacaaaaatacattaacataaagaaaatttcatctttacagtttgaattttttttttacaacaatacgttcttcagtaaaatcaataattgttcgatattcttttttgattattttatagtttatttatagtcgatttataattgtcacgatattgattttctcattattttttatttgttttatagtttttgtgaggttaaatttttttgttttttttttaagttgttttcttaacttttattttttgctaaggtgtcgtttagtaacacttttattttttaattttttaatcataaaatgaaagtaaaaattttatttttaaaattttgtttttgaaaaagaaaaatgcgttcttttaaccatttttattttttaattttaaaaacaaaaaataaaaaggtgtcctataaagaatgacctacaaattgcatttatgtgtggattgagattaaaatagatttttatcaaagtaatccttcttgcaaaagataaattcgtcgtactccatcttcgagtcatggctgccattttatcaatcaacatgtcacgtattgacttgtaatccccatgacagaacaaaaaagcatcatccttaaaaactcatatgattcaattccaagtctccacatctcttatggaacttaaactcatctagcttcctatttttttttttttattatatgagataagtattacatgcctaaaacaaataatagaggggacattagtcgccatatctcaaaccctgattagattcaaaaaaaacatgcgattcaccattaaacattagtaaaaattagggagttctaatatagttcatgatcgacctgataaaggaacatgggaattagaaagcttctaacatctcctctaagaaatttcattcaacagtatcataagcttttcttaattccaacttaatcatacaactaggtcgacaactattccttccataatggcgcacagggtcatgacaaattataatattatgagcaatgaacctgctatatatgattccaccttgattttgagctattaaactagaaagaatattcttgagtctctatcatatcaattttgtagctaccttataaaccacattgcagtatgtaattggcctataatctccttaggcatgagagtatggactcttgaattgatctctttcaaaaaatttacaaaatgtggttgtatttgacatcttctaattaacttgcaagtttcaacacatttttgaaaggcattcgagtttccaagccataacttcattccaatactctcttccttgtttaaaatattgttaaaatcccctaatactaaccacaggacacgagtattacaatcaaccaagtattttcagaagcctaaccttccatcgcatctcttttattaaatggtttgactaataagtgaattaattggctagaacatttaataataatagagattgtaaacattataccatgcattattaaaaagaaataccaacttgagaactttaaaattgtatttttgaaaaattaattttgtaaaactgtaaataaaaaatttagactgtaaatgtattgtaaataagacataaaaaatatatatttacgaaaaactcttaaattaattaatgatttattaccaccacaaaaaaatatactaaattaaagtataacaattgagaaaaatagatatttttccactaatatcctttaacaaaatataaatcatgataacaatttgattttaatttttcataatgaaattatttttacatgtttcgtagtaaagatttatgaggagtctcaactaaaattacaatctcataagtcttaaactccccaaaataattaaaactatagaatatttacaaaatattctcattatgaaaaataca

SEQ ID NO: 25239 - DNA, 2213 bp, Cannabis sativa
ttttcataattcgcttcaggttcttgtggaggaaaaatgcatcatttgctatatctaaacattataaacgctttgatgtatttgttgaagctgaggcaaataaagctgctggaaaatacgataatgcatctatagactttcaggttgatttctacagaaaggagggtttgaccccatacaccgaggaaaagcttcccataacaagtggttggtgctgcttcttttgtcttccttttagtgctaattttgtgaatgtttgttagattaagctctgatttatttgtggtatgcagatgttcctgaaggatgtgttataataagggagcatattcctataagcaatctatttacttgtctttggttcaacgaagttgatcgatttacttccagggatcaaattagtttttccactgtcagggacaagatcaaggcaaaaacaaattacactatcaacatgttcctggactgcgagaggcgcaactttgttgtgcaggtaattactttgcataaatgaatctttcgtttgaaaatttatatttttatgcaactaagttgagcactgacatttgtacaagtccagtctaatttcttgaatttatatcacaatataaaccttattatataagctcaatttctttcataacattctgttgtgttatatgaggttgtctttcccaaacttagtgattcgattattcatgcctcttcgatttatagttaaaagtccaacctggaatagtggtttgacatttttattttcttcttgtagaaatatcatagagaggtcatggagcagctattggctgctcattcacctcctccaccaacaccagtactgccaccgccaccgccaccgccaccaacactgccaccgccaccaccgcctactccaatcaatgaaccaccaatgtcattattcgaaacaccctcacaaaatgaaaatgttgtaaatgcaccagttcgaagggtcacaacacggcgtgggagagataggaggtctggctccagacggcacaggaaagtttctgccggtggtggtggtgggggcagtagagaaatcacttcaagtttaagaaaataaaaggaagttttgttcaagcaaattacattgattattttttttaattacctctcctgattggaaatcattctttttggaggggaaggggggttgtggaggatttatgcagaggtgagagtgagtgagtgagtaaatgatgctaattttgcttccacatgagaacatgtgttctctcattcttttctctctctctttttttttttcttttcttttagaaatttgtcattttttcatgtatatattaagttataattttcctgataataattaataataatttataacatgggtcactaccaaatgtttgtttcatgtggtggcccattttgttgatcttcataccatgatataccatctattattgtattgggacaaggaaccaaacttataaagctatctatctattttcctctgcattttcatttactttacaaaattttctagtgattcatttttcttttctcttcccctaatttgagatatatgtttcattttttttattattattatttataaggtattattgtatgggttttttttttttttttttgagtgtctaaaaacataggttggatgtggaagaagtaaaatagtaaatgaagtgttatgacttatttgggtatgcttaacctttacattggcccacctcttaggtagctgtcgacttgaacaaaattaataaattttcatttattgacttgaagtattcagtactattttgtcccattttttgttttttattttagtttcctactattagtattaatccctaaattataatataatactgtttatacatttgtaagcaaatagaagttcaataattaaattataaaaattaaacagatagttgatgctatttttcatacaccttagaaattatttaacttttaacaaaaaccagtattaatagcatgagcaattataatttgatttattcctaatatttaaattatatcagtaaaaccatgtgggcatttggtctagtggtatgattctcgctttgggtgcgagaggtcccgagttcgattctcggaatgccccttttttcctccctaatatctttttcctctctcttttcaactacagaaaaagaacaataataaaactcaaatattgttctaagttataa

SEQ ID NO: 25240 - DNA, 2577 bp, Cannabis sativa
gagtgttggaatcgagagattcaatttgcaatttttcaagggagttggaaatatgttcttgagtggtttgctcaaggtttagatatgtaatcgtctgagggaaaacaaggtggtcctttgtttaaggagttgattgttggatgtacaactaaagtctcacattagctataaaagagaaggatcttgagtatttaaggatgaatactatctccattagaatgagacattttaagaaaatgcccaaaaataaatccatgagggcttaattaggctcaaagcggattaatatcattaccaaatatcgatgtggagataaatggtgttcgaaggtcctaacaaaatatatatcattatgtaaaatactaaagttattataatgaacattttgaccattgaccgctaagacaaaaaaaatatagggcactcatagtgtctagcactttattaatgtgtaatattattattagtataatttaatatttggttccacatattttactttagtaaaaattataaaaaactatttatcaattacaaaatgttactttataatagtgctggacaccttaatgctctcagatcaatgttttaaatttaatggtctaacaagataagattgatagctaatagctagtaattttttctaataatttatttgtctttttttaatttgtggccacgataattttaatatgtttctatatatatcaataataatcaatatagtatcatttaaaatatatatgtcactattcaaaattataatgtatctcaaaagatttgaaaatttgcaacatgtagagtaggccaatcaatcaattatacacaaaacttaacagcagaaacaagtggttactagagtgtttacaaaataaattatacttttttttttttttttcagatcaaaaatttataaaaaaaattacaaaaatatgttaacacgattttttttattattttaacggtttaaatttttttatttataataatatgaacttcattaactgtttcatgaaattcttttttgattgttctataatttatttatagttatcattagattgatttttttttgttgatttttagttgatttatagttattttaaggttgatttttgttaatttttttttaactttttgttgagaaaattgtatttttataattttgaaacttaaaatcatacttttataaataataattttaagtagtaaaattataaataaaatataaaaaaaatatttttgaaaaatcccaggtaaattatgagtattattttatattcctctcaattaataaattaaagtctgttatattggtttaataaaaatctacacgagtaattttatattttcattaaaaaaaattgctaaaatattattaatttttgtctcgtcttctatttaaatagtctttctttttattttaaatagaataattattctactaaaataataaaaaaaattattatattgaaattacattttaatattttaaaaaaacaaaataataaaataaaatttgtttccttcctattttattttattttattaccttcaactaaatgcaaactaagaacaaaagtatagatgtttcatggtgtaatttagtatctataacatgtttagctcgagagatataatatttttcattaatttgaaattcatttttaatttaatattatcatttaatagtatgttcattgtttccatttcaaaaaaaaaaaaaaaatagtatgttcattgcattttatatatttattatgttataggtgtgttttaactttactcaattaagatccaatgatttctataagataaattttaattattaatgcaatttcttaaaattataattttcatgtctttcgtaaaaatttgttactaatttatttttatttatataatttctaaatactcttttcatatgataaaaaaaagcaagatgagtgcttttataacttctggctttaaagcttttttgtcaagttttcttaaagcaactttgtatgaccttaagataaaaaaaatattattatttggaaatagatccttcttttttcctgttttgaggccttttcatattttcaatccacttcactaaaactaacagaaaaataaaaataagatttttttttgcttaactataaaaagggattacgtggtccaaatttatactccacctctttagtagctttgacaatctcaaaccacgtgtcagttataggagtcttatacctcaaactgttttaattaggtcattggtatacacctcataatagtttctatcacattaagatggcaccgccataacaaacttgtaacgtcccgcttcaagcctccattgggccttactccatggacttatggttcttatacatgggtacgttactttggctacttcctagaatgatgactgaccctacaaatcaacacgagtatttttagcatgctttgacctcctgggaaggttttttaggaaacgtgtgagtgaggacaaagcacgcttcctgaaaaaacttcctaagaagtcactcatcctgaaattatcccagttcaagcacgcttaactgtggactt

SEQ ID NO: 25241 - DNA, 2734 bp, Cannabis sativa
  modified_base (2663)..(2670): a, c, t, g, unknown or other
acaatacttgttgtgactaaaactaaattagtgacaacttgcatctaattattatgttttaatcacaagttactttttgttgtgactaaaagtcaaatttaatgacaaaaaatttatgttatgactaaaaaattattacttaagattgctattctattgtagtttagagatgaatttttatttaattattttaaaatttaatattttctcatgaattaaattacttattaaaaagaaatataaatttaaaattttaatttataaaagaaattaaagtcaataaaataaaagatactaaacaaaaaatgtgtttattttccgataaacatacgccacttcttcactatctcctcacaattttgtggtttttttgtttgaagatactccaccacttgtatgtctagattttgaattgcaccataaactacctcaaatttattcttaaatactacaaaactctgtagagactttaattttctgattgtcttggtcatagaatcgagaagcctttcgattctaaggcgacgagtagttattgaaggacgactatagggataaagaccgacgaataagttttggtgattgccccatattatgttaatatgttctatcagcataggcggaatttgtgatagtagtatatgatcatgatcatgatcatcacccagtacttttccaaatccaatattcatcaaatcatttatcttttcttttatgagatcaagtgatgtttgactttttgaagcgatatcattattatagtttgatgaataattgaaaatattatggaggcaccaaatttgatctatgatcaaactaagaacttcatctgaaactgtagtaattacgtttgatgatgataatagttgacaattaattggaggagaattatgaaaaggagatattagccgattgaattgtgcttctttcagtacgtgaaggaatttactaatgataactcctttataaaaatagtaacatcctatttgcttaaccctagattccaccctttcaattagtaacttgtacaactcatttccttggtagtggttgtcgtcatcatcttgttgcctcttttcaatctcaaacatcatcatcaaccacaacaatttaaccaaaagatgggagacttccttaccgtgttgtcgtaaccaatcttgaatatttctgtgtcttctctttgcttttacgatcaatttcatcctcttaaccatcttcgtttgtaaacaatgtataaaagatgcattgttcctaaaataactttctttttcttcatcaaataatactaatctttgcttggcttttatttcctcaaaccaacccgataccactctcaagtacttaaccctaaaatcatgtacaagttcttcttctatttcttttccgcccataacataattttttagattattgatctcctcctccatgcattccactaacttcttcaatctttctttatcattcgcattgatgaaagctaccctagggaatctcaaactttccatctccgtctctcccttaatatggtactattagtcttactgcttccttttatagtagataaaaatattgttttttttaacctaattaatcatacttgaattagaagacaaataaaatatctacaaaaatatatatatgtattagatttaaaaaagttagcatttttggtaaatatcaagttttatacttataaaactttgttatattttttcaggtaacgtttatttttaaaagtcaatagtaatattgtttataagctaataatacttgaattatctgtagtttattaaatatatttcctttacatttttaaattttatattagtttttttttttttttaaataattgaccttttataattattcaggtaaacaaaatatctacaaaatatatttgtattagattttaaaaacttaaccttttcgcccgttattcaaaaaaaaaaaaaaaacattattattttttcacgtaattttgttttctctactattcagttattgttagtcttactataattagggctatatatatctactagtaaacaacccgcactttaagaaattttaaattatatatataaaaaataaattatattttttatttaatcataattaagtaataaattgtatcaaattttaatatgatttttcatataattttgtatgaaaaattaagtgtgtatagacacaccgatccaactcatatttatattttttattataatattattttattaatataagaaaaatatttacttcataaataaatttttaatttttaattattaaaaagtataaaaaaaggagaatgtcgtggtataccgtacccactattagtagtggaacactgtagactcctatcaaaataggataaattttaaggctcgattagagtattttgtaaggaaaattataatatatatatatatcttgatcagcatataaaaatttacaataatgcaagatatgtcatgagaatgaaaacttatacctggtagaataatttattagggtaagatataattggagaatgatctaatttctagatttagtttacaaaaccataatttatatttataataaaaatctataatgctacttaaaaaagattacggtttatatacatatacagtttttaatatactagatgagagttacgnnnnnnnncacgtaaatattagttttatataagttctagtggtttttgtttaagaattcagtaactaagcaa

SEQ ID NO: 25242 - DNA, 1637 bp, Cannabis sativa
tgtcttcttctcctatttcttttgtttcttactgatgtgtttatctattttatgtatgtgattttttgggtttgaatcggtttgggaagggttttttgttcatcgttctgagttgtgttcttcgtgttcttcagagaagaaccacgaagaaggtggctcgatttagggggtctggtgtgaactgggctagggagatttatgggttgtgattaattcttggctggtgttcttcatgttcttcagagaagaacattgaagaaagaggactcggctagggaggctgctctagagttcatttagatgctgagtttgtgtttgagaagataaagaatatacatatggtctgatgcaatttagggttccaaatttaaattaaaacaacctgcagtttgggtaaataggagctatcgtttagggagtcaaacaggggtctttgactggggtaaaaggtatgatttgaccttgggttttcattgatacttttttgttgtgtgtagggcattttaggaataaaattcctataatactcttgaaagattaaagcaataagagtgggacgtgaatagggtgtaatattagctacaatattccgataaaaattctaagcataattgacaaacataatccataaccatattccatatctatatctatatccatatccataatcatattccatattcatattctatatacatataccatattcatatccataatcatactccatatcatatccgtaatcatattccaaatcatatcaataatcatattccatatgcatataacatattaataacaatgtttaatcaacaaagtgacaacatatacggttcctaggcaatagataaaattattcctattgccaagagtgtaacgagatagacaaaccttatgaaacatgcacataggaggctccaggcctgattttagaggtatcgcatacatactcagtcatatcataaagagacttacatgtgtgttgaacccgtctcaacccaccatatccccttaacctgaataataatttatcatatatctcacgtgttgtcgtactgtgggtaccgcataagtgttagaattattatactggactaataggtttaattccataatacgaaatcattaactatgtgcctaatattactaataaccatattggaatggttaacaacttaactatgtgttagaggcacataggagcacccttaatattatagttggcccattaaattatagtttaccattattgaaccacttaagcccaattagtatataacccgttagggttataagggtatgagagatatatatatatatatgtcttatgtgaagaagtggttgtgtgtgggttaatggtaatgagtgaaagaggggttagctccacaaagtattctctaggcttttgctcaatgttagggatcttggtggtgatttctttgaaaatattgaaggataatcactctcatggatggtatgggaggtatgtgtattttatttttgatgctctaaataaatactagattttgggtttaatgattatgaataattgtttttgaacaattggtatcaagagtcaaagttattgattttagggctcaatattttttcccataaacccatttttaaaatctaaa

SEQ ID NO: 25243 - DNA, 1750 bp, Cannabis sativa
taaaaactcaaacaataaatttaaaaaacagtatatggagtaattcctttaagtattatgtgtaattaaaaaataattaatctagcttttggtggtttacataggaaaacccacaataaatgtcagtggtagtgtgacagttacaacatgccaacattgccggtggcacaaattatggtattacatataattaattaatttagtatacatgtaattgagattgttacctactcttatcttcattgtatgtatatagtttacttattattataatggttcatgaagaccagggcgatgagatctattatctattatcatctctcattattataaatcacaaaacaaccattattgatctcttttaatttcttgttccttttggatatggattttattcacaatttcttgaatttatttctgcccactatttcagttattgctattattttatttctaccaccttttctgttctacaagttattcaagtccttcttcatcaaaatatttattccaacccaaaacttggctggaaaagtcgtcctcatcacaggtgcctcctcaggaatcggtgaggtgaggtttgtctatatatctaatgtgtatatatatcatcatttttaattaaaatatatataatttaaaaattaaactattttaaatcatctattagaaatattccgaaaattatattatatttattaggctaaatagtgagtacctaaaattttaaatttatacatgtcataaatttaaagtttatttttagtagcacaagtatcaataaaatttaaattctagatcattggatctagacagaaacatgtagtattaattactttcaaattttcttttaataaattgaaaatggaatctatagtacttacaattttacaaacattgagtttataccacttacaaacttaaacctttcgatacttccactacaaaatttttgactaaaaataaaaaagttgtgactaattataaatcatcattcttatattgtgactaaaaggtccgtaactaaaaatattacaatttgttgtgactaaatgtgtttttaatcacaatatttattgtgactaaaaaattaaattagtgacaacttgtaactaaatgatatattttagtcacaagtatattttattgtgactaaaagttaaatttaataaaaaaaaatttatgttgtgttactctaattatactgctatttttttgtagtgttatactgctatttactctaattattattagtaacttgagcttagttttctttttataatggtagtacactttttctcaacaaaataatgaaataaaatgcatgttacttttcttcttttatatatccaagaacttggcttatgagtatgcaaggaggggagccaatttggccctggcagccagaagagagaataggctcaagagggtggccgatgaagctatccggctaggatcgccggacgcaattgtgatccgagcagatgttaaggaaattgaagattgtaaagcacttgttgaagatacagtgaaccactttggacaatgtatgagtaattacttaccttcaaacaacttttttttcctcaagaaaaatgatatttttctaatacatgtattgtatccacattgactatttctcaattgtttgttattttcttattatgggacatatgcatttatgtgtgatagtggattatttggtaaataatgctggagttgtacaactgagcctgtttgaagattccac

SEQ ID NO: 25244 - DNA, 8647 bp, Cannabis sativa
acgacaagtgggtgttcacttgacttatatattttgacacttgacttaaatgataagtctggactgacatgtagcctaagtagcaagattgtaaaacaacgtaatgggttcgccatatttttggtagctgggcaattgatttccacgagtctcttaatgcgaaccttttcctactcttgtgtgaggagtgcgtcccatttgggcaatgttttaaatcattgtaacatagccattggatgttggtaagcagtcctgaggtcaggccattggatatagctacggacggatttttcaaagccctatcgtgtgtattttgaccacaatagtgtatgaactggcgagatatcagtagaggtcaattatcttttttggcgtgaatatgctacttttcatgtgtaagagtttggcaaaagggtagtctgggtagaagctaaattctttagatatagtcttgccatatcccctcacgagagtggaatggacttctagggctctttggattgctttaacccttgggtttttttcttttgacaattgttttgacatcactgggaaatgtagggatgataagagataggttggtcatgtagatcaataggattggattctcagtgtgtgggttgatcatatttataaaggattttctggctaggagaggaaatcaaaaatcacatttgtgttttcccattatgtatttgatttcgaacgtgtaacgtgagaaccacatggctaatcttagcaattgagcattgactgctttgttctatttgaacgtgagcatcccttgaaatgtggtaaaatctattttttctactaggaaattgtgtccgatgaggtggaactcgaatttcatgataccgatttttactgctagtatttctttaagtatggaatggtagtgtagttggaaatctttaaaagccccacttttgtaaccgcacactttgcattttccacgatcgttttcttctagtagaactgatccccagtgtttctcacttgcaaccatatgtaagattctttttctgtcagagggaatctgaaggggttaggccttgcattacctctttcagttttttgattgcagctgtttgttcttgtccccaaggcaaatattcttttttgagcatttttgataatgggcttgtgatcttggataagtggggtacaaaatcccttaggtgatttacgattttgagtaattgttggatttgggtttttgtgaggccttcatttagaaattttaacagctcttgagttatgtgttcttgggcctcatactttccattgttaagttttattccaaggaattcaatttttggccaaccaataaccatcttcttttcagagagcatgatctcatatttttcagtgatatctgcgaattgggccaggaggattgtatgggccttgttattgggtgagaacaacagtatatcattgatgtagattagggcttggtttagtagtgaactataaattttactctcttgaacatggatggcataattttgagtccaaagtgcattattgtccattgaaaatgatgatttcggatgcacaatgtcgtattgagtctgtcttctttttagatgcccagttgccaaaaacccacttttagatcaaactttaaaaatatctttgctttagagatgttagagataagagaattcctgtttggtggaggaaatttatcatctgccaaaaaatggtttagtggttgataattgattacctacctttgttttcctctagtttgctctgccctgttgttgacataaaaggtgtgacacgcccatggcgattcagtgtcttcaattagcccttgtgattgaagttgctgacaatcttcgctcgacattcgttgatgttccaaattcattatggggtggcttgctttggttggattaacatcctcatttggtttgaatggtagagagatgtagaattctttattttttcataatgagagattgcactttgttgagaattctaaacgagaatttgtacatgacctctgaattagcttttctttgattagtgaaaataagtcttgcgccatgtgaaagtaattcaggatttgctctcattgggtgaagaaattcttataggccaacccttgtggcagtattctaagccctttcttttttgtgtaaaggtcgaatcccactatgaggtcctttcctagaagttttgatccaatgactttgtgaacaacggaacatccagggaagaatcgtagctttattggcttactgattaattcggtgtggagtacttggttatttgtgacttggaaatactacttccttttcttctacagttctggggataagatgttggggttcatgattgagtatgatgctcacgtataaaataatacagctacttttattggccttgagtattttgttaggatgacatgcatttttttgctatcaggatcggttgaccagtggtgattgtatccatgttgaaaagtctggcatagatttcatcgtcggaattggaactcagctgtaatacgcacatagtagtggggatatttcgtcttcgattgaaaagactgactcaacatcatcatcggggagtgatacccccgcgtcatcctctatgtgtgttatcattttggcggttttaccttttgggcattgttttgcaaagtggccctttttccacacaagaaacatcgatttgaggattttctaggatttttatttttttcaaaggaatttccaaggagtcctattctttggagatctatacttgaagatttttctcttcttgcccttctgttttgagcatgatcatgtgtctttggttgaacatttgattgtaagacctttttggctgcatgctttgtcgagttgttttgtttacttcatgtattcttgtaaatatttgttttgagagcacatcttttctaaggctctcatcaccatttggaataattctccaaaaaatgtgttctgcatcgtcttgttgtttgcagaaaagagtctgaatgtttcttctcctagtagttttggtgttgacgccaagaatgcctgtttgaggtttggatcattgacaccactaatttgataaaaccgcttagtcattctttgaaagtgtaattctaaatcctcttttttcattgaacaacattttattttgaaaagttcaaccctgaaacattcgacaacttgagagtcttgaccacaaaatttgacgtacaagttatttagtgctacttcaatggattctgcttatagaaattgaagctgtctgtattctccaaggctttgccatcaatcttgtaagattctgatgaatcttgatacaaactatagcaagatgtctcgtatttttaccctcagttttgtgcttctaaaagggtccatgctttggattcttagaaatgagatctccattgatttgggggaagatcgccaagtatgaatgtgttgagtttgccactaaattggtgtttagtggatgtaaacaactcttctgaagacaattcttctatgattagttctgttacgtcagaattttgttccctttctactctcgagactgctattgtatgattagttgtcatgaattgagacggaattgcttcatcatcactgttgctttagtcattagtttcccagtcatcagattggctggacgatgatgacagatcgtcgtcgtctgagttttctaattcttcattgagattgatctgtgggagattattcagacggtgctgatggatgatgtttgtaatgtcatttctctttttgaccatgagttgagtactgcattggccttgattttcttgtttcttttttcttttaagttgatcttcttcatctagggttctttttagacgaagaatttaatctctcatttttggtagatactaatggttgcgcaaattttggtaatgttaaaactatccatggtgtagagcctaagttaggagtgagatgtgatcttttttttagattgagtttgagtttgcatagacgtactggctcttcagaccctttagctctacttcctttgcaagaaaaatcttttgggaagcttgcctagatttgaccacctgtagtagttcttcgtgtacatgcaaaattttgtagacgagtttggtcataatggtgtcgacttttaaaaattcttcgttgatctttgtaactttgtgagtgaccatagaaagtttctcgtctatctattggtgggtcttattttgggctagcatattctctgttgagtggcctttgggtcttttcataattggtgatccatgaagttggaagcatttgttcgagttcgtccgttaagatctggcaaggaatgtgaatgcatgtcagtacgtaatttgtatcgacagttatcattagcatatctaaacttcctagtaccaagatgtcaataagaatggaatatatatttgaattttgaaatatatttatatcatatatattagatttttaaattactatttcttacattgaaatattaattgtatatataattttttagaaatatatataaatatgtatggatcgaattaaatctgttacttttacatgttaatcaacaagtgcggattttaaattttccaatctaatccaatccacataaatacggatatccgcaatttatggattggattaggttaaatcgtacagatttaattaaattagttattttaagaacacccctaaaagtaacaattcttctatattctaagataagaagatagagtaccaaataattatttactcttgtttattactacagatagttgacagtgacctagtacagaaaggattattgtcaaattttacaagcaaatgtgcacgatatagatggacagagaaggttcaactggaaactttctggccaattgccggaattcggggatactgttacagcctagaatgtagtctattccctaaaaaaatgttttatggggaaagatgaggcttcataaagcacaaataaatggctgctggaaaatcagagataattcttccaaccttgttagttcctaatcaaccatacgatataagttttgccgaaccatttgcactcatgtcaagtacaaggctaacattttcgccaaaaatgagacaatgaacaatcaacagcctaatattgatcagtcttgtgaagcatgaatattagccaattcatatgtagtagaaagagagaatttctgagggagtgtcaacagtggttcattgctactacgcttttgaatggccaaacctaaggcatatcctaaggctcgcgtgacattaacaggcaccgcatttccaatctggcgatacctgcacaaatgacaatcaacaatccacaaataagttaaagcatgctctcaaataagtttctatattttaaatcgtctaaacattcccaaactttgacaattctacaaaaataattcttcatactgcaattaatttagttttgaatatagtctctcacattatgtgtatttatacacataatatctcgcaagtaatcacaagaccttcagaaatatacttaaaaaaaaatcaaagaaagaaagaaagtaataagaggcaaaggaaatgaaatggaaatactttactgatgaaggccacaaacaaaaatttataatcagtatgtctcactcaaatcatggaagaacataccttgctttaacagtcccacagaatctgtaataatcaggaaagccttgcaaccttgcatattctcgtactgtgaggattctatcttgttcaggatgtaatgctacctacagatgttcaaaaagctcatcataatatcctagagaaattcatcccacagtaaattgaacaagaaagcagaagcagacctggttatgacaagtggggaaagtcactacagttggcacagtctcatcccaccataatcttgcaaagggtctatacacgactagagtcaggtagagaaaaacagaagacgtgaatatgaataaagaaatgaaggaagggagcttacctttttgacttgccttgttcaaatgtaaaagcataatcaggtacctaattgcaaatggaaaaagaaaagaactagaacaagtcagttgaatccattaggacataggaaagcatatgaaatcagattaagctagagcaggattcagcagtatatctcccaaaaaaagatgcaacagcaaggatctaaatataggatatatgatatacacaaggtattataaaagtattaaaaggagaacatattcacactaaaagaaccccaaaaaagaaaagaaaagagaaaggtcgcagctgttacatctaggcaggctcaaggaaataatctttcctccaatactagtcatccaactagctaagtctttcaatataggacaggtcttatgcgaagcaagaaaaaaagacaaggaaatggaaattatagagtgaataaaattctgataatttcaaagtaatgaatttatgacttgccaaggtatttgcatagacaatcgtaaatctacctgtaaaagagctttaataaccgtagagtcgtgtttggaatgtaatattggattggattaagaaacataaagcaaatataaatataaatatatttcatgtttatatatatgagtgattaatcattttccaacaataaattatgagaaaagaagttgggtataaagttataattttttgttcttatcactaacatacgtgataaagagtatatatgggctatacaagctaacgagtgataaaactcaagcaataatgagatttgtagaagtccgtagaagggaatactattttcatatgaaaaatttcgagtttggtggagttcaaagggggaaatggtaggaatacaaggttttgggaaaatgtttgggtttggtttaaagtctttggtggtggactgtaatctgagatttcatgaaagatctggtgagcatttcagctgaaactttcactttttcaggactttaaatggcaggaagatggatgaggttaatttgttattacaaagggggtagtagatgtagaagcttgtctaatttgatactctcttcgaataattgttagagatggaacatcacagtgagcttattctcataggagaatcctttgacctcccaaagtcagtatttttatggcaggtcttaagtaaggtaaggtgaacgttcacgaggtgttacaaaggggcagactatacataaccttttgtctctattttgttgtgcgcttggttagaggtaatgggttagaggtaatgaaatggaggtaatgaaatgaaggtaatgaaatgaaaagaatgaaatgaaaaggaaataatttttattctatttctttgttaggttgtattttaaagtattgaaatgagttttctattattttaatagaatgatctttccattttgaaatggaagaaaatactattctcatgcaagatgaaaaaaaatttaataattctttactatttttttcttatacattttaaattttatttcattgaattcttattcctgttcgcatgctcaatcctattcttatgttttcattcttcccaaccaaacacaacttaatgaaagagataatgagtctgtcaatcatctttgtctgtattgttccatctttgcggcagatttagtataagcttctgaaggagtcaaagtttctatggtgcattccagttccctgtgaggaaggaagctatgccatttaaagtcgaaggagctcagaacaaacagaagctttggcaaattacagtagctgctgttttgtaggtcttactgtcttgcagcaggaaaggaacaaaataatttttgaggtgaggtggagagactgggattaacaggatgttaaaagttgctttatgctgcataatgaatcaatgttaagaattttatagatgttcgtttctctgtttggttgcaaaattggacctttctgttataatttctgtgatttaaaatgttttatattatttttatgtgttataacatccactcaatatggtggctattttcttaccaatcttgaacattttaatcccaagtagctattttagcttactagatcacaagtgactttttaaaattatttttctcctttctaatatgagtttgattgaatacttggaggaatggaagtttagaaaggaatcatggaaagtatgaatggagtgtatgataagaaacctaaggttttacctcgaaatcaattaccaatgagtggaccaattcatactgttacagagtcgaccccgtttgactttacaagaatatgcattttaaatagtaaaatgttgtggatactcttggcacattgtactaatactactttacatgacctaacaatatagagattaactcttgaaagaggggttttgtcgtaggatacaaaccatcagaaatttagcagatacttttagatgtccatacatctttcaatgatttttattgtattgtacctcataaacttacccaatagaaaaatgacagtagctggttaactcatatcaggtggactagttcctcatacaatgtcaactttttattcccattttaagtgtaatatgtatccacagatatctcatttattgtatattactttttagaaggtcagcaaaacttgctgattatgagagaaagggatattttcgattgcattttgattttgat

SEQ ID NO: 25245 - DNA, 4238 bp, Cannabis sativa
taactccttccaagaattggaattattttttttttgtcaatatggcccaatatggttttgagatttcaactccagatttcctaaaaatagaatgtcctaaagaattagctcttccattcaaacccaaaatccaaaaacctaaatctaaacatgagattaatgatgccagaattagggatcatctaataaaaaccaatctgtatgaaatttctagtcgctataggcaatttttacaagaaataacagaaggtaaatgttgttatctccgagatgaaacttggcctgaacctcaaactttatcttctattccttagcaagacccttatttatacctcaagtcactattgctttttcatcaagtgacctagattttgaaattatgtccaccaagcctcgtaaatcaaagactcccaggatcctaatgtcgcttttgaggttaagcttattgaatctaaggtaagggccattggagactatgttggtggtgtattaaagacttgtgcatcaagcaagggcgaggatgccgcatcaaatccgttgctcctgaggaatttagctgctttccaccaaaaagagtaattcgcgaggagtgtggtggcaccagtactagtggctcgtctcagataggcgcttggagcctcgagaacatcaaggctagagcagttctccccttgagagagtactacaaagaattctataattatctcagaatcacacctttccaattgattccaagtatattttaggctgggagtgccctactcccctcgagatagtttacttctattccatcaaagttgttccggtaaggaagtgaggttcaggaggtttctattacctcggtactcacactaatgatcgcaggatcattgtgaggttacccaataagagcgagttcaaggatgatttcttctagattacgagtctctctcctaacaacacaattgcgttttgtattatacgtaagtgatttctctctcaaaagcttggttttgagttttttagatttatatatctgagattgcttacttatttcacttattgtgttgacagcggttactaaaaggccaatccctacccctaagatagccgagcggcatgaaattttgttaaaccttccttttggattgcagtcagtcgattttctactacacgaaaaaaaatttaaggaatgtcaaccttcttggctcggaccagttcactagtgactacaaggttccaaaatactcttcgtgggagagggtcccagtcccagccgacgaggaggaccaatattatgttgctcgcatccattatctcaagaaagtaacccttcagaagctgaagaagaagcatcccgaggtaatcaatgtggatggtcacctaccgtacttaggacagaatgcacctcgctagtaacattttaggattgccaatataatttttacacatgggacgatttttgtacagatcacataacccataagtttgatagttggtattggtacccacgattccatgtccaacttagttgcactagttccgactacagaattaccgaggtagtatattaccaacttggatagggcgagccatccagattcaaattgggatttatattcaataaaatcttgtgatatatacatgatcacagggtctagggagtttagtaattactatagttcttcctcttcatcatttgatgattatggtaactttctttaagtgggagtttattccccatctttctattatatatttttgagcaagtgttgatgtatcttttttctttgcctcgcagatatggatctcaatttggaagacatgctcaacagccccactcttgtaaacaaaagatccaaaaaacgtccagctcaagcgaatgaagcctcgggttctactaaaaaacccaaaagaacgaagacagctgcaaataagaagcgatcttctaaccaactcaccacggagcttgcgaaatctctagaaaaggttgctcctgctgtggcgagggccaatgaacaaccccttgggtctgtacaccaggtgaaattctttgcttctcgcccagagatagttttcctcgagccctcctgccccttgcccattaaagctggcacagaaggctcacaactctgctcgctacatgctaccaacaattggcagtgctatcaaacctttgaatctagcgactgtgaattactcaataaagggagttttgaaaacttggtgcagaggagttatgatcttatgcagcaggttagtcttttctttgtgtttttttctttcactcccattgttgttatactctcttaatttctggtttcattcctcgcaggcatctttcttgtcctttgctactcaacacagggggcttcaacgagttaagatgctcgagacagaacttcgtcagaccagagagcatcgtgatgtcatcgccaagaagtggaatgattcagagtctaagctaactcgtgttagaaaggaagccaaagagaaacaaaggacttttaaaactgaccttgagaatgcccataagaaaataaaagagctcgaggatgctaacaaggctgtccatgctgaggctgacagaaaacttgaggaggctaaggttgacaccaaaaatagggtcaacaaaattgccaagcggtctatctatcaagcttgtttagccaatcctgagatggattttagctttctaggcaaagggactgaagagatgctcgcatactgcaagaagaccaagaaggaagaggctggagatgcaaatgaggttgaagaagattaagaagagccaactaaatcccctactatgtagtcttggtctttttattgtttttatttatttaggaaaatggccctttggccgagacaatggttgcccctagtggcattattttttgtaagaaattttgcattgttagatggccaactttgcttttttttttttttttttatgcatttatctttacttttaatgcctcgtatcatatgtttgaattgaatatgtctgtttattgcgttttatttaacaatctaaacatttatattctgatccaacttattgatactttaggaagcattcccattgttcctatttttcctttgatatgtttaagtagttattaatctactatgtatatgttgagcagttataatatgcgtgaagttttaatctgtgagcagtttgattttgtcctattatatgcgagcagtttacaacctgccatatttaaagatatttttttagagcaaacttaaaaaatactttgaataactcacctctgaaactattttgtatatcttttgattgctcatatgaatagttagatcatatattcatattttagctttagcattatttttcaaggtattcttgtgcctcgttataatacatgccagattaatgttgttttatgagttgatctcatttacaattgctattttgatttttcctttctaaagaataagtttttcaattttttgactttatattgtccatagacaattttaatcaactatcctttcctttgtgggaaaaaatttaattttatgggtttgcgacataatatgtaattctagatgaattccagttattatgcacatatatgcccctaagtaatttgaaaaaagataatctttgttagttattttcatccatataataacaagaaattagtctcataaatcaataaaagttacataatgacaagtagaaactaatttcttcaataaaaaactacatatgtcattatgtagatttcaatttcattgatttatggaactggtttctatgtcttattatgtcatttttatttgtatatgactttcattatatttgttagttattttcatccatataataacaaccagaaaccagttcataaatcaataaaatttacataatgatacatagatataagtttctttaagaaaaaattacatatgttattatatagaattcagtttcattgatttatgtaacttgtttctatgttacattatgttattttttttgtatataacttttattgtatttgtttcttaacttatttttaattgtagttgatgatttgagattttaacatttaatttttgttatggttttgtatgagttcacaagttttattatggtttcacaggttttattatgacttttcatagggttaaaactagtttcacatgtgttaacgtagatttttgttaaccaaatttgagccttacaatgataattcaatacagaaataataaaagctataaaa

SEQ ID NO: 25246 - DNA, 2242 bp, Cannabis sativa
atgttttataacattgaggtgtaattgattgaaaactaaatcagtttttctaatgccttggacagtatttcctatatcaattgctgcgtggattgaagtacatacactctgcaaatgttctgcatcgggatctgaaaccaagtaatcttcttctcaatgcaaattgtgacctcaagatttgtgactttggccttgcaagaactacctcagagacagatttcatgacagagtatgtggtcactcgttggtaccgagcgcctgaattgctactgaactgttcagaatatactggcgcaatcgatatatggtcagttgggtgcatcttgatggagactataggaagagaaccactatttcctggtagagactatgttcagcagttgactttaataactgaggtactttaattttccactcttggctctcaagcttttatctttttgcactgtttatttagaagatctttgtactagaactgcaatatgaatggttaatgttattattagtgaaatattgataaagaaaactactaatcatttccataaacagctaattggctctcctgaggattcagatcttggattcctaagaagtgataatgcaaggaagtatgttaagcagcttccacgtgtccccaagcaaccttttgcacaaaagttcccaaaagcatctcccgaggcaattgatctcgcggaaaagatgctagtattcgatccatccaaacgcattactggtacgtccttcagcacttaaaacttgaacccgggcaacttaccatttgaatttcttagcctttctcaaaatgtatcttgcttaacacttaaacctgtcatgtttgcaaagttgatgaagcactgaaccacccgtacttagcaagtcttcacgagatcaacgaggagcccgtatgcccatctccatttgtctttgatttcgaaaagatatccctgaacgaagaagacataaaggagctcatatggagtgaagctctgaacttcaatccagagaatgtgctggaatagtctctctaagttattatccttacattgtttctgctattttagctcactagataaggattggtttcggtttgtaactatataaagattggtatgagttttctgagggtgagaggttctccctcattgtattgagaggataaattaaatagtggtgttgggaagttggggttgctcattttgagaaccttgtgagagagtggtagccatggagatgagatgggatggttggtatgcataaaagtgaaggttttgatctgctagccttctgagcttgaggcagtgatgttagtgtgtttgtatatgtaaatgggagggaatatcatatcagtatagggagagaaagatgctcataataaacatggttagaattttactattatttggttaaaataaatataattttgttcctcttaatccttgattatatattttggtttggatcaaatttcatgaagttctcaaaagtataatgtttttatctcatagagtgaacctaacgagaaaaattacttttttttttttaattagttttaagattttggttaaaaaaaattgtttaatcttggtctttctctatgaccttgagaagtgataattacaatataattttttttaattctttttatagcaatatttattataattacgatattaattttttaaatttttgaatagtttatagtactaaaatagtatttttgatatttcaagtttactattcgtatttaaaagacttcaaatttatttttgatactgtaaattattctaaattttttatgttgtatatattaaagttaaatagagaagaaagacatcgataaacatactactttaatatcacaatataggagtataattccaaaccaaataagcttaaacacacatattaatattatacataaaatgaaaggtaattaatactattaattattattattagccagaagtgactgtgatctcttctcataacgaaaaccattcttcttagaatcatcagcagaccaaataaagattccatgaagctttccctgttgtttcagctgatcacaagccttgaaaaacccattctccggcgacaaaccaccactcccatcactaataaagcttgtcaaaaccttcccaccatgatagtttgagctttgagtattgaaataatcaatgaattgagacacagtagttcccttatcataagcatagaattggaaattcacatagtcaatcaa

SEQ ID NO: 25247 - DNA, 4558 bp, Cannabis sativa
tcgagaaatgatgcaccaggtgttagagctgtgccaattcctacacggttccaacataattgaaccgccttgcaagtgactaaacaatgcagggttgtttcctcctattcacggcataatggcacagggtacaaaaacatgtatccatattatgatatggaaatgaaaatcacttcctttttgccactcacaatattcttttagttctataattaattttgagttaaattagcaacattaatataaatatatgtatttatatttgataataatgacaattatgcaaagagtattacttttagtcttaggtaatatcaacccaatttagtttagtttctatataaattgctttttagtttctaaaattattttttttctaaaagtatttggataaaaaataaaaaattattttttaatttaaaagtccttttgaaagaagttaaaatttatagcttctctcaaaagaacttttaagaagctatttttaaacataatataatttatataattcataatttactcataaattatatctaaaagtactttaacccaaagaagatttttctttgttgaaatagcccaaatatacttcgcaagaatagactgattccatttgactccatttttaaggccaaggccaccataagccttcgaaaagaaaactttctcctaagaagtaatgtggatcttactcctatttccattcatgccccaaagaaaacctcggcaaagcttttcaacccctttagtaatactatgaggacatacacagatgctcatccaataatttcaaaggccaagtaatacagagtgtatcaattgaaccttaccagcaaaggaaagatgtttgctcaaccaagtataaaatctctgcttaatctttttgataatgatcccacagtgctcatcttttcacattgtcagccttagagggtctcccaaatatttgagaggaaaagtaccctcagctagttgaaaacctttaataacaacttaattctccttggctttcatgcctccaaagtagatttggtattttctagagttaatatgtaagcctaagatagtgctaaaatcatcaagcacctatttgagagccataacatagagcctagagtgcttaattaataggatcaaatcatctacataacaaagattgattatctttaagcccttgcacatcggatgatacctatagctagaatgagcagtttccatatggaggcttcaagtaaggtcctccatgataagaacaaagaggagaggggagattgaatctctttgtctcaaacctttttcccctttaagcccaccttcaactctaccattcataactatagaataggatgttgatctaaggcatcccataattcaccaaacaaagttctgtggtatgttaaaagcatctagcaaatcctccatgaaatcccaacttacaatatcataagccttgctaatgtcaattttgataatgcatcgtagggagacattttcctcttgtaattcttcaaaagatcctggagaatcatcacattgtgagctatgaacctttcttgaataaacactccttggttttgattaatcagatttggtagcaccattgcaagtctagtacataacaattttgagatacacttatacacaatggtacaataggctattggtctgtaatcaacggaactagttggattctcatgtttggggataagagaaataagtgttgaatgaagctctaagggcatgaaacctatactattcatagcagagcaaaattcagctcccaagtcaggctggagttgattgaaaaatctagatccgtaaccatcagctccgggtgattttgtgtctggtatgctgaaaagaacttgcttgatttccttgttagtgaagggcttcagaagagcgagttgttgattaagattaagatgagggccttattcaagacaagctaaatcaacttatttgaagccaagctttcactccccatgtagccctgaaaatgagacacaaaatgatcaaccactttagggaaattatcaacaataatttcctgttcagtaatgtatgaggttattctgttctcaatttttcttttcttcaaacaagcatggaaaaaagaagtgttctcatcacctttatgaagccaagttatcttgctatgttgccttaaaaagctgtgatacatcttctctttacacaagaaattttcagcaccaagcttctctttttcaagaaaaagaggctcccttaggtgagattgagcaagtagtttggattcatgaaattcattctttgcggcatggttagtcttcccaatatctcctatgaagtcacggctaaaattcttgagacaatgctttaatctcataagcttgagataaagagcaaggatacccttaacagctatgggcttctcccaattcttcatgacagctgctttaaactcagaatgtttgacccaaaagttgtggtatctaaagggtttgaaccctattttgttagaactagcagtagcaatagtacatgagcagtgatctgagatggtctcccatctaaataagactttagaattagggaacatatcaaaccactcctcatttgcaaagacgtgatcaatctttgaataaattctgctatctccatcttggttatttgaccaagtatagactgaaccagaacgtggaattgcttcaacattaccgaagttaaccattgagatggatcataagtgtcgctgaaagttctagggttccctccttctctatcacccgtattaaatacaacattaaagtccccaagaattatccaaggcttcacatgaaatctaaggtttgacaaatcctcccaatgacattttctttcatcaactgtattgtatccatatataaaagtagcacaaaaagtagcatcaaaactagacatttgaacataacaatgagccaactgtggtgatttaacaatgactatagttctaacaaagctcttcctccaaataatcaaaagcctaccttctattgtaggactagtaaagttatcccgattggaaagtttattgtccatcttatctttgatcttattcgctttgagtttggtctctaaaaaagatcctactccaaccttatttgtcttacaaaattcagcaacaacatcctatttatctttgttattgacactcctaacattccaacaagaaatcttacagttatccatgggacaattgagatattaccttgtttccatgttcatcctgaaccagctccatttcctctcgaatttcttgttcctacaaagcactgaaggtattgcccactgtatggttaaaatcagagttagagctcctctgaattttaccctgaacagtcttattaggaacatgcagtccctgtcctgtattgcacttagaaactggttttcttggcaaagaaattaaatctccctggttagaatctaaactgatagcaacattttgtaaaggattatcatcataagtagagttttgctattttttctctagttttggcttctcactagctgctggttttttcttccattcatccttacgacaatttgccataatatggccaaatcctaagcattttttacacttaacaaacagccattcgtaatcaatactctgctctagcaattgcccatgttcattaaggtattgaaaggatctcgaggtgaatccgttatatacatctcaaccaaaatacgagcaaattgaaccctagtacgatctttagtatgttggtctaccataaaaggttttccaacagtactaaggcactaaggcttttgtttgcccaatattggagacccaaatcgtgcaacagaatccataaaggaacagacctaaccagtttaacagcattcaagtcagttgtccaaggtctaactatgaccgacttcctatcaaattgaataactcctgcttccaaaacctcacctctagttgcctcatcattaaacttcaccatgatcagtcctttggacatcttagcaatctggactatcacaaggtgtccccatatttgtttaataaaaccttcaaaaatagccattggtgggttcacaccaagaatcatacaaatagcagctgaattccatgcctctgtttgttccctaacctcctcataatccaattaagcaattttcaagccattaatttctaattagaggctttgtgtaaggaagcttcgaatcacagctcagaactttctctttagcaaaggtattccagagacccttggttgattcctgaaattgcacatgtctgttaccctcttcctgttctaattctgcctccttagcccaactcatactaatttgaggtgtgtgaaacttcgagatacttagagattgtcgaaacaagttctgacttatttcgtcaccaaaatcatcattagcaaccttactcatgtaaagagtcatacctgaagcatcttcttcttcatcagcgtgagttccatggcttgaaacagcctcaggtaacttgatagcaggctttcgaactatcctcttcttcttcgccatgggagagagagagagagagaga

SEQ ID NO: 25248 - DNA, 2611 bp, Cannabis sativa
  modified_base (842)..(849): a, c, t, g, unknown or other
  modified_base (2186)..(2189): a, c, t, g, unknown or other
tttttttattatttttaatattagaatatgtttaattttaatattcttaaattttatatatatatttttcaaaattttaaaacattaaatattttaaaaaaaaataaaaaaaattaataaacacgtggtttccttttaattcataaaattttaaaatacgtataataaaaataaaaaataaaaaatataataaagtatatgtgcaatacaagtaacaataatctagtatatataaattactcaacaataaataaaaattaagctcatatatgtttaatactttcttttctttcaattcaaagaaagaatgaaagaaaagaaataatatacatatacttgacatttatttgcaaataggtttccaacctaatagaagaaaaggaaaaacatcaagtaacattcataatatataattaatcgtaagatatacacataaatatatatatatatatatattcttccattatttaaataaaaatgaatctctagattttagaataaagtgtaaatattcacactataatatatgttaagtccaatcagaattagacaacggcaaccatgaatatatatattataatgtagagatgctaattataaaggtcatcattcattattttttttattgtaattataaagttttattggagcatttttaatggagatgcaaacaagtagtgaaaagctaaaatatagtttatttaataaaaaaatatactctaataatgtgccaaaaagttatgtaaatttgttatatagcaaattttgtgctaaatttagcacaatatttgctatgatgtaaaatttacaccataagaaatgcactactttttcatttatannnnnnnnatttttattaatttattagtatatttaactattacattcaattataaaacatttatattattttttattatcttacatattaaaataataataaaattaattataaagttattaaattttatttttttaaaataaaacattaattagatattaaattttacatcaaaattttgtaattatacattggaatacaaagataaattttagtttaaatttaacataaaattattttttatattaaatataacacaatttttacatcttcaattagagatggtcttaatttaaccatagttactgtcttttataaacaatgggaatcctcgttttatgcccactataaatttatttacttttgtttgtggaaagagcataacattgccattcttgatccctttcgttaatatttataaaatgccacatgctaaaaaattctaaacaaaaaaatatttcaaaacatgtggcatttatctaattaagaaatcaattattttgagtacttacatactggacccggcccaagtattttagaggcttgagcaaaaaaaaattaaaattgggcctttttataaaacaacatattcacatttattattgggttttttacacagaaattttccatttttttttcttttttactaagcagaattttgttaaaaaataatgtgttttgtatactgtgtattgtattaaattttcccgttattccacttttattttttaattgtttcattgttattttaagttgttctgttttatgttccactgttgttttataaaaatatagtagttttaaaaaaaaaatcaagtggtagtatttctgtaaaaattaacccaaattctagtatttttgtaagttttcctttagctaaaataatatatatttatatatatatatattgattgagtttttcataaatatgaaaaaaataatagaatttacttttacatggtagaaataaataatgtaaaagaatatgggaacgaaaaataaacaataattaaaatacataggaaactaaacaaaagaccataaataaagttggtaaaatttataataacaactattgcctggaaagtcgctgaagtatacagcgttgttgagaaagttgtcagaaaagtcatcggtgtcggaaaattcatcgcagccggaaaaatcatcggcactggaaaagtcaccggagttgtcatcattgtcagaaaaatcactggaattagatgtctcaaatgtaaattaaaataaaactgattttataagaataaaaataaataacacacaataactcaaaccggttataatgaaaaaagaaaccaattttataacataatgaataaannnnaataacacaaaataactcaaactgtttataattaaaatagaaccgaatctataacagtgttataatgaataaaaataaataatatgaaataactcaaaccggttataattaaaatagaactgattctataacataattaatataaataaatatacataataattcaaaggggatataatttaaaaacaaaaagaaaatcagttcatacaatactaaaacataaattaaaaataaaactagttccataacgaagtgagtaaaaacgaatatcacgtgatatttcaaaaaccaattgttataataataataaaaaaaatgtgagaattaattccaaaaatattgagacataaatctaagcagaactgattccataacaaaataagtaaaaataaataacatacaataactcaaaatataagata

SEQ ID NO: 25249 - DNA, 2812 bp, Cannabis sativa
atcttaaataagtaaaacagaatgcttcttaggaacataatacatcacttactgtgtttgcatgttaagcattgtttcagctgacgaaatttgccacacaactgatattgtagttgatattttgacttgtgtgtgagctttacatgtgttttttctcccgtaaatgtgtcgttatcagcttgaagcaatgggatttgatcgggctctcgtgttagaggtgttctttgcctgcaacaaaaatgaggagctcgctgcaaattacctcttagatcacatgcacgagtttgaggattagatcactctctatatttgcctttttttctctatcaagaaaagaggtctcagagtaatctctctccttctctctctttctctctctcttataacatttttctgtttagagcataatgatgtggagtgtgtggagtgtaaaagttgtatttttctacctataatctctctgcctctgttgttaggattcaattaaaaataatatatttataaaaaatatatagatgtttttatcattcatttccattgttgtgtaatactctgtttcagttctatgcttcaaaggtggttctaacttctaactattttgccatttgttctctctggttaacaaattcaagtttattaatcaattatggattttattactatttttttgacataaaaaggtgtgtttggaagtggtagtaattacacaaatatagtaattacacttttaaaatacatttagatatgaggtgacaattgtttatgatttttttaaatagttagtaattacacataaagataataatttttattactagaacatttaaatgatttttttttttaaataattatagcgtaattatactaaattctcttgaggtctaattacttttagttatacttaacttaattctaattccctattgacttttcaaatgtatattaagagaagatgtcttgttttaccttcatatctctttgcaaacttttcccaccttttatgattcatttcttcatggtttagtaaacgtggtcgactcaaaatgaaatgtaataaacattattttggaaagataactctccttctcacaatgggaaaatgtatcttcattatatttcctcgtaaccaatttactcaatttaattaatcaatataaattgagtctttgaatcaaccattttacttgcaaattgtaaaaatgatacgtttctcaatttaaattctttttttgagttacactaagagaaaagaatggttagaacttggaacgatcaaggtttgttttattattagttagcagtttctaatactatttattaaattaaaatatataaaacttaatgttaaaatatactcataacaatttgacacattttatgatgatttgacatcttgccccttatcatttatctcttattatagactagatttgattgaccatttcaaatgtttggcgaaggtgccaccaatggagaagtttaggtgcttgtaggaacctttcgtggtgttgtagtacaatttgtggttgaaaatttcataaatgcgaattagaccttgcatcgcattgttagaaaaatgttagtttaagttgttattaaatgttttagtgatacttatatattgcttattgatgtggtttgtggtttatgtgctttgaaaagaaatgctcaaatcgtgtttacgctcatttattgtgtgacttagagctgtaaaatagtgacatgcaatggattgcacatggtagtttgagtggtttcatcatagaactttttttactttttaactttaacaaaatgaacttaatggattactaaaaatggtaaatgttaaagagtgatttaaaatatacattcttgaaaaataaaaagtaattgaagctgtaagtgcataaactaaactactacctcattttcaaagaacatgatagtcacacataagtgatgataaggtgatcatcatgatcactttatgggtgacacacacatatattgtggtccaatgatacatcatctcaagttttcaataattatatttgttttttttaattattatattttgttgttctttatgtcataatccccttaaaattgtgtgagagccactcaatatttgttccatgcatttaaaaatttcccaatttatttatcataattaaatggactatatatattatgtcatttgcaagggatcatagataattgtagtttcttgacatgatttttgtgcaaaaagatgaaatatatcttgattgatattaaccaaatattggctctatcaatattgataggcacttgctttgatatatatggggtaaaccaaattgatcattcatggaaggaaaaagaaggaattctcatttgatatgtacaagtaattaaaattcctcatacaaaaaaagaaagaaagaaaaaccaaacttaaaaccatctatctatttatgttttgtgtgaatagaataccaaataagttgttatatatatacatattcatatatcatacaaaaattcaataatacaccttctaaaaaagatttgtcgatgcacttcttatctgtttcagtatctgagagaatttttttagtcttattttttttataatcgtatacgttgtagttatttatgacatttcacatacaagagattgtttaaatcctatttcttacgttgtaatatttttccaaatttcttaaaattttacaaaatatattaaatcactacaacatagaggattataaaaaaataagctaaaaaattctttcagataccaaaacaaatagaagttcatcgataaatttattgtaagaaaatatta

SEQ ID NO: 25250 - DNA, 2009 bp, Cannabis sativa
tcaactgaccgttccccatctactaacctgagctcccaaactgtaaggctgcaaatcttgcgagaacagaacgagaagccacacggtcttacgcaagaggctttgtctagtttgcaactggagcttttcagtgggaaggagacggatgctgatgcggcggtggtttttagtgcaccacaggattgcagcatatgcctagagagttttatccagggtgatcagcttatatgtttgccttgtgatcatagatttcatgctgggtgcttggatccctgggttcggattcgtggtgactgtccttactgtcgaagggctatccttgtaaagaaaagaacagtaaagtctttatagtcttaaggcgaggcaggttttttctttgctatgaaaattgtgtgtctcgcttactgtcattgtctaccttctgttgtcaaattttactgctttgaatacaagtctttcactatcgttttcttttcctttcaattcagaatttaaaggtttgttctatatttcagatgcacaaattaattccctttctatttctttcttgaaaagaactcttaatgaacaaatcggtaagacttggaaaatgagatctagatctattacatgtgctcaatttgtcggtatggttagattaataagacagccgattattgcttcgaaactcttgagcatatctctttctcctagagcattcttacgaggtactatagtacttagcaccacgatgaagtattatcttataaatagttagcgattttttataatatttattaaagtaaaataaataggattcgatattaagttgcactaatagtaatattatatctcacaagggtgctaggcatcatgggtactcgaggcaccatgatacctaacactatgatgaagtgtcgacctataattgattagcgattttctataatatttattaaagtaaaataagtgagaaccgatattaaattgcacgaatagtaatattacatctcacaaggatgctaatcatgagtgctctttagtatttctctttctccaagagcattgctatgaggcatcatgatgtctaacactacaataaagtatcaccttataattagttagcaattttctataatatttattaaaataaaataagcccgatattttttttttttgaataaataagtccgacattaaattataccaataagaatattatatctcacaaaagtatttaacaccacttctttaacatctctctttctccaaacatgagagttgtttttatattgacaaaatcaaaatccaatgttgcctgcattaattgatggtatggaattttggataaactatatttagtccatacaatcttgaaagtcgaaactttaatctactacgttttctaattaatatatttggtttgtggttggtctttggttcatgtcatcatcacaaacttgtattcggctcaacaaaggaccactaagtaatattaatataattgaattatgaacaaaagtcgatctctactctctgagtctctaactattttttatatattatattattatatgagacccagtcgacaaaataatatggactatggtatcagacaagtcctagaaatgcattatttaaatgagtcttactcttctcttgtcgtttatattcctaacaccattacagaatagatgtattatatcattcagacaaatatttgtgtttcaaatttttaatgatataatagaaacatttcaccacttttgtaattaatatttttgaagaataaaatacaccaaaaatatcgattgtaccatttttgttatggaataatgctctcaaatcacaatgtagccaagggtatattttgtcttggaatcaactcaatagtatgttgtttacttaatacaatcttttattcattcattcggcaaaagtcttataaaggatttggccaatcaagcctaacaacatgactaatacaagaaagaataacaccaattcacatagcactaattttgttactc

SEQ ID NO: 25251 - DNA, 7340 bp, Cannabis sativa
  modified_base (1361)..(1363): a, c, t, g, unknown or other
attaaaaaattggcatatttttttgatgtgtaaattcttggtataattaaacaccactttctattttttagcataatatatcaaatttccctttacaaattctacacatgtggtatcttatctttgactttggtggacctaactttcgagtatgactaaattgcccatcttcttaatgttaattttatttaattttaatattatatgagttaatatatttaaacaaaaatcttatacgattcttttttttttttatctctactaagtcatatttttcatgctgaaatgtgaaggttggtctttcctttatttcttctttttgttttttttttgttcatgaattgtgttcgcaacacaacagctgctacatagtagtcttatggtttgaagttaatatatttatatataaggaggtgacttgtaataatttagatgatatatattcaatgttctctttgtttaatttcaagtcttgtatttatttatatgaaatatattagtcttggtattatatttgaattgggaggaacaaagaagggaacaagaaaataaaaatgaaagttttttttagatgaataaaagtgaaagttgaatcgaatagaaatttatttatttatttataaaatcatataatatttaaaaatatttaaaatcatataaaatatttaaatgaaggtaatctagtcataccataaattaaaaaagggtggaattaattatttctctccattatattaattttaatagcatttttgaattaataaataaatttaaataccattaatattatgatttattataaacaaaatattacgatatatatatttagtctgtgagattgatttttctaactaagttacttttatgttattagcaataacatatatatatacattatacttaaattttatgagaatggtgtacataaatgacatagagaacaaaaataaataacatagtgataacatatatagaaatatttattttaattaataaaaaatacaataaaatttaatattttctaattaataaatatatttctttaatggataattattttaattttatgtataattaacattatatagatatattaaaaaagtattttattttcattttttaaaataatatataagattcctgcactcaatcaaacagtgttattcaattaataagaatattattgcatattaccatacacagtcaaacacagtttacacatttctctataattatattctctttcataatatttcctataatcaaattattttgaacacctcataccaaatgcccaggaatgctttgaaaaaaaaaaagctaattatgaattttatccctgaactttgacatgtactaannnatgcccctgaacttttaaggttattaaattctacaattttaatagttcataggacatttttaacaaccttaaaagttttttggggcatgatttagtatatgtcaaagttcaaggagcataatttgatgaatatcaaagtctggggaacaagctttaatacataaacaatcaaaataattaaatgaaattaaacaaaaatccttaaatctaataatcttaataaatcaagggaaatttttaatagtcagaaaagttgaaagaagataacttaatatatgttaatatttatggagtaaaaattctaattagttaaaaaaaaaaaaaaaaaaacaaaaacattcacacattgtcctcgccatgtcagcgtttttctaatgtaatgatgacatgtcaaagagagcccgtattgacacttgtaaacgaaattaaagctacaaagtggggtccacagtccctctgtccatagttaagctccagtcaacaacacacttctaacataaaccttataaacctcccgcccaaactataaagctccactagttttaaatcgcgccaaatgaaatttcatggtaataatttcccgcccaaacaacatcctataaaatattcacctctctactaacctcttttacagttttttctttactatttttttctcggctcacgcaatcgccgcaactcaaccaaatccaaagcctcctcacagctcagctcgcttatcccttctcggccatgcctgctattgccaaacggaagccttctcctacgtctactccgatggaattcatgaacctcccgtcggagaaggtcgccggtggccactccactcctcagaagcgtaagctcagatctgattcgtcgccgatgcgtgccagtccagtctcaacccccatgaaatggacctcgcctcgccgatccgtcaatgcaagtcccaatagcccatcgtttgtgagtttccgattcatttgacttcagattgaccgattgattaccgtttattgttttcttcttagtcgtttattattattgtttcttgaattattcaggatgttgagagtacattgtgtgaacgccgtttgaagttgcagaaacctgtagtgaagaatttgtttatggtgaaacctaattggaaccccagaggtaaattaagcttgattgtaagtatgaattgtattgcattgtggatcatttatatggttagatttaatagatgtctttgattggaaaattttagatcctgagcaatctagggcggtaaaggaggcattgcacgtttcgactgcgccttctgttgtagtgtgtagagaagatgagcaaaagagggttttggagttctgtaaatcgtgcatggaagaagaaaaggctggtagtttatatgtatgtggatgtccagggactggaaaatcgttgtctatggagaaagtaaagaagcaattagctgaatgggcacgagaggtgcggtttttggcctgttatagttaaatcatcatttcttctggttatttactgaacaattcaagtaatagatttcgattttttttttctggttaacagacagggctagaagagccagatgtattagcaataaattgtacctctcttacaaatactagcgatgttttcaataaggtactgatggttgaagaaatttttcattgtttatccaacaaaagcatatgcttaattggtcttttgcttagcagatactgggtaaagatcatcaaccacaaaagaaaagtagaaactctacatcagcattgcaacttctccagaattcctactctaagaaaccaaattcagctggcaagaaaatgatgtaagtttttcttcctagtcttgtaaaaattgggattaaaatgtacatgacatgtttagtttgtccttcttttgtctcaataatttgaattgccaagagaatgcttcaatttgtagtgtctatttgttttgtcaggttaataattgctgatgaattagactatctaattactaaggacagggcggtactccatgatcttttcatgcttactacactaccattctcgagatgtgtacttataggtactatgtctatgaaatatgggcagtaattctttacttgaatgagacttagtagaatcaattatggacttctctgattttctcttgctcacaatgtgttactttatacaggaatagctaatgccattgaccttgctgatcgttttcttcccaggctccagtcattgaattgtgagttcaatgtccttttcttttattttattttgtttttctccaaccagttattgaatacctcttctgctaagaggttgctactttcttataattttagccttaactttcactttatatccatagattacagcatttcagaaaactgttgaattggtttattgaggcatattttccatttgtagtctgcctatcactttccctggacatttcttcttggcctgacattttgcttgaatgtttgagtctttattatatttgcttgttcttaatgcattgtcctgcatttaacagctgtcccattcaatcctatgtgaatatgaatgtgtaataagccatgtggttggacgtaatattgactgaagtattaatcactttgttgttctaggcaagcctatggtgattacctttcgagcgtactccaaggatcaaatcattaaaattcttcaagagcgcctaatggtaagttattttgttgaactatgctctagtgtttgtacattctaaattcatagtttatcattatcaatttaaataaatgtacattttccttacaatcgcaacctttgaatggcttcaagaaattaggtgctgtcttattaattattatgtagtttttattgctaattagttactacttgttattttattctatcaggcactaccttacactgtatttcaaccacaagcattggaactttgtgccagggtaagttcaacaggataaatcttttatatattgtagcttaatatcttcacattaaactactaacaacattttatctgaataatatatcagcaatgtaattagtagtcttctatcaatgattgacatctttccaagaaacagtgtaaacatctgttcgttacttggttttgagttcttaatgtaacaagaaaatgcatatatatcaagatttggtgaattatgggaaaatcagactaaactcaattcgatgcaagcttatttactgtttccttgtttttcacatgcatagtctttgttagtgtatgctgcattgcaaactcttttgtcaagtgtcactcgatttgccacctggtactatactacattagatagaggaaaatatcaaaagggtaattaatcgaaagttgaattcaggcctagtgtgttctatttaagacatgttttgattttttttttttgggggtgatatttccattaagtcatttttcagttgtgattttgaagttataatttttattgtaaagttgctaattggaaatatgttaaaatgacagaaagtagctgctgcatctggtgatatgcggaaagctctttgtgtttgcaggttagtaagttttttttttttaataattgcttcatctacgaagctggacatctgtactcattaaatttaaaacatttcagcactttattgtcacaatgtacttcattagtaaaatgtgtgctttttataaagaaaacagaaaattgtgtgttggatcaaagtttatagtagtctagactgcagtttaactcttttgatatacatttcaggagtgcaattgaaatgctagacgcagagttaagagaatctttcaaccacttgaattcatcaagcgaagaaacattctttgagcagcagatattaccacaagctgactgtgttaaaaagccagaaattgatgtcgtgagtgttcactagttgcatttaactgtgttttcattcttatttaaagtcctaacaatttatggatacaggtaaggattgatcatatggctcttgctttatcaaagacattcaagtcacctgtggtggacaccatacagtctcttccacaacatcaacaggtaattttgctttaaaaaatatctcagaatttgtttgaacattcttattattctcctttgatacctatgctgcgaagcttagagtgtctataaatcctgctcacttcattcaaatgttgatgtattttctattgttttgttttaaccgcagatcatattatgctcagccgtgaagcttttccggggtggaaagaaggattcaacagtcggggaggtgcgtttcttaatcatcatttatttgtggggaaacatttatcgaacacactaccgttttctgaactcatttaatgcgtatgcagttgaataaatcttacacggacttctgcaaatcagcattaattccagccgtggggatttttgaactttcaagtatgtgcagggtgcttaatgatcaggtaatgaacatggattgtgtacttacgttactggcttataaaatgagaaaatgagttgtattgaatcattgtatttacttactgtaggggctactcaagattggtcaatctcgagaagagaaattcaaaagagtgactctaaaagtagatgaagcagacatcgtttttgcgttgcaggtacaatcatcaatttagtctttcccattccttcataatcatagctttgaattcaatttagtcttgccacttacgttctctatctcatttttgtatgtggaacagggaatccgtttcttccggaatagtctgcagtaaatccttcaaaatatatatagctgatttttctcttgatttgttgactttcattttcgagttatccctctgctcaatcaaggtgaggaactttacttttcgtttttttttctttcaaatttcattaatttgccatttcaatcgcatgaaaataatatttggtcatatttctttttaacttttattagaataaattttcgaatttcttgcaacgttgtgttaactggagtttgaacttttgttgtgcatgcagctaagagcgtcctggagctataatgctgaacgctgataaatctgtttgcggcaatgagttgattcaatttcataattgttttacattgaagaaagaataaaaacataaatgggaagaaaacccaatatatggtatagattgttaccaacttgtaacttcttcgcttacagggataaataaatctcagacaaataaactgtaatacattctcgtgatacagaaattagaaaatgcaatttattccatgagaatttttttataatatatattttttaatgttcccatttatatataatatcttatttttgttattattatgctataaattttgtatttatagtatgatacgctctgataggtttaatttgaagtatggatcaccgtaatctatgtcaggagagaaatgaagggagggaagctgaataggatatttatatttagtctaattaggatttttattgttgaattttaacatgtattaaattatacttttgaatttttttggttgttaatttttttttttaaactattaaattattagatttaagaaattttgtttagttttattcaattttattatttcaatgattatttattacataaataatgtttaccaaactttgatatttactaaataatgttttttgaattttagtatgtattaaatcatgttctagcatttttaataactttaaaagttcagggtataatttattacatgtcaaattcaaggatagaaatcttaattagccttatatttatatttatataatggggactattacagtgggtattggtaaaatacctatcaatagggataataatttataacctttgatttaatctaatagctcaaattaactcttgaaaattacaccataatttttaattaatataattatttatttataattaatcttgaatattattaattatatatttaagtaacaaaattccaaaccataatttttt

SEQ ID NO: 25252 - DNA, 3021 bp, Cannabis sativa
ttgcaattactacaaaaacatatcttttttgtaacattttgatcaaacaatatacgattataattcactaacaagtttatttaacaaataaaaattatacatattttaaaaagaagcgcgctcgtaataatttttacaattcaaggagaatttaaccattcgggtataaattttaattacaccgaaaaaattctcgataaaaactctacaagactcataattcaagaaagtaaaaaaaaaaataactatttacacgttaataataaacataaatgttaatattcccctttcatgttacatataaataaacaaaagaaaagacatactattctagaaacaaacaaaaagtaaaacaaaacaaaccaatataacattaaaaaacaaataagaaaaaaaaaaaaaaagagtattagtggcaaagaacaagaattaacatttaaaaatgtttccccctctaatctctatttaatctttaattatatatattttatatatatatattttttaagagtgagtagagagatcaacaataagtccccattatctgggtctaccatagtttgaagttgggcttaaatgatcaggcccagacttaggcccaagcccaccaccaccactactattaccagccatttgatgaaacccaccagaaccgtacacgtgtccctgatgttgttgttgttgttgttgctgacccatcataaccattccactaccgtacatcccatctccataaccaccaccaccaccgttacccacgctcccagacaccgcgtccttctcacgcgccgccgctactcctcctcctttctctccttccatctcacgaaacctctgtaagtagatcttgagtggctcaacatactcctcaaaccctaacgtagtcatcgcccacagcagatcgtcaccgttgattgtcttcctcttctctctctgacacttgtctgaagcttctccggttatgaagcttatgaactctgatacgcactcctgaactgtctcctttgcgtcttttgagatcttcgcgttcgccggtaaagcctttttcatgatcctgctcacgttagcaatcggcaaaagcctatcctgttctcgaggtgaaagctcactgttcgcgttagctcccgcgttatgtcctcctgagtcattgtcggaatccgccattaacaccttcttcttcttcagtagttagggtttccgcgattctcgggagtttggaaattgaaataactgtttttgagattctgaattcgcgtaatttgaattcttgagaggaaattgtgtgatcggcggcgaaggattttgctccggtgaccggagaagttagtgagagagtgtagagagagagaaaggggaaagaggagagtttgagtttgagtttgagtccgttggatcgtttgggttaataaagcatatctttcgaacacgtggaagaatattgaccgttgtttgacgataagtgtgaatttgcacgaacgagattgaaaccgttggattggtctagagggctatattattgaccgtcgattcggtatctagcacgtggtttgtctgacctggctttaatttttatttttttgagctagtctgacctggcatttttctttttagttttttttttaattattatttttagtatttttattagacacagtggtgtttagctattataaatatgacgcattgtgattgactatcaatatttcttaaaaattattagttgtacgaagcgcataattgacacataaaaatttaaagtgcactagtgtaagccttaacagtttcagcattttaaaaaaaattagttaatttttttcataatcgtatacaagttataattatttaaacattctctaaaattttaaaaaattcgaaatgatttacaatatagaattcaatgttcaaatcgtttatttcacacgtgcataaaatgaaaaaagtcatgcgtgcaataaacactttgaactctatttccagtgtattatattttgctaaatttctcaaaattttgcataaggtcttaaataactacaacgtatacgatcataaaaaaaagttagattaatttttttatatatataccaaaataaataagggtgtaccgaataccgatgcatccctttcaatgggtgtattatagaattttccattattatatttatttttaaaaagaaatataattgaaaatttctactatgaacccttctaaaagagatgcatttaattttttagtataattttttttttcatggtcatgtattttataattatgtaagtcgtactattaaattttagaaatttaaaaaaatttaacacgtcaaaaataaggtttaaacaatctatagattgcacgactcttttattttgtattcatgtggaatagactatttgaatactgtgttttatatcgtaaattattttggatttcgtaaaatttgaaggatgtcttaaatgactatgacgtacacgtctataaaaaaaattagactaaaaaaattttttagatgcaaaaatgtataaaaggtgcatcggtatacttattttatgaggtgcatttagaagcactcaatataatatatctctcgaattatgattttatagaatttcgactaagttaaaatggttaaataaattctagtactgcaattatagtttataagtgataagtaaattattttaaataaatgaacaaaatataactcaacaaagatatttgcaacaattaaaatggacaattttgttgggtaatacttctgagaaaataaatctatttattcatattaaaatttacttatttttctttttattattattattattattttattgaatgagataataatggaaaaaagaaaacgacagtgaatgtaacgataactaacaaacttgatacggacaggaagacaaaacagaaaacggaaaacaaaacataaacaataaaaacgacaatgaaccaaaaaaacgacatcaaatataaagaggccacggtatttggcgttgtaatgaaacgacatcaaaact

SEQ ID NO: 25253 - DNA, 5025 bp, Cannabis sativa
ggacacggaagtagtgttttctccacactgacttctttgatgaatacccgacgataatcttagtataggtattcatcattatgaatcaagaactttccatctttcaaacatttctccttcacaatgtgccccaaagcaacctttggtaccatcccactaatctccaactgacagtgcatccaacacagtaaggtctgcatatccaaatcaaacaagcaacaactcaggttgtaaattgaccgtatttataattttgcattagattagttcataaaataacattaagattacctcttttaaattattactagtaggtggaggtgttgctgctggagcagaaatctttttgaattgtgatggtgatagagtagagacattggcagctagtggagtagagacattggtaggaatcgattgttttgctataggatcagaggcaatgtcagcatgggcttgttcattcgatgctcctccaatagaagaaccagacgcatgggatgtgcctgtaatgctactatgctgagaactaactagacgaatgagctcatccattttcttctgtagctttttgttgcttttctgaatctcctgaatgcctctctccaaatttaatgatgccgggtttgacccatccgtgtttttccttttagggcatggtgtactaaaatatttgatatgggtaatgctgatacccatggctcgaacccgaccaccatgctcatctatccctagcgccatggtcaacacgtccctcttaccctccacatgcacaactccatattccacttgcttacgaaagttttcctagaaacataacaaatagagttagaaataaattatgaaacataacaatataaatgaaattatactttaaacttacaatccatttaacagtttttgtagctaggccctccacctcgtctttcgtgttcatgtgaattcttttctatattttagatctatcaaattcggtaatttggtggcctccctctttgtccattttttcttaaaccatccttacaccacctcgtctgatgtgatggttgtaaatattttttgccctgctctgatgggcctttttcctccccacctcaaagtctagactcaatctcgtagccacaaactctctccatcgttgcaaatcaattatgctttcatacagtttcagtgaatttttgagaagttggggagccacatctttgactttaaaaatacaatctgttagggtattttttccaatccttccacctctcttcacctttaaaaatggttaatttcttgtctttctccggtatatcaaacgtggcctgataaattgataatcatagttaaaagtacttcgtacaatcaatagtaaataactcgaataataaaattaattttagctttatgtcatcccacaattagtttttaatgtcctaactcactttaggccatggtatgtctcgaagtggaacattaattcacagccatgttccgattcatgtaacttttgtcgtcactctttttccccaattttatatgtagttattgtactcaaccttcaagttttttcccatgctatccatttttgttatgtctctctgtttgcgttttccgtgagtattttcttgtgttggttgtttagtcacaacactacattcttcttccatggatggttgttcaggatcaacactagatcctcctagcacggatggatcatcatcatcattataatctaaccaagcactccactcatcatccccacctggtcccatgatggataatcttatgcaaatttgaaaacatacattagaatatagaaaaatatgtaaattgatagctaaaagtaaatatatcaaaaagactaaatacaaatacgtgtttgatgactcatctattgatggcttcgttcactcataatccttcaccatgatctcgagatgatatgatatcatccccaacagtgacatcaataggtggtggagtgatttgatgaattcggtcactaagtatgagatcatcgccattaggctcttgattatcacaatcttttggttgcgtcgttaacataactgaccagcgtgcatctaatggatcgctcatatataacacttgattggcttgggatgccattataaacgtattagacttgtgtccaattcgattcaagtccactaacttgaatccaaattcattatctttaaccccattatcactcctaacccaatcacaaaggaaaagggggatccaaaagctactgtaatctaattcccaaatttcatgaattacatcgtaaaactacatgttgcattcaataggatttttgcctttttaactagatacttataaagtcttagcaactatcataacaccgttattttgtgtatttttttagatttatcacgagcttgggtgaaaaattgtgtactatttatatagtacgattggtacttgagtacatcacacgaaggacctcgtgatatagaaaatagcgtgttggatacattgctcagagattcacacattttcacatatacctatcaacatacaagttgattagtgagaaaaagtaaagtaatatatgatgcataacaaaataatagtgttaatagtacctttttttaaccatgtactgaaatttcgataatgttcatcttgtacccatttttgatttcgtgccttagtcagattagtggtctttatccaaataaaatattttcgtaaagtatctgatgaatttattttagtttcaattgaatataattattttgttttaactatgaaaagttaacttaaacttactcaatatacagttggaccacgtcagtattttacaacacaagttggtgtgcttcttcacgatcaactcggcttacaccacaaagagaagcacccttactccctctacttatttcactatcgactcgagtagggcgagagccaatgatggtaacctctgacaagtagtctgagcagattttaatcatctctttaatgatttatgattcaacaatacaaccctcatgcctacttctatttttgacaaaacctttcaagattttcatgtatcattcaaatgggtacttctatctcaagtacacaagtccacactacttctcctctctcaccaagtgcattgttaggggaaccattatgttaaaaaaggaaggtgagaaaaattattccaaataacacaaaacttctacaatttctaactagatattctctaacttagccacatcaactactttacaacaaagagatttgaagaataaacacaacctcataattgcatatctaactttcttatgcaacatagaatggataataactagttaaatgtgctgaatcaatagatgatgatcgtgagatttcaaaccactcaaaattaatatgtacccaatctgagacatttgaagagtacccttcaggtaccttcacctaggagatagaatcacacaaagattgcttctcttgtttagttaaagcatgacaagctggtggtaagaatgttcatcgaccaacaacttgtgggtttaaattggctcaaatccctaactctttcaaatctaggaaagtttgattccatctttgctccactcaggattattgaacaaggtattaacgaagctttacacatttttctcaatgtgcatcacatccagattatgacgtaatatcaaatgcttctaatactcgagctcaaaaaatattgacttctttttccatggcccctgaggtttatttgtaacaacgtcacttttctcacggtgacctttttttttccttagagtaacttttttgttttccaaggtcgaattgaactttattcaactattctaacacttgttccccttacaaaggtggcggtggcaattcaaatttttgcttaccgtcaaatgcttttttccaagtctaaaacacatgttcgtttggcaaaaacattcggtgtcgcatacaacaaattttcttcgaaagttttaaatacatagatcatgttttctcctcaccaataggatatgttttgtaccctttcacactgtatctagaaatatttccaaatgttggaaaatcattagttgtccacggtaatatggccttaagattgaattcttctttcctaaaggaatcatatgcaaaacaccctcatgccacaattgactcatattatcaactagaggggctaagtacacatcaatttcattaccaagctttaaagggcctgatatcaatagtgtaggcatagtgaacttcctcttcattacaaacaaaggtcgcaagttatacatcacaaccaaaactagccaacaaccatacttactgctaagggtggtatgtagattgattccatctgatgaaaaacaaagacggatattcctaagttcattgccaaatttaggccacctagcattaattgtgtagacctcaaaaagtgatcaaccgacagcgaggttgtatagatctaatgctttccacgtgttccataaacaaataaaagtaataaatacatagattttttatagaggtttggcccccttgtgatagtaggtaatgactggctcgccttttagttgtattaatactgagggttaatactatccaaatcaataaagattggatctgctgtatatcccccttaggaatataatgtatgaaccaagaatggcaaaactcaagtgatagtgcttgtataggcgtgtgaagaagagagagaagttgttaaacttaggcttagagcttggaggcaagtattaggcttaacagagcttaggttttttaggttaaagttaaggcctttatataggaggcctaaaccctagattacaacttgaaaccctatatatttatatattttattattaaattataaaagacaaaaatgccattgaatctagatattattcagctattttgttgggcttttagggcccaattcgcagcccagaggatgttgtccacgtgtagaagtgaacaaagaatcctgtagaaccctttttggccagccaagcacctgtagcgagcaggctggccggacatggcatt

SEQ ID NO: 25254 - DNA, 5481 bp, Cannabis sativa
  modified_base (41)..(50): a, c, t, g, unknown or other
  modified_base (135)..(137): a, c, t, g, unknown or other
  modified_base (5452)..(5455): a, c, t, g, unknown or other
ttttagaaattcatagttaggatgttaaacaacatacatgnnnnnnnnnntagatcttggtaaaacatattccaacaaaagctttcatagctcttctcattctttcatttaattggttgtcgaaaacctcggtcnnnattttggtgctttcattgagatttgaaggaagcgttgtcaaaaagacaacagtcaaaaaaaaaaaaagtcagagtaacaatggtagaaactcgtaacaatacacgtcaacccgtcctccttaggatgctcaaagcccagaaggcgaagaagtggcttcacgagtaaatgtgggctctgaggagcgagatgaggcaaaggatgaggaacacgaggaaagctttgaagggtatgacgcctatgacgaaggtggctatacagaactactgtcttgaggcaaaaggcagctgatcatgaagccgaacttgcaactcaaaaggaacagaataaaaggatgcaagaggtgatggttgccatgcaaaaagccatggaaatggcggagatacatatacatcccaaggccatcccagcgggacccgaggaaacaccggaagaatccttgccaagtactcagaaacctaagaccagggaaccaagccctatacggtacccttccgtggaaaaccctgagaaaaatctaacttcgatcccagggagaaagaaaaaggcgcaggatctgcgaaaattccgctcaaatttcccaaaagggaaaggtccgcagaggggaaagctccctcgagcgagtcttggccctcatgaccgggaggaccgaaagagcgtatctgtgcaccaagaacccggggagagagggaggaaaaaccggaggtaccctccaactgacctaagacaaaaaatcagtgaaaggcatggtgacttaagagaccatcttgacaagaagaaacacgtgctgccagtttccgcaggcacgttgaatgaaggaatcctagctgagttagcaatactacgcaaagacattgcagggtctcccagagaaaaaaaggggatgactcggattctgattgcgaggaccgggaaccgtgcgcccagcacatactggatgcaaagatccccaagaactttaagatgcccgagatggaaacttgcatcggagattcagacccagtgaccatttgtcccggtttaaccgggtgatgactgtcatgagggtcagtaatgacgcaaagtgtttatgttttccactaacgataagcggttccgctaaagaatggttcaagaagttggaaccaggatcagtggactgctggaacaagttacaagtcagcttttggagacagtttgtcgcggtgagaaaaattaatcttgaagtcagcgccctgactaataaaaaacaattgccagcggaaactctaaagaactttataaaaagattcaaagaagaggcttcaaagaccaagaaggtggatggcggacaacagctggccctcctccaggctgggatccgcacggggactcctttctagaaagaattacaacaagagggagcagctaacctctaagatttccagaaaagggtccaaaagtacatcaacttgaaagaagcccaagtagtggctaacggaggatactacccgaccggagtatcaggatatgcacctgatgctcaacttccaggagccctgcctccgatcactcctcaaatgagcagtataaaattcttcgctacccaggatataatcaaagcctcgctctggctcccgcatcatcacactttgggacccccatgggcaacccctcggggatgagtatctaagtttcttctcaatctacgtctgccaccagcctcacaggacctcctcagagctcctagagcaagaggtcctaaaagggcagcacctggactgagaacaaacgacagcggaggggatacacccctcaatacactcagtacatgaagcttacagacacgcaggagcgtgtatactttgccaccaggcaaaatatacattaccaaaatcctcccccctgtatagggatagttcccgaaggaatcccagtaaaaggtgtgaatatcacaacgacattggtcatagtaccaatgaatgcaagaacctgaaagacgacattgagaagctaatctgattaggtcatttgtatgaatggatcaagaatcaattaccccatcttaactcggctccaataggaggccctttacctcagggagcactagggcgtacgcccggagaacaagcgcctagcgtaacaccggaggagcactccctcagcaagcaccttgattgccaccaagacaaaatgggagagtggccatgatctccggtgagcctcatatcgaaggaacaaccagaaacgagctaaagcgttacgctggggccataaaacacgacgaagtatgggaagtcactcagctcttagcacaaagacctcagctcatggaccaacccctaactttcacagaggatgatgcaaaactagtgcgttttcctcaccacgatcctttggttatagagactcccatcgctaataaaatcgtggcaagaatattagtaaataatgggagctccgtgaacttattgttcaaagaagccttcacggccataggcctcacggacagggatctgtcactcagcggctccgagctcacaggatttaatggagcaacacttatcccaatggggaaagtgtgagttcctgtcaccctgtgcccacacacccgacatagcactttcacatattgcaccttcgtagtaatgtattgcccaacaacgtacaacaccatccttggccggccgaccttggtcgatttcggagcaatcacctccatccggcacttatgcctcaaattccctacccgggaagcgggggtgggactgtgaggggaaaccaaggagaggcaaggcaatgctacaacgtcgcaatgcacttgtcagtgctggtggtacacgggggtggagagccaagatcgatggaacaagatgagttggatccccgcgtgggatccgagacagctgtagaacctatggaggacactgaggaagtaaatgtgtgtgacctcgactccaccaaggttatccgtccaagaaaatacctagagctagaggaaagaagcaagattattgaaacattaaaggtagccacaaatgtttttgcgtggtgccaaggggatatgaccggcataagaccccatgtgattacccatgtcttaaacattaccctagacatgttgtcggtacagcgaaagcgacgtcctcttgacccggtaaaagcagacgccttagagaaagtggtagataagatgttaaccaatggcctaattcggaatgtgtactactcggaatggttggctaatccggtattggtacccaaactgaatgggacgtggcgtgtttgcatagccttcaccgatcccaacaaggcctccccaaaagattgcttccctttacctcgaattgaccaaatggtggacgccacttcaggattcaagctgctgtccttcatggatgcctactctggatacaaccaaatcaagatgcatgtcgcagatcaagaatgtattagcttcaagaccgacaagggggtatactattacttcgttatgcccttcaggttaaaaaatgcctgtgcaacttatcaaagaatggttaaaggaatgtttaaaggcctcctgagaagaaatatggaggtatacgtggacaacatgctagtcaaatctaagacatgcatgggccatgcagacaacctcgcagaatgcttcgaagtggtctggagatatgggatgaagcttaatccaaagaagtgtatattcggcgtaaaatcaggaaagtttatgggatttatcgtcagccaacgtggaatagaggcaaaccccaaaaaaatccaggctttactaaacatgccttcccccaagaaacataaggatgtgcaaagcttgactggaaagattgccgccttgagtcgattcatttcccagtcaactgacaagtgcatcctgttcttcaatattttgaagaaatgtcaaaaatttgagtggtctgaagaatgcgaggaggcattcaaaaaactaaaagagcacatggccaaaacaccggtactgtcagaaccagttcacggagaggacttgctattatacttggtcgttttcgagaacgatgttagtgcggccctagttcgggaagaggacaaggtatagcattcggtgtactatgttagcaaatacatgttaggagccgagatgcaatatcctataatcgaaaaattagtgttttgcctcctaatggctttgagaaaattaagaccctacttccaggccatcccattaaggtacttacaaatcacccactttggcaagtcttgaagaagcctaaagcctcaggaagactcctcaaatgggccatggaattgagccagttcgatatacactacgtcccacgcatctccataaaaggacaagccctggcggacttcataacggaatgcaatgagacagaggctagctctaatacgccaaccccgcgaatgtcggcatggaaggtgttcgtggatggggcgtcaaatgagaatggatctagatccgtatcgccagacggactccggctccaagccaccttgtgcttcgtgtttccagcttataacaacgaagtcgaatatgaagcactaattgtaggactaagattggccaaagttgtgggggctacaagggtagaagttttcagtgattcaaagttagtggtcaaccaggtatcaggggaatatcaaacgtgtggagaaaaaatggtcgcttacgtagcaattgtcagagaattgctttaagagttcgcagaatacaaagtggaaaggatcccacgagaaaataacgctctcgcagattgtctggccaagctagcctcacacagtgaaatagaaaaattgggggtggtacccgttgaacacctcatggagccaagcattaaagccaaagaaacggtagctacaaatgagcaaggatcgagctggatggactccatcatcaagtacataacgaatggagatttgcctcaggaaagggctgtatccaggaggttacagtattaggcacatcgatacataatgatggataatatcctttaacgaagagggctcagcatgccgtacttaaggtgtgtgtcggaccttgaagctagaaggatcatgcaagaggtccatgaagggttctgtggagatcacacgggaggtctgagtctctcaaagaaaatactgagacaaggatattttttgccaacaatgaagaaagattgtgcagactatatcctaaaatgtgattcgtgccaaaaatttgcgaacaaaccgagagccccgtccaacaaaattactctaatgactagcccctggccctttgcggtatcggggatagatctcattgggtccttaccaatagaaaagggaggggtaaagttgttggaaatatattaccaggatctagatnnnntaccatgtatgtttcattaacatcct

SEQ ID NO: 25255 - DNA, 1146 bp, Cannabis sativa
atattgatgtgcctagaggcctttgtgtctgattattttgagtaaggggttgttctaatacctctgcctgagtacgggtattaaactgatcattccctcccattggacgggttggtaatatttgcctgtctaccatttggtccataatttaaacttgtggccttggattggacggtccaccgacatgggtttgttgggtgtgctcagctaaatgctcttccgacccgttctgtggccccgtcaaaatactaacatcaatcactggttgttggctggtgacctgataggctcttctgatctgtactatggcctacctagaacgattgtcaattactgcttgctaggctttcatgatttccatctcttaatccctctatgcttcgaactggcatctttgctcatcaaaagtaagatttatagttgctcaaatatcttgttgttcatggtgaagagtgttattgtggacttgcattagccccaatgcatctcgcaaattctgtagtttggtgccatctctgactcgcctttgagaatttgtagtggacgggatcccagttccaggagaagtttgctcaattgcagtactggtatttctagtttcttgcacacctagagtgaacccaccaagaggagtagtcaccccttgacctaccgtttgtggacctgttggtggttgagaattaatctaggtgggggccatcctaggtggatctcttgggtttgtaggtgtctgcactctcggatctgtcaccattagatcggttgtatcagtttgattttcccttcatgtttgcacaaccatcctgtgtcttgacaaagacttaagacaaaaacttgtgtgtctttgctttcaatgaaagtaccaaaatattgacctcgcttttagccaatgacattgagtcaaatttaagcgattgagaataattacataacataaagtaaatagtttaatgtaaagaaaataccaaatatatagaggttcggtcccgtatagttggtaatagaccactctcctttttgttgtattgacttgtgagcaagaataacttattctctctagaaagcttttacactgatctttgagaaatttactcttagttcgaggtttctctctctgaatatttttgggtccctaaatagtgagat

SEQ ID NO: 25256 - DNA, 1319 bp, Cannabis sativa
ccgaaacaagttaagggtgcaccaatacatcccttttaagggggtgcattgtagaatcatccaatactattaatattttttattatttttctgttaaaacattgtaggtattgttagcaatttttttattatagttagtaaattagaaaaattatcaaaaaatcaaaattataaaatgattaattagccattcctcattgtatttagtaaaataaaaaaattcatccaaaaaaagtaaaaattataaataatttaatacttaattaaattaggtataatattttataatactactagacattattaatgtaattaaatattaaaattcacatgagaaactttataaagagtgtattttaatcaaacaaacacaaatatcaattaaacattattttttgtagcaattgaggttatgaattttccgttttaagagttaagtgaggcgagaaaaaatttattggcgttaaacatatagatatagttaagttaaatcatggatcatttactagacttgataattttatgatacctcgtagtagtgttccacaacacaattagtgtcttttagcatagttttaaataataccttttaacatttatgtttggactaattaggatttactcgaatttgacatgtactaattgtgctcccaaattttttagtacattaaaaagttttcccaaataattaaaattattggatctgagtacttcagtctaatattactaacgaatgtctgacgtggataaaagttcaagagatttgatatgacacatataaaagttcaaatgacataatttagtacatggacatcgtcacattagtaaaattgaacggaattagacaaaaaattttaaatctaacaatcttgatagtttgagaaaaaaatttaacaacataaaaagtttaaagatcacgatttaacacatgccaaaatttaaaagacaaaaatgtcaattaaacaaacaaccaaaagagcactaagtaaattttaaattgagattatttcataaatacctaatattgataaaaggtttacattttttttgtacaatgtacatattttttcttacatttttatgaaggataattaggatttttaagccctcaaaaatctgtaattttttttttaaaaaaaaaaatcattttttttttgtgaaagaaaaaaaaatccaaatttaagtgcataataatcatattatgtgatatttccattgaaattatttgtttggtgaattttctcatttaataaagttgggtgaaaaaacctctcttgacctgagaccccagttttcttggaaaaccacttcctctctct

SEQ ID NO: 25257 - DNA, 5004 bp, Cannabis sativa
  modified_base (4959)..(4961): a, c, t, g, unknown or other
ctcgataaaccgatatagactcgcatgtcttggttctatcagctcgttatatgatgtccgtaaaagtgactacacaagaacgcagacatcttagactcaactagtctcgaatgcattctaagcctgcaagcttatgcgaaaatatgaacagccaactcgcactatagaagtcgcgtacgttgctgtatttagtgaatgaaactggaaatttttcttcatttattatgtttacgtttttcagcttaaattattgtaaatcaatctataaacggattgacaatgaatgcaatccttgtgtaaacaataggacacttgctttgtatataaatgagtgatccaccgtgaaataaaggaaacagaatctttgcaacagtggactaagcagattgtgatctgactgaatcactatgattctcttgtgtttattattttttcagcctttttattaagtatttgtgttcccggttcgagtactcgccattctgggttgaatactcgcacttgttcaccagtttttattattattgtaatttatttttggtgttgtaaatttccttcaacaacatttggcgccgtctgtgggaacgacaatacttcttgttgatttagaaggagaatcacaatggctggaaaccaagcaaacgggggtcttaacaacgaatttatcaacatcgggatgatgaacgtcccactgtcaagaggcagagtgcctcccgtagatcttatcaatggcggggtaggacggggcaatgtgatgactcttaatctattccctgagactacaacccctcacgctggggaaacgtctacaccggcagccacaacgggacattctccacctatcacaccggcagtggtatctaaaggtatcatccagctaactattgatcagtacactacaattcaagatcagctacgtgctctgcaggccaaggtcgatggacgaaacagggctcgaaaaccctcaggtaaccaattctagatgtcgtaataaccgtactcgcagggaaccgagggccaatcaagaaggactcaatttgaaccaaccgacatcgagggaccagtctgcgaggcacctcaatcaggaggcacaaacagaggaagatcatgagcgacgtaatcctcacagcagaccccaaccgcgagacgaagacaacgataatgaatctgcctcctcatcctcttatggtcggatgcccaacagatacaccagatcatgctcggtggaaacaccgcgaggagggcgatactaggtgcattggggtgatctctgcgatcatcttaacgctgttttcagggcgcactcctagacgcctcggaacatcgaagagcctcgtgatccccaggtgggcgatcaaggcgtaaacaatcataccaacccgcctaccgcaccaggtgcgactactggagtcaatatcccagcaaacatcgtcgcgatgataacaacgcctgcaatgacacagggcaatactcccttaactgggagtatcaatcaaggtatgctcctacaggctttaaagatgatcgagcagcagagaaagcccatatacaagttacatgggacttctcctttcaccgtggaagtgcgacaagctcgattgcccaagggattcgggttattcgaatccctaaaatataaaggtaccactaatcccatagattacttagaaaaatttaatactattatggaagtggattaggtaccccaacttgcgaagtgtcgcattcttgtggtaactctggaggacaatgcccacgattggtttagccaattgcccgaagcatccatctcaacatgggaaacctttgtcgaccttttcctcacacattttcaagccccgatggcctataggccaccctataccaatatgggtaatattaagcaagaacccggtgagtctctacaagactattttaaacgttttaatgccgaagtaacaaaagtagagaaggctcccgagtcttcactagtgtgtatgttgataacaggtgtcctgccaagaaccgatttctgaaaggaactgcaagcttgaagacctaaatcaccggtcgagctttttgctatggcagagccacataagaggattgaaaattctctagctgagttagagaagggcaaagataaacgtaagtcaccagtgtcgcggtcacgattctgcagtcccagagggaaaaattccagaggaaggagtcccagaagacgcagtccacaaagacagcgaagtccaaagttggccaagtcccctccaaagaaggagtcctctctgaagaggaagggtggtccatgttttgtgaattatacagagttggcagtacctcaggaccatatctacgccatcaaagagaagaacggggtcttcaaaaagcctcccccaatcaggggaaaccacgacaaaagagacccgaagaaattatataagtaccacagggatattggtcacactactctggaatgttggtttttgcaggatgaaattgaagagttaatcaggcggggtaagttcaacaagtataagaagaatgaggaaagtcatccctgagtgaatgacaaagaagaaaatcacaatgcgagtggttcaaggactcctcgcaatatcttgactattattggcggaccccatattgcaggagattccaggaaatcacaggagcgatatgcgaaagaagccaaagagaagccgctcaccaacgtgaacagtttgagtgagcgaccagaaaagctcttcaaaagggaatgtgatgatatcacattcatggaaagcgatgccagatgggtccaccacctgcattccgacacactggtcatcgttgctaatattggaggagataatgtccaccgcatacttgtggacaatggaagttccgtgaatctgttgaatttccaggcctttaagcagatgggattacaggagaaggatttgcgacccgtcgtatcaagtatttatggttttactggagacaccattgcgctgaagggaatgatcaaactcccaattactctgggaaccgcacttgtggtggctaagtcaatggctgacttcgcagtaatcgaccaacactcggcatacaatgctgtgattagtcgtcctatcctgaaagagatgaagattgtgacatccatttatcatctcaccatgaagttccctactcgcgctggagtaggatcagtgcaaggagtccaatcggattcacaagaatgctacaatacagcttaaaactcgcagagaagaagtcagtcaacgtcatttacttgctagaggcaccaccccctcgacaggacgtgtttagaatagaagaaataccgcataaagacgaaccagacttggatcctagggtcctcgattacactgccaccgcccaagccgcggaagacactattgaggtacctatagataatagaaaagttttgaaaattggttctaaacaaacttttcaacaacgagaaaagcttgtcacttttctcaagaaaaatctggatgtttttgcctggaaacattcaaacatggtcagaatatctccgcaggttatgtgtcactgattgaacattgaccccgaagtgcgaggtgtctgacagaagcgccgcaaaatggaccccgcaaggtaccaagcgctaaaagaagaagtagatcaccttttggcatgcggcttcataagggagtcgttctatccaaactggttagcaaatcccgtactcgtgcctaagcctaacggctcatggcgcacatgcgttgatttcactgatttaaataagacttgtccaaaggacagtttcccacttcctagcattgaccaacttgtcgatgccactgcaggtcatgaacttcttagtttcatggtcgcatactcgggatataaccagatcccgatgtatgaaccagatcaagaacatacctcgttcattacagatcgaggtttgtattgttacaaggtaatgcattttggtttgataaacgcaggtgcaacttatcagaggctggtaaatatgatgctcgcagatctaattggggacaccatgaaagtgtatgttgacaatatgctcgtaaaatctcaacatgcaaaagaccatgtcaaccatttacaagcaatgttcgagatactacgacaatacaaaatgcggctcaatcctcttaagtgtgtctttggggttggctcagggaaatttctcgggtttatggtgaatcagcgaggaatcgaggcaaaccctacgaagattaaagcattagttgagatgcgatctccgactaagccaaaagaagtcaaaagtctaacaggtaaggtcgccgccttaaatcgttttatatcacgttcctctgataaatgcaaagaattctttcaaattttaaaaggcaataagaagtttcaatggaccaagaagtgcgaagaagcttttcaagcacttaagacacatttggggcagcccccaatcctgtcaaagacaatacccggagaagttttatctatttaccttgcagtgtctgaatatgcaattagctcggtactaatctgcgaagaccaaggtaaacaatatccggtgtattatgttagtaagtgtttgctagacgctgaggctcgttacccgcaaatggagaaactggcatttgctctggtaatagcgtcaagaaaattgcgaccttatttccaggcccatagcactgaagttttaacgaactaccctttgaggcaagttttggcgaaaccagaagcatcaggaagattgttaaaatggtcagtagagttgagccaattcgatattaggtacaaaccaagatctgagattaaggggcaagccctggcagatttcatactcgagttcccgagcactgaagtggcactcatagaagagaagatagatcctgatgtaccaaatggcgaagggtggattttatacgtcgatggagcctccaacagcgaaggctccgacggtggcataatactcataagtgttgggttttatgcccnnnataaaactcatttcatataatcatatttacttattaataaaga

SEQ ID NO: 25258 - DNA, 2027 bp, Cannabis sativa
catttgtgaaattaaccctattttaaaataagttaaagaatatttgttagaatgaaaaaaaaaaaaattatatatcaattgatcggtgtagattcaaaatctaatactattgaaagtgtgaactttggtgtatctttaaagtagaatattaatgtaaaaattccatactaatttggtacttggtagaacgatatacccttcgaagttcgaaatgctttaacaaaaattataacttatttatataagtgtatattgtagttatattatgcatcttatccttttaatttaaaattttaaataatttatcgtgttaaaagtagaattcaaacaacaatcagttacacatgtattttttttttctatatgtgcaattaattaactgttatgaattatatttttcacactatattatttaaattaatttgttgatgaaaattaataaaatttgttatctattatacaccatctattaaaagaaattgaattataatttttcaaaatgacataaatatgtagggacttttttggctcccccaacatgagaattgtcttatcttttttattaaaagggtttgctttattagttaataataatattaatttcatcatatatataaatataacacataaaggaaaacatttaaatcttattttttgtgaaaaagggtttggagaaattatagccgttgaaggtgacatgacatggaaatattgcattaggtaggatattaggtttacatgataactacgtgattgagtaaagttcactttcaattaaaattacaatttttttttttttttgtaaaaagggtgagtaatgtaatatgaaaagtatatttatatttaaatgtttttttttaacaaaatagtactaatattgtaataatattatcgagagtttgttcaacaagatgaatatatgtagaatgtaatagaaatgttacttcgcaaaaatttatcaatagaaatatttatttttgcttcatatataagattcattatatttgtcataaaaataatgatttataaaaattctacgaaaaataatgaaataaagaccatgtttataaataaattaataaacatgtcaccctatcaaaataaattagatatgtattaatatttcaatattatatctaatttcttacaaattttggaatttaatacaaaaaataaaaagaaaatatattgttaattgaagccaaataagaaaatatattgttaattttggaatttagctatagttctcatgtgcttttaatactagttgtttttttagggacacttgtcaaaagttaatgacttaattttatttaaattcaatatttaattaattaatgtcattaaatttgggaaagggccacgtaattaatttgtgttaagtagtgtagttaggttaggtaagaaagaatgagaagaaaggtgtttgttgaggcttgaaaaccaactaaaactaactccatctctcattttaattaccattatatatgtagcttttaattaccattatcatcaaccttaaccatataactaatattcaagaggctaattgtaaaaaaattaatttagggagcaaataattataaacatatataacttattttatttaacatatatatgttttgacatgtgaatttatgataaaaatattcgcaatcagcgcatgactcttctcaaataaaaatagttgatcgtctaatcgaaaaatatatattttgtcaaaccataaattgttaaattttcaataccaattacatgggacaatactgctttcaaaaattatttaacatatttaatacagggtgggagaaattttggtttatggacagccaaaacattaaaaaattataaaggaattaataaattcatcgcagatgaaaaatatataagaaattattttaaaaaaataggatgcatttttttgtttgataattttatgtctattcatccttgttaatattgttagcaaaatatattttgtattaagtaagagtatataaatatatacatatttgtctagcttgttt

SEQ ID NO: 25259 - DNA, 1654 bp, Cannabis sativa
taattatttattaaaaatgataaattattttattatatatatatgatatacatttgattgtatatgatacattattttattttattttataatttaattattttaattattattttttatttttttaggaaattatttattttatttattattatatgtttttattttaattttaagtttttttagtaaataaataaataaataaaatagtccagtctattcttaaactaaacatagaattattttcaacataatctaatcttgtccaatctaatctaattcaatcaaattattttcagtccaatcctgagttcaaacaggcccttgaggtattttttaacaaaaatttgttattttttttttttgaacaagaggaataattttattcaaaaaaaaccaaaacaagatacaagaacaactgaggcaaaaccagccccaaccagacaagctgagcaacaaaaagaacggcacaacaaaccaactaccagtttgatattacatcaataaaataactattctttctactgctattgaaggggcccaaacataaaattctagacttcatcattttctacacatcctggctaatcctgcgtggggaagaacaaaacaagttaaaaagacagttatttctattttgccaaatgagataaaatgtggcagcagccactgcattaatcattctgttctggatgtcatgccgagccaagaaacacctgtcacaaagatcagagatggaagttggccaagtaacttgaccaagccaagaccaaatatgattaatcacatgtttagcaaacaagcgatcaaacaaaacatgatcatgcgattcttccttcagctcacaaacgggacacctgatgtcatgaattggcatgattctaactagcttgtctcgagttagaagcagcgagttgagaagttgccaatagacaaacctgtgttttggaatcacaagtctgtcccaaacccatcctgcaaaatcaactctattctctgtcagctgttggttatagaatcttgtagcactgaatttcccactcttgactgcaagggtcagctgataatcacttgttttgccacccttagattcagtaactttttaaaataccagctcatatcaaatttagagggataatctcaaatagattgacctttcaggtagattgttcactcatttcacctagctcaaaggaacttggccatcaaggccttgttccaaaaatttgttattgtacatatgaaatggaattattagtatttcgacctaggttgctagaaagcctccaaatttaactcaattattttcttagtaccattctacctaatatatcatcacacattttatagaaaatatcgaaagaaattaattatgtatctatgtcaaaaactcaaaaaatgtggagaaaaactaatttctccatatctacaacacctaatccgcccattgttttttattttattcaaacttaaatttaaaagttatttattgagctccttaaaaaaaaattatatattgagctataatctttaaaaatgaatttttttttttttttttaacacgagatgcatgcggctcagactcggggccttttcgcacgtgacactacttttctttttcacgtgcacttccttatttttgattgaatttgtt

SEQ ID NO: 25260 - DNA, 4113 bp, Cannabis sativa
cccacaaatttgaaaatttatgtaaagcccctatatataattatattatataccagatataatatcatatatattagtgaaattaatttttttagaaaaaaaattacaaatataaattgagctcctaatacaagatgtgtctgaatatgagagaataattatttatgaatttctaatattttttttttataaaataacttgtaattatagaaaaaaaaatttagtatttcatatttaaaataaaaggttttaaaaattacaccgtataataacactcaattctcataggggtatgagaattagatagtatagtggaaacctctccattacccttccattacacaattatagtataattgcatgattagacaaacacacgaaaactttataattaccttaaattaccaattgcaattttcacttgggcttcgtaacgtgccctaaaagttacattttatttttagtttaataatttttaaaatattgtataaaatatttataaaaataaaacaatataatatttttttcaattgaaatttatacttttcgtatgcacttattgaaattgccctccccaactatctaatcctggctctgcccttgtaggtgcttacagagtttcaaaaatataacttaggtattattaccgcaaaaaattaaacttaggtatttatttgcaactaggagttaaacttaggtacttatgccgcaaattactctaaattatattttttagaattttttgtggttaaaccctccaaactaatattttactttcatttaacccttcaagctcaaattttaacggtaaaacctgtcaaactattgaaccgttagtaaatttaaggtgtcatcccatttacttttgttaattgcgaacatggctgccaacatagttatttatgtgtacaattttaaacatgtgtcacatttatattggtacatttaatttaattatttaaaaattataaaaattattttaaatttttgaaaaataaaaattattttaggttcttattcctaaaaaaatcatatttttataaaaaatagatattgtaaaaaaacaattaattaatacttaaaaaaaaacttttaaaaaaaataacctaagctatctttgtttctctctcactctagctcgctgctattcttcttcttcctcacaaagcatttatgctcaaagacagaaaaaaaaaaaaagatgatgttctttttaaaagatgatgcagtcatcctcatcaacatcaacccttgaagatgacgatgcactcccctcgtctctggtttcgccagcattgatcgaagctccaatggttcagataaaaatgccaaatctgaaactcgacccactccgtcgagcacaaacacttcaccacacaaatcgaacgcatcgccagatctcagatctgagatctccacaaccctgaacacaaagaaaaatatgagaaactacagatttgagcatatgccgccatgtatgacctacatattttggcaagactcaaaatgacaaatagaaagaggaagaaacaatgtcgcacctgcctagatttgttcatctcagctttggagtagtctcctcgtagcttctgcgatgagacgaaaggtggcggacatgtcagcaatcgtcttcttaagcctccccatctttcatgagtggttgtctttgagcatggctgctttcttgatgataaacaagaatagcagtgagagtgagacagaaagagagacaatttaggtttttttttttaaatttttttaattatttattaattatttttgttgacgtagtttttcgtcaactgatctaagaagatcgtaataaaaccgcaaaaaattaaatagacactagagatttatagttactcacccccatgttgcgatggtaatggggctacgtctacttgtagttttattgattagatctgacacactagagttatattctcaagagtgtgtggataaaaatacaacaaaggatttcttgttaaaatcttaatcgagatttatgaatataaagctaatgagagacttgatattcataaatctgatctaaattaaaggttgtaaagttcttgggaacaataaaccaattatttgttgaaaatgtgtgtatcaatggtgtttgaggactcgtgtcgattgagtatggtggatccaatggagaaggtgatggaaataatatgatattcttggctgttgtcaagtgaacttataggggagggtcacgaagagaaagatccaaaagagagaaaaaaggtcccaataagaagatcatttttctagcctccttcttgaggtatatatataggctagagggtttgttagtgatcccccacacattgggatatctcgttaacaaaccccatatctcactctttttatgaataaaatattataagtaaataaatatcaataacaatctccttgcatctaggcaaatatcccacaaatataggacaattggttattttcggttgaggatgcaccaatttaaaatggagagatgggatgtcacgtctctcctaaaaatgcacgatgttgatcatgagtgctgaacagatgtgttttggagtgtcaatgcttgtgcacaacgccacataggatgtggtagtgtgctccaccaaccctcgcttagccgcatttcccgattctcgagtaaaatgtacaaacttttcttttaagctaattgtgggcccgataacctccaaattgagtcatggctgtgagacacactttgatcagtcctgaatttgtctctccaacacaagttgaacaaggtcatttggataaaaattgagagagttatgcctattttactgaaggtcgtttatgatgtcttgtaccagttgcgagcactgcccccgagccgaatttcttccagcaattggctcggggacttgcgccccacgaagagacatctgacgcccatattactcggagtgggcaagttttgaagaacattggcataggactttcgaccaagagggcctttgacagtgacctggtcccggtcaacgatttggtgcaaagacgctttgactctctagctatggtaattacacctttaccgctccatcttatgcatatgtatgtgtatatatacatcttttatacttatgatgtggctgactgtcctgtttcgtctttgtagtttggatgacctcagtctttaccagaggtccactgcctctcataacacctacacaaagaggtgtatggacttcaaaaagcgtattagggaggctactttgacaatcaagaaccttgaggggagagttacctcttttgagaaacaattggaagaggccaatgctaaacacaaggctacttgaggagcttggtttgctaaataccaaatacactaagttggaagtcgaataaaaggccatgacggagaaccatacggcgtccataacaaatttggagtcggagaatgcacagatcattgagcagatgtgggtagatcacaaggcagaggttgaacagatgaaagcagatcacaaggcggaggtccctcgcatcgagaaagttgccaaggagagcatttttggaatatcatacttgtgttggtgccaaaaacgagagatggattttagcttcatgggtgatctcttgggtgattttgaggagcattgtcgtaaagcccaggcagccgtgaatactactgaggtcactactgcagcggaaggcggggagaatggagaagaggccacttctggacatgacccagagtcttgaggattggagttccataagggtgttggcatgtttgtagtggtatccaatgttggagagcactgccattgactttaagttgtttagtcttctttatttttcctgtagtgttccatgcgagagctgccttatggaagtgctctccatagaccaactttaggtattttgtcacctgtgtgagaacatattaatatttatgtctcattccgccatatatatttattttatatgtattgacatttaggcacacatgggtgggttcatttcattgtcaacttggtgtagaatgcttgtgagaagttacattctttgagaattataagtgataattatctcattttatgagataagaaagtgaactatgagagttacact

SEQ ID NO: 25261 - DNA, 1964 bp, Cannabis sativa
  modified_base (26)..(32): a, c, t, g, unknown or other
  modified_base (409)..(417): a, c, t, g, unknown or other
cacaacataggaatcatgatttatannnnnnnacaatttttttacttttagtcataagttttgttgtgactaaaagttagattttttgtagtgcactccttcaattgtttggattcttcacagtcttacactaactatgagtaggcatgcactgaattactaaagctcgaaaatatttgtgaagaacactcttatgattcgaaaatagaagagagaaagaagaagaagaagttttaaaaacactagttgtctaacagaatggaaactaggtttagagtaattaattggataatgagactatttttttttatatatatatactagttcttgaattatatgaaataaaaaatgataaaataatagcaaaaataaaattagggtcctacacttataataataataataatannnnnnnnnataataataataataatatccatgcatgcattacagctgttgaccacctcaaaattaatattgtttttacatctacatatatactataattgttttatttagattattaacttcaacaagaaaaaaaagaaaaaaaaagattaattattaaaactttttctgaaacgtgcgtacgtatgcatgcatagtatatatgcactcatatcatgatgaaatttccctattgggttatatataccaacaaacttccatttttatatatacatattattattattatataaaaaccccctgcaggtgtagatatattgaaaaacgaatgctttatttttgtacttagccatctcttgttggacttattagttgtaaaagattaggtataaaatccacatcattcggaaaaaggaaaataactttaatttttaggattatgtgtaatgttagatacacctttgaaaacacttattacatgtgatgtttaataaatattaaccatttataattttagggcaacgatttcgtcccgcctgaagttatctcgttggtgcaaacgtgtgcaatcacacaggtcaatttatactcatcctgagcatataattttttaatttttcagtaccaactcacatttatcatattaagttcgtttttcttttctctttgtttggctaatagactaaaataacttctatttattgggtaatatttatgtgacacgtgacttaatttttcttttttattttatgcaattgctattaactaaagtattgctattgggcactaatagtgcttaatactttctaaacatattttcttacgattgtttagcagtaatttttaaaaattattatattaaattatagagtaatttgtgatgtaaatatctaaatttaactttaaactgcagataaatacctaagtttatttttttttataataataatacataatttatatttctattagaactttcgtaggtactttaattctaaagtcaaaagttgtacatttgacattggagatctcgtcttgagaagagtcaaacctgcttcgtaagaatcaggagtgggagtcttaggacctaactaggacggaccctatgagatacaacataaagtagtaaatagaatatttcaactcaagagaatggatggctcaaaaatccctcgcgcctggaatgcagaccatttacgtcattattacaaatagagtgggagtatctaggtctaacatatccgcaacaaaaatactctaatttaagttggtctaaaattaattaattttaaattatgattaaatagatttatataaaattaaatttgagataaaaattaattttttaattaattttggaccaacttaaattaattaatttttataatatttattaaaaattaatattaaggatgaaaaataaattttacttattttcaaatctacctaaggtataattttataaatgttaaattacaatttatatttagatttatctaaatattaatttgaattaaataaatatattaagaatactaaaataaatagattaaaat

SEQ ID NO: 25262 - DNA, 1857 bp, Cannabis sativa
ctacattaatactaatgcttagcactagaagtagcgtcttgcgattggttagtgtcaagaaacagtttcgtctcaaaatcaattagtgatgagtggagtagcaagtaattctgataccatgggttccatctcaaaactaaagaaacaaatagcgggagatatccaagtgtctcgaaaagcttagaaaatttgtaatcttttctttgatatgaataaaagacttgatgtgctattctcacaacacatagtgaagtgatgaaaatgacttggttcttcttgcagatacctttatgcagatttatatggttctggtatgtgggcaggaacagaaaatccaaaagatagtgggaattttacaagtactaaaattcaagtcaattgtgctatggactctcctattccatgtagtgatgaatttggaagctcagtctctggacttggtttcatattctcttttggtgaagataacagaaaagacatctttatattgtcaagcaatggtttgtatagggttgtaaggcctagtagatgtaactatgtttgttcaactgagaattctactagtcctgttagcccaagatcacctcctcaaccatcttcttcgccctctaccggtacccggttgagaaattattctatgttagagctgttgttcttctcctttacctcatttttctctgtttgttttttcttagttatctaatgtgtcatctccttttgaaactttatggcttaaactgcatcatattggaaggtcatggacactaattaaacatgtattatttaatagagagaagaattagagattgaatatattaaattatgaagttgcagtcattttaattgtgggaaaacacatgattaagtttataaaaaagttggaaagttttgaatttgataaccaatgaaaattatttttgaactaaaataagaagtaaataatttagtaagtataaatatattaatattaattttgaactatattaatttagtattaattttgagctataaataatttaatatttttttaagtaattttatatttcatatttgacacaaaaagtaattttgtgatatttttatatcaactttaattattatgctctattacataattgtaaatcttgatgcaaaatttaatatgtcatttaatattcttaatagtttattaaaagaaatataaaataataataataatataaatataaaatttaataataataatataagtcattgtaaaaaaagatgttaaataaaatattaaaaataacataataataaatataaaagtataatgtaatacaaaatttacatcatattacttttcacaaagtaaattatattttacatttacatcactaacataaatttaatttcacgagaaagtaacaatgtaggacaaaaacaacgacactaagtttgagttttatttttgtaacaacttagcaaacccgaacattactattaaatattaatagtacccatcatctcttataaatagtatttcaccattgattagcgatgtttaaaagttattttttaaatagaattgttaaaaaacactattgttactttacaccatttttattgtcatactactattagtgtaattaagtatcggatctcatataacttaagaaaaatagcttttatgcaatattgctaactaattgtagagcgttgggcactactagtgtctaatagcaatactctttcttaaattatataaaactcgatacctaactacactaataacataatagtatgacaccgtactagtcgatctgagtttgaagtggcgccttttaacaattctcatagcaaacactaacaagaaatggtaaagggcacccattt

SEQ ID NO: 25263 - DNA, 2705 bp, Cannabis sativa
gtacaagctgcttgagattgagtttgacttttgcttgaagagctagaggttcaatcttggctggaaatgaataagcagaagaatggttcacaaactcaagttgaaaattgggttacacccaggagaaagggctcaaaaatggtgaatacgagtcaacaggaggctaaagttagtaatggctatgaggtgttgaaggagattgagggggaaatgatatcaatcccatctaatggataacaataatattattggttggaacgtgagagggttgaataaagtggagaaacagcgtgagttatttgaatgttgcaagatgaataaagtgggttctggagctctctttgagaccgaaattcaccatgacaaagttgagattttggttaggaataattcgaattggaatttctattctagtcaggagatctcgtttagaatcttgttattttggaaggacaaaatggtggaagtgaaggttttactagaagataagcaaatggttcactgcaagcataaaatggtaggattcaaggaggaattctaccttatagtagtctatgggaaaaatttgattactgataggaaggacctttggaataaacttggaggaattggtcacttgaatgagccttggattatcattggatatttcaacgccatgtttcgcttcaaagatagatatggtgggaggagaatcaaggacaccgagttgcttgatagtcaaagctggctggctcaggggcaggttgaagagatgaaatatgctggctcgttttacacgtggtcgaacaaacatgagaaggggaacctggtgcactctaagttggatagaatttttgccaatgagaagtggattgatgctttcccgaatactgaagctagctttagatgggggaaattttggatcataactttcgtctcattaaacaactagcgatcaaaaacaggggtttcaagccttttcggttttgtaactactggatgtctaaagtagtctacaaggagaaagtgctaagtacttggggaaagaagacttcaacggatcttaaaagattgtaccaacaactgattaggatcgaacatgtccttaaaagatgctttgtctccaagaatgaagaccttgtcaatagttataaagctgcaaaagaagcctactttagtgctcaagaatgttcagccagcaaccctggtaatgttacagcactgagagaggagagagagctttatgagactttccaggagatccaaaaacaatatttcagctaccttcactagagctcgaaaatgaactggataagatatggggatgaaaattcgagttatttccattcaattatgaaaaagaggaaattggagaataagatcttttcttatagcattaatgggaaggttgttgatgagtatgaccgggtcattgatcatttcctaaatcacttttgcaactatatggggaggaaaagctctgctactagaagggtggagtatgatgtgattgatttgggtaacaagttatatcttatgcaacaggtgaaactaattcaaccatttacaaagaaggatgtgaaagaggatctgtttggtattcattctgccaaaagcccaggaccggatggttatggtgcaggattcttcaaagggctttgggcaaagttgggagatgatatttctaaagctgttttgggtttctttcaacatggtcatcttccgaaggaggtgaacgagacaaccatctccctcatccccaagactgagaacccccaaaatactagtgactacaaacttattgcctactgcaacactatatacaagtgcatctcttagatgatttgttcaagactctctgaagttctgcctgtgctcattcatgagaaccaatgagcttttgtcaaacataggcagcttgctcacaacattttatcttgcaggacttgttgaaaggcccgaaagaatttatcttcaagatgtgttatgaagatagatataagcaaagcttatgacactgtggactggttatttgttgctgatctcttaaaaggtctttgttttccttcaaagtttatcaagtggattcagagctgtcttcacggtgcttcgtattctcttatgctaaatggaagaattcaaggctcttttaaaggcgagaagggtcttcgccaaggagatcctatgtccccgctcctttttgtgctcattatggagtatttgactagattgcttatccagaagtcaaaggagaaagggtttggttttcaccctctttataaatccattggcctagtcaatctttgttttgcggatgatctaattatcttttgcaggggtaatgagaaatctgccaaacttgttaatgaggctttccatcggttcagtgaaactacagggctagtggctaataaatccaagtccactgtgtactttgggggtattcaagatgttggcaaacataatcttttgaacattcttcaaatggatgaaggaaagtttcccctcaaatatctcggtgtgcatctcaggcccaccaaagggaggttctcagattgtgggatcatcattgataaagttcacaaacatttgcataattgggctaccatgaatctctcgtttgtaggcagagctcaactgatccattatgtccttctgggtgttcgaaactattggatgaaccttttcttacttccccaaaaagttactgcggccattgataaatg

SEQ ID NO: 25264 - DNA, 4071 bp, Cannabis sativa
actgcccatattaccaatgaaaagtaggattagagtttggttataccattgctattgggcacaagtggtatctagcactattggttaacgatattctttaaaagttattatacagaatttgatacttaattgtactaatagcgatattacaccgtggagggtggtaggctatgtgtttgattgttaatggatcgagacttcctccaattcacaatttgcattattttacgacaaaaatattaagctgcacttatcattggccctctttgtttttccttttagttacaaacttactagcattagaattgttctgtgaaaattacttgctacatgtctagttttctactcattgtcttggcatgagtcttctagttccaaccatgggttattatatcaagatattaagtaagagaagggtaagaaaagctctttcttgttggaaactctttgaatcaatagcaattgtagcacttgttgccatttatgaaaaatgtgttggcccgagtaaaatatgatacgagtttgagcacgacacgaaaatgtgaaaggctgtgttgtgattgccctttaaaatattggtacgggacaactcatattagtgtggccatatttttaaattttgttaattttctttctatattttttaattttaatttcatatttatggataggtaacaagtttattaaaaacaatcaaaaggtctagtacattttaaaaatatatatggatttattaatgttaggttaataaggtagaactcatttgaaataccaactaataaggtagaattcatttgaaatatcaactaataaggtagaactcattttaaaaaaataattacatgtattgtttttagcaaaaatataattacattttttttcaagaaagcatagttacattctaaattaataaaaataagcataaattagtgggattccttctttgacatagtcaaatatcaaaaagctctctctattattttagataaatgttaaaagacatctatattgtctagtatatttgtaaaatataatgtaatatcaggttttatttattttaatttaataaaaattataaaaactgctaattaattataagacactatctcataatagtgttaagcacatttgtacctcataacaatgtttattatttaatcactctatccttttgaggacaatggtttctttttttcaattcgatttttttaattcaaaattaaattgtaattttattcatgtgctttcttttttcttttttttttttttaaaggaaaatcaaattttattaaccttcaaattcagttatcaacataggtaacaactcagttaaaatatttttcatattgaaaatacaatcaagataaaataaagacgctcttgcaaactcatgagcgactctattagctgatcgcttaataaatcaaaaatagacattacttaacttagccaacatgactttgcattcctgaaacacacaaccaaaataagaagacaagctagttgaacttcttaatgcttgaacgaccagaagaatatcggtctccacccaaacagaactaggcggttggtttttaatccaacttagagcttcccgaaagctcaaagcttcagcaacagccggagcaatattgcccatgtgcagcttcgcatggccgtcaatgagcagaccattatggtctcgtacaacaaaagcaccccttaactgattttgtccttcaaaaatagctgcatatacttttaataaagaaagaaaagaataatataagtgctatggtggacgccacatgtatacgtggcaaaataagaaattgtagaatacactcctattttttcaccgtttatttttttgaaaaatatcattttttatatattttttcattaaaaaaataaaaataaaaagaaagaaaataaaaataatatatattgtttagaattatgttttttttttttggttttaagtttatgctttgagggctgaatagaaaatgtataaaataaaaataaaaaataagaaaaattttatttataccccaataatttttagagacatcctattttaataatttttttatataaatttatatctttatttttttttttttttgaaaatcagcataatcatgtattaaataaaagataatagttagacctcccggtcattacaaaacaggttttccaaaaaggaggagaccgaaaagcagtcgtacaactggtgtgtaaacgcccacttagccatattatgggcaacataattacaagttctagtaacattcaaaaaattacaacatatacaggaaggagaggacttaaatcaaaatgagacatagttctcaatagcccaatgagactccttcccattgagagtattgatcactagtctcgagtcactctctacaattacaaatctaaaacctaaatccatcgccgcagagatagccaaacaacaggccgctgcttatccacataacacatccgtgaaatccaaccgagtcgcgtggaaccgaaccaccttacccaggtgattcctagctacgaccgctatgcagatactttctaggcccactctaacatcacaattcattttaatccaatccagaggaggtggattctagttctccctcaaggtcggagttgggctaggcacaagagaagcacgtaactctgcaaaagaagtgtaaataaggtcaatacatttcaatacatcggggggattattattgtgtacaatttcgttgcgctctctccagatggtgtcaacaacaatcgaagcaaaaagaaagacatcctcagctcagatacccctatttttaagattccaaatgaatttaaccctctttcaaaaaaaaaaaatgaatttaatccagtcccaaacacggataccattgtcacagacaggataaatgccccatggtgaagagcgccacaggtgcagtgccatatcgcacgaaagaaataagtgttctatagattcctctctcaatccgcataagggacatctcatatcctctatctgaaatcttcttccaatctctgatctaacagggagcgccttagataggatacaccactaaagaatcttatgcctctctaggattttactattccataaacttgttccaaagcgacggagccacctcacagtgaccagctctttctgaagcctgagcaagatatgccgatttacacgagaatcgcccattggactccaaagtccacatccatctatcctctccctgtcctaaggggtttcctccttttaagattgccgaaacagttttctaatcaaagatactgtttaattatatccttaattatactaattttttttttttaactttttctttcaattcatattcttaaaaaatatatatattaaacaatatatatattaaacaaaaaaaaaaaattatattttaaatattatgataaaaagattatatgaaattttcttagaaaaaaacaagaaaaatatataaatgagttagaaaaaattatgaaaataaaattaaaataagtattaaaattaacataaaataatgtgaggaaaattttttaaataaatattaagagtaatttttaaaaattatttaagtttatatttattctaataataaagttcaaatcttttttttttgaaaaaaatagaattcctcaaaaataatatttggcgggtgtaacccgtacacccggtttcttggggttttaaattaatgatgtttgcttgatttacacgccatctttatttttatatttttaaatctgtaaaatgataaattcatttttaggtataatgtgtaaattttcaaaaaagaaaaaaaatgttataattaactaatgtgtcaaatttttgtagaatgaaaaacatcacctattatttttgtctcgtacaaatactttgatttaaaatcattcatttgatttaaaatatataataattatttttaattaatatgtatatatatatatgaaggtaccaaaaaacatataatacaactttgaaatgtcaacttaagtggagagcaagagtatttttaaaatatgggccggacatgcacctatttacagctc

SEQ ID NO: 25265 - DNA, 2775 bp, Cannabis sativa
  modified_base (164)..(175): a, c, t, g, unknown or other
ataaagaaaattattattgttttatgtattatgtataaaaaaatatttcattttgttttagattatgtttttttataaataagaatggaatatatatatttaacttactatgttcttaaatatatttgtactagatttttaaattactattttttacattaaannnnnnnnnnnntatataatttttttaaaaaaatatgtacatatatgtgtggattggattggatcaattacttttacattgtaatcaacatccaatccgcataagtacggattttaaattttacaatccaatctaatctgcataagtgtgaatatccgtactttgcgaattggattagattgaatcgtgtggataattagattaaatatttcatgaacacccctaactgccaacaaggatgatccatgtgtatataaatgtagacatggtgtatttatattggtccatataattttaactatttaaatattaataattactttaaaaataaatatatgcatctcactctttctcctttccagattctaacaaagctcactacccagtcggccacctctggccactgatggcctagcctgcctttggccaccatgatactcgtaacccctcccaaccccgcaccctcttcctcgtcttctttccctctctcatatgactttccctttctctctctgtctcaatctcttcagtcatcatcgggtttaatggcaaatcagagacatgccttatcgtcgatgaaaaccaggagcctgaaaccttttcgatttgaacgttctccaccacgagtgactcacgaacaaggagctctgaatttttcgtctctattcgtccagatgatctagtctccctctttcagttcttactttttattttttttttattttttttaatctgaatgttctggtggctgtggtagtagatttgatttttttcaatcttttctcttaatccttattaagggtaccaattcagttaattctgttatagatgttagttagtttatcaattagtttgatattgttttaactgattttcttcttcctctctttctgttttcagcttgtgtattggctgcctatataagcttgtatggtactctttgtttcattgaataacaattcactctttccgtatttttttcttcctatgttttctctttctttctcttcctttcgttttctcttctgctacaatgtctaggaaagttaacatggtatcaaagcttgaatttccgccattaatgggcaatgtcattactggcaatgggaaaagatttgctactggagataactcgcaacaagctcttcaagaatcctcgagccagacacagagtcttcaacatcctcaaaggaaggatcctgaggactcgactccaatttacttcaatcacaacctttccatcaagttaaatgatcataacttcttgttgtggaaacaacaagttttagctacaatttgagggaattgactacatcacttcatcagatcctccattgaagtaccttactgatgaagatcgtgccaggataaactacaatattgcttatcttgattgggggctcaagatcatctgttggttcatggcttctgtcatcgatgactgcaagccttttaactcgcatggtaggatgtgaatctgctagtcaattttggtctaccttagaaaattacttcactctacaggtctctgccaagatccttgagtttcaaacgaagctccaaaaatctcaagaaaggttctttatcccttaatgaatatcttctcaaagttaagaaactttggatttgcttgcatcggttggtgatactctttctctaagggatcatgttcgtgcgatcttcaaaggattgctaagtgaatatgacactttgtcatatccactaatacaaggcttgagcaatactctatagcagagattgaagcacttctgttggcatcagaatctagaattgagaagacagatcgtgaagttgatctgagtgctaatgttgctacagtggaacctgatcctgatcttaaagccaatctagccaactatggtagaggaggatacaaacaaccacaacatttcagtcgattccacaacaacacaggtcctggcaatccatcttttggcagaggtaactcacctaccaattttagcaatttcattgcttatggttattcctactttactcctgttttgacagaggagtttgattgcctgccaccaataataaactccagtgtcaactgtgtctcatacttggacacactgtccaaagttgtttctacaggttatgatatttgagtttattcaaattacagtcgttatgctctgattctattctgatgcctcaaatatgtttgtggtacgtctagttgatgtcccaatgctagttttgatccttttacactaagacggtcccagaaactaaaaccctaggtgagaatgttaacctgggcacctccaggttgcaggtttgagtaatttcatctcccggggcttggattatgttgctccatgtcttcatggtatagaatattgaaagatagtgaggttgattcaagttcttaagtccgaacttctatcccagagctcctgaagtcaacctgagtgcaggactagggtttcctctcaggtcgactgctatgattcgggtctactcaacttcgtaacatcatccttcttgctacgtgtcaaatattgatgtccacgttatcaggaaaagttttcaggttaacaaggacaaaagtgtatagtctagtttaccaatgcccatactaaact

SEQ ID NO: 25266 - DNA, 4205 bp, Cannabis sativa
tactccactcattgccaattggttttgagatggaaccctatggttctcaacatggtatcatagccatataatatggtttttagatggaaccctatgattctcaataattgttaagagagttttgttgcaaatatctcatattattattattattattattattattattgttgtggtttcagcttgtgaaattctacaggagaattggtttcaaagtggtgcatgaagtgagtggttcaagattgggtgatattgggcacatgttggtttggggtggagttgggacccgaatggatgcccttatagatgagcttcttctgaaatggtgcaccaggtttaagcctctcaagtctgatgcctagaattattacataattacaaaaaaaggaccaaattacacacattgtaaaactaccaaattgttttgtaaaagtatacttaattaccaaatgtaacattctgtttttgtaaatgttataaagacagacagactcgtctcgaatgctgctaaggcatcttaaatttaaatttctatattattgggttaattctaggaagaacaaagtgataattgcccaaaaaacattgttatgtacttcaaaacattatacatgtcacagctaaaaaattggataatctcgacactcatatctcgacagttctaaatataaccgtcaaaatagatactaatattttaaaaatacaaaaattgttttatgaggatccaatctcagcgggtcacatgtgaaccgcccatattgggttcgaattaaaaaaaaaaaaaaaaaaccaaagcaaattaatcagcatgccctaaagaaaagaacccaaaaatctataggctttttcattttataacttaaaaactgttttatgttttttaaaattgaaatcaatttttaaaaactaaaagaatcatttgacaaaatttttaaaaatagttctttaaaatttgagttttttaaaaaactagaaaaaaaataaaaaaatatcaaaatattattttcaattttaaaaaataattttgttatctaacatattatattttacatttttactctcatactcgaattctaaactccgaactaaacccaaacacagacaattcatgtcatggtatggtgttaaaatatttatttttataataattttttttttaaatagtttaaaaaaaaattgtgctaaacatcattaaatttttaaaatgacaaaaaattattttctattctcaattttaaaaatataatttaaaaaattgaaagtttaaaacacagcaggctgctaatctcccatcttcttcttcgcccatcttctaacccacatcgagagccccaaacgttgagaccttccagacggccagtgagaccagcaccgcacatcgtcccactgcagttgtagtcgcacatcgtcccttttcccatctcactgaaacaattttcttctcgtggtaatataagattgttttaattctattttacacacatcctaaatttgtggatttttttctttcttttatgtaattattcaaaattatcagtcggggccaagagattctccgatttagtgctttattaaaaaggaaagagtgatttcaacattttgactgtatcttggtttaactcctagtaagagctttagagaattcttgtgatcagggccggccctaaaacaaagtgggccatagggaatttttttttttttgggccattatgttagaaaatatgtagtatttttcaaaatcagtaaaaaatatataattttgaaagagaaaaaaaaatttagcccctaggctgggtgggacataagcacaggcctagcccgcctatgcccagggccgggcctgcttgtgattactagtttaagtgaaagtggtagttagttacatcttgatctaagtatggtcttgcttgtggtattttcttacatgattcatcatatttttgaacctttatatattcttttcttatcttttaaaaaaaatccatttggagtcattatagtaaatcattcatcatccttaacatactataaaccattgatcattctagacattttatgaatttttatgttatattcttgttaatttgttattgaatttttgttatttatatattattttgatgttatttgttattttctagttagttttatgtaattctcttcttatcgtattatttttatataatgaaaatgtaattatgggaaaactatgaacaattaatgcgagtaattacacaggaggatggatattggcagcagagaagtcgtgttgattggttacaagcaggtgactccaacaccaaatattttcatcagcgtgctaactctcggaaaaataataataaaatcagtagctttggcaaatgatactggtatagcacattcctccaaggctagcattttaagcaccattcagcaacactatattgacatttataccttggaagggtctgattcggatgcaatggaccatgttctaagtacggttccatctgttatttctgctgatgaaaattaagctcttaccaaatccttcactactgttgatgtctttgaaactcttcaatctatgaaggctgatagtagcccaggaattgacggttttttagtcatgttttactgccagtattggcatattgttagggaaatggtaaccaagtctgttcttgatgtactcaaccatggagctggcccaactatgctcaacaaaacattgatcacacttattccaaagatcaaaaaaccgactatgatctctcaatatagaccaattagtctctgcacaattctttacaaaatgatttcgaagacaattgctctcagactaaaaccaatcctatctcgagttatatcaaatacccaaagtgcttttcttccacatagactaataactgataatgtattggttgcttttgagcttttacactctttaaaaaatagacgacgaggccgagtgggatatgcagcaatgaaacttgacatgaccaaggcatttgatcgtgttgaatggtctttccttgaaaagatgaagcttgctatgggtttctctcccatcattgtgaatctgatcataaggtgcattaattctgtttcatactctttcctggtcaatggtgaaattcaaggaaatcttgttctagggagagggattcgacaaggtgatccattatcgccttatctttttattatttgttcgaaagccttatctcaagtgttacaacatgaagaacgacggggtaattttcaaggccttcgaatcgctagaaatgcaccatccgttacacatcttttctttgtggatgatagtctcattctttgtaaggctactagcccctctgaaattgcacttaaacactcattggattcatattgcaaagcctcaggacagctactcaatcaagcaaaatcaagcctttccttctctccaaataccagtagtgaggatcaaacaagatttcaacagctttttcaaatgccaattcaacatctacatgagaaatacctgggtttgccctcttattcaggtagagagaagcagattttattccaaaatattacggataaaatctggaagttgcttaactcttggcaagaaaagctcttctcgactagtgggaaagaaatcctattgaaagtcgtagtgcaagcaattactacctatgctatgagttgttttcaactaccaaaaaaattaattgatcaaattgaaaagatgacgaatagatttttgtggggaccgatgcggacattcattggaaaaattggaaagctttatgtcatgctaaatgtgaaggaggtttgggttttcgtgactatgttcattttaaccaatctttaagcatggaggattttttcaaatccaaactcattactcagcactctattgaagcatcggtactattcgaattatggatttttggaagccgatattggaactcatccctctatgacatggagaggcatagtttggggaaagaaattatttcaaaagggtcttagatggaaggttggaactggggaaaatatccttactgcatctgatggttggctgccaggaacttcaacatttaaacctctgtaatttcttgcagcagatactaacatgcgtgtgtccaacctcatctcacctgatcgaacctggaatattaacttactgcagcaaatttcatccccttcgatgtacaacgtattttggacattccttt

SEQ ID NO: 25267 - DNA, 1777 bp, Cannabis sativa
tttttttttttttttctatttaaagatttatatattatattgtatacttgagactcgaatcaagacttccaacacacacgtatcctcttataaccacttaacctaatctcgagttattcgtcgcacattctggttggacattcatgtatgcttttatcatatattttcagccctagctattctacgtaccatcctattttcattttttttttcctctgaatgtgcaacttgaatttcccttcattttgatgaatttaaatataatgaattgcgcaccaaaattaattaacactcccatctctatttagattgagtaattcaatcattatttaattttttgtccctactctcctttttaatttcttcttctttgaaatgacataatatatcatttaggtctaattatatccaaggacaagattttaaagccttcattggttttgtggatgtagagagactagtatattattgcttgagttgaaatccctttttcttttttctttttgttttttggtagggaggaaattgagatcactagttcatacatcgttatcgtacgtaatatatattgtgttattaattatggcttacactttttcgtatatatatcatgtcatatgagttcatgactatcttcctttcattcattcatgtgttatattatacgtacgtacacattaaggacaaggattgcgcgcgtacgacataatcacgatcgatcgatcgatgtatctatatacacactgaattttgttttctatttcttttatatataatataagatatttttaggtgatattaaatgtatccacgactatatatatatttatagaatggtaaccacaaacaaatatggaaagtacttggttgatgagaaagtgaagtgaagtttctatcatatatatatatatgttcacaggaagctcccatggaaacttacctaatctaccactacccccatatggcccatgccacgtaccacaattctccactctactttaatttttttttccttttttttttttctgaattagttctttaatttgttaaaaggagaggaaatggttgatatttgagttctactttaattccaaccacaaatctttatttttattgataagttttattttcatcccatcaaataatacgtacacttattttatgttaattttaaaatttaaataattttttaaaattattcttaataaaaatttttaaattttttttttatattaattttaagacttattttaattttatttttatatatatatattttttttatctaaatcatgtatatttcttttaaagaaaatttcatatatattgatttttttttgtcataatattttttttttttttgagaaacggacacttcattaaacaactaaacgattacaaggaaatggcaagtcacgttcaatcgcgtgacgagcacaagggagagaaatcccaatccacatagcactaactttgtatgtcaaagcataattggctaatatatgggcaactacattctcttcccgaaatacaaaccgtaccccattggttgagtgatgctgaagtaagcgttgaatctccacaatgaggccaccctcttgccaacaacccacctccgcttcattaataagatgaacagcttgcaggaaatctgattgaacttcaaacaagaccactcgtctctggatggctgccttaatactacaacattcaggagcaatagcggcgggcccctcggccgctattgctccagtttttggccgctaaagggcaatag

SEQ ID NO: 25268 - DNA, 3145 bp, Cannabis sativa
tatatatatatatcttaaatgttagaattgttttatttgctactataatctttatgtttgagctgtaattttggaatgcagcatgaagatttttatgggagctaatcaaccaaggaatgatgtaaatcaaagtgctattgggaataaacaagatcaagaggtgagttgcgtgctttgctcacaaaaaattgaatggttataagggatggtatgcatagtcaagtctaatttacattttcaactttttttaatgttgaaccgaacttaggcttagtatggtcgacatttattttgttattacggtcagctattagcaattcaatatcatcagtctagaaagaatggtatttcattggagcaatcattttttgttttttgctgacagtgtgagtgtctcaaaaacgaacttcatattatgatggaggaaagggatttattaacaattgagatccaaaagcagcaaactcatgcagctgaaatggaaattctgaatacaaggtgtaacagcatggtaagtcatgtcatactcttatcggacactgtttttaaaatgatctaaataagtttactttcagttgatggaggcaaaagttcaagtggacgagctgactaggagaaattccagcatggaactcaagatgcacaatgtacgtacattgcttagactttctcagctataaaagagtactttattaaaaattgagactctgaacagtcttaatttgatagtgctatgttaatatcttagtctgttgaagtaaataagaagcatagtgaaattgaaggccacaacatagagaaaaaatttaaaagggaaaggatagttgttaaatcaaagtagaatggcagtttgttacatggtttagaaagttaagatgaaaccatcattatataagttacatgtgttcaaattttgactaatttattcaagttttattatacaaccattgtttatttatttgggttgcacaagcaggatcaagttaacaacaacaaacaagtgtcaaaactgaaaatgaggctaaaatggacgcaagcaaagctagatgcatttcgagatagattcagggagattgtaaatgagactgatcatatgaacaggacatatgagacagctgcaatgaagctgaaggaacgattggcttccaaaggaactgaggtccttaacctcaagaagcaacttcttactgtgaaggagcaatgagcaaattataccctccatggtagctctgttaaatatttattcaggctagttagttagcatttttatgatggtaaaatcttttgctgtaatttggttatatgctcacttttgtaaatttgaactcgtaggctttaatgagacttttaaggctgcaaatatctagggaactccataaaataattagattaggcttgtttggtatactgcattgtattgtattgtgttgaattatattatattgtagaatacaaagtatggtattgtttatagctgctgttaataaatgtatttatctttgtacaagaactatgatagtaggaaacctttttttttgtcaggacactagaaaacttgtttgccctttaatttttattagtttatttatttttattttgtcttttagaaaaagagattagtagactatgattactcatttatatatgtaaaatacaaaataattataaaagtatctatggtgtatctcatccaaatcacaatagaaagttctgttattaatatcttgagccaactaagttgactaacattctgttaagttatgagcttaatttggtacaatgagtttgtgctatatttagtctattatttataatagtgttcaaatgcgtaaaataagtaaaataatgattagtcatttgatgttttattaaaaaaatattattttttttattgtttaaataatagtaatatggtaaataaattaaagaatataaagtttagtaaaaattaatgaattggagaacttacaaatacactttaaaatgggaaaaagtttataaaaatattgtgatacagtttcttacatttttagtgtatcaattttataaaaatattgtgttataagttctaaaattagaaaaatattatgtttcagtaaaataaataaaaaacaactcaaaaacaatcctagaataatttaacaaacaattataaaataacaaaaatataactacaaaacaacagaaaaataacaaaatattgacctaattgcaattagcaaaataatatcaacttgtcaatcaatatatttttgtattacgaattaattatttttttttaagtagctttgataactttatttatcttttttgtaccattacattattttttttatggaatttgttgttacaactgtattcttttaattttttgtttctcttttcctttttgagttagtgatagttaaaaacaactatagactaaaaaataactaaaaaataacaaaataaatacacatatatacaacaaaaatattatctcgaataaactgaaaaaatatacacgataaaaaatacacataaactaaacaacaactgtacaaaaacaacataaaaataactgtaaaacaactatagaacacctaaaaaataaaatattaacaactataaaattactataaaataacaaaaagataactataaatcaatagaaaaataacatgacatcaatcttgttaaatatgcaaatcattcataaattaactctgaataaactcaaaaaaaaaaaaaatatctaaaaaaatatactacttttattaatcatgtaaaaaataaaaaaaatataggaatagtcctcttaatctttttgtaagagagagaaaaagttttaaaaagtaagatataaaaatgtacatttattatatatttatatataaatacaatgataaaaaaaattaaaatagagagagtgagagaggggtcaccaactaacttataaaaaaagtgagtcagactaaaaaaaaaatataaagaagggaatttttttttttgaagctttaaaaagtgaaaaaatagtaaaaaaagaaaaaaaattaaagtagagaaagcataaatgttaaattttttttgtcaaagtataaatgtaaagtttgaaaaaaagttagtatttagtgtaaattctccttataataattagtggcattat

SEQ ID NO: 25269 - DNA, 1664 bp, Cannabis sativa
tactttatgttattttatattattttataacaatatatatttttttaataaaatacttattggtaacttgctataggaaatcaacatattaccacatcatcctttttttaaatacacattaatgtgtattatccattgagaagtattcggacagtgatcggtcgactaatgataactaattttaatttgtatttattataatcttgactaatagagaataaattgtggcctcaattatctctcatatttaaataaaagtaatagatgagataagatacattaaaaataagaagatcctatgtgtgataaatttgtattagttcaccgtcgttttttatatataaatatacccattaatggttaatgtatatatttataaatatatgtatatatattaaaagaggagcatctaaaggcttcaaatatgctccaaaaaaaacttgataataaaattttatttacaaattatataaatagaaataagttagtgttgggattaaactcaattaatttgtcaaagtcaacagtttcatcttatcaaatgaatctgaaaaaaaactaatgttagttataagagatggctttgtcattaacttaaagagagccccaccaatatctataagggatattggcagctaaaccacctgaactttacgttttgtaacacctaaccacaaaaaccaaaattttggtggcaaaacctactgaactcccattccgttttgctctgtacccctccgtccaaaaatcatagttaagtgctacagtggattgtccacgtgtacacacttgtacacgtggaaattttttagaagtccacgcaatattaattttaatatatattaaaaataatataaaaattaaaaaaaattataaaagtaaaaaatctttttttttctctttctctttttctttcttctcgtcagacacgaccactacccctccctaacccttattcaccaaaccaaaaaaaatttcaggagctaaccagaagaagaagaacagtaacaatgacatcgttgttgagcagtagactaacgttcaagctatacccactcgttatagtcaacatatccaatcactacactagggttaagtctcaaatgcaaccaccacatctttcttccgagtgtcacgccaacaacaatgccaatgcctcctctgatgcagcccctttttcatcgtcgcctccatcatctacaccccccaagggtctacgactacgttattggagtccagagaggccgtaccatcaatatattcaatagcttcgagcttttctacgattccaccactaattccctcgatcgtgctttccttaagaagaagcaagaactctgctcagtgcctttcttcttttcccaaattcattgcctttttttggtttcatgaataagggttagggaggggtagtgatggtgcctgacgagaagaaagagaaagagaaaaaaaaaagaaaaagaaaaagatttttttttattttcataaattatttttttaaaatttttaaattcatattacatggaccactaaaaatttgccacgtgtacaagtgtatacacgttgagagtccaccatgtcacttaactgtgatttttggacagaggggtacagagcaaaatagaatgggagtttagtaggttttgccaccaaaattttggttt

SEQ ID NO: 25270 - DNA, 2965 bp, Cannabis sativa
taggaattattagaaaatgtttcctaataacagctgatattggttagttgctctctggccaaaagactgtttgttgattggattttgattagctttactcattctttccaagatgtccaacaagggttagtaaattttattctcttccataatgtagctcaaccgcgaaaggtctgaaggccaaaggagtgattttgaatggaaacatgtgttatacgagcttacattctatttgttaatcatattcagtttcaattgcttgtgtcgagtcttcctatctgaggccatcttgtttcctcatttctatttccacgagttgtcattaactttatcaacacatttgctgtgcgatcttagcaacagatttcgtcattaacatcttgtttgattatgtggtgcccatgtcatcaagaacaaaatgtgtctttccctgaaatattttttcattaatgattcctaggcatcagtcaattcatcaaaatggctcatttgcttcctagaatgtttgtagcttaaaggaataatgtttttgacagcttttaacttgattcttcgtattcatccatcttcatcgttgaaggagcaggattggttttatggtttgttagttttatgtgaattgtactttgacaggatcttagttcactatcaaggtcaaatcttgaacaaaactgctggaatttctctacagtagtacactacacaatgttacaaaatcatcccaagctttcgagaggcttgatttctcccaaaagagtaacttttcgataaatacaaaacaacaaaatgctttataccaaagtcttatcctatttgagttataggtggttagttaagggtgtacttgattgggatatttcttttaaagtaactaaccccgcccttattttcttcctaaaataaatgtaccgaagcgtggcctatcagacttatgcaaattttgatagttgtggggtgtaaatgaagtatgcttagtgagccctgacttcattttattagtttatgccaccatttgttttgtgttcctctaatcagagtccaaggattggcttttattttgttttacttggcatcggaaaattttacctttcaagaagagtacaattttcagggtagccagcaatctttttccataccatttagtgctaaggttggtttataaaggtgaaaataaaacttccgtccaattttactattggggatataaattttttgctaaaacacatagtatatatgtaaaattattctatataaattgtttcccttctgatgcataaatttattttaatctcttcaatccacatgtccaatctaaccattttttggcatttgaatttcaaattaacagatgggggacgtgttgaaggatctaactgccggtactgttggaggggcagctcagttgatagtagggcaccctttcgatacaatcaaggttaaactgcagagtcagcctgttccactccctggacagcctcccaagtatgctggtgcaatggatgccgtgaggcaaacaatagctgctgaaggcgcaaggggtgtgtacaaaggtatgggagctccacttgctaccgtcgcagtgttcaatgctgtccttttctccgtaagaggcaaactggagacaatgttaaggtccgaacctggtgtcccacttacagtcaaccaacaaatcatttgtggaggaggggctggagttgctgtatcgattttagcttgtcctactgaattgatcaaatgcaggtcagtctagttgttattcttcactaatattcttttgagagaggattaaacgaatagttagtaattacacacaacgcacacacccaactacttgagctgaactcaattcatcacacgggtttgaattcctaaatgtcatttgggttttataatatacaggttgcaagcccaaagtgcattggcaggtgcttcatcagctggtgtagcagtaaaatatggaggaccaatggatgtggccagacaagttctcagatcagaagggggagtacgaggcctcttcaaaggcttcattcccaccctggctagagaagttccgggaaatgctctaatgtttggtgtttatgaagcactgaaacaatactttgcagggggtagagacacttccgggctgggaagaggctctttgattgtggctggaggcttggctggagggtccttctggttctcggtctacccaaccgatgttgtcaagagcgctcttcaggtagatgattacaagaatcccaagttctctggttcaatggatgcctttaaaaagattgttgcttctgagggagtcaaaggtctctacaaagggtttggacccgccatggctcgaagtattccagcaaatgcagcatgcttcttggcttacgaaattacaagatccagtcttggctgagaagattctgatggcctaatttaggtggccaagatatagttggttgttaacatttttacaaggaggcaattggcattttatttttttttaactctcaatttgtaatttggtttcataatctatattactatccattttggtgttagttgaagaaacattctttctctaaccactttggtacttaaataatataattgcaataactagtagaaaaggggttgtgaaactagactactatgaagaaatacttgcacaccaaactattaaacaagggacctaattgagtggaaaatgtttattgtggatatctatgccaaatgttaattgtgaaagtacataatttaatttaagatatgtatatatgtagataaacttttacacgttcataaacacatccaaaataagtacccgatatttacgaacagctacactacatataaatagtgttaaatattaatttgggtaaatactattttagattttgtgttttgtaaaagttactaattggactctttgttttgtaaaataacaaaatggacattgtattttttaaaattatacaaa

SEQ ID NO: 25271 - DNA, 2680 bp, Cannabis sativa
ccctggagacccgattggaggctaaaaatgttataatggttttagttttaaatattgaagggattattgtgataagttgattttagaaatatcagggtattttggggtactcggaattggccaaataccctagaagtagatgtttcttagtggctaagaaataataagataactattaataaaattttttttattaatattatatattattataatattatttatatatataaaaaataagttagtatatcttcttatttataataagattcttcttcacctcctgcttgttttaccattttctccttttatttagatacttagtcagggtctatattgtattttactaattactattcatttttgtttgtcttactttctgaaactagaaagacaaagcctcctcactaaatgcaagtaccaacaagtatcattgtgagtatcctcacctccactgaatgttcactcattgagtattaattttcaatttacaaaaggataatcatctaattcacacttatctatctctattttccaccaacttaattatctatgtaggataactcttcaagggttagtttttatttttatttctcactttactaatttcaaataagttttttttgagtagagcgtaatagtattttacaatcatatattagcttaatagcttaaaggtcttggattcgaactatgacctctctctttttttcatctctttctcactactaaactagccttagtggcctaatttcaaataagttagatattgcaaataaaattatatgatatcaattttccttttgggtatgtcaaattttttattttacttttattttatttatcttctcaagtaagctttttgagcatacaatggcagaagcttaatttgatagttaattgtttatcatctctattcagtacgtgtgaagtgtgattaaaaaactaacagaaatcttagtgtattttttaaggaaaagtcatgaacttttatttattgaatagaaggacattacaacatcttatatttaattgcttgtgtgtagaaacaattaaggagtttatgggaaagcttgaccttcccatagctatagagtttcagttgttgggtttagtattggaggaggggatttctatatggctgagaactttagtgttggattcttaggcattgacctttctggctcttgaatggccagaaaaaccttatcataaataattcagttgatgtaatatacactagagacaccacattacacattcaagtaaagcctatttttctataggatcttaatttctttggtcatttatttcacttttacttttagtggcctaatattcgttcctttgacactttgaacaaatccaaagacagaaattgttcaaatcattctacaagtgtttgaagttaaaagaaaaggttctcatcaatgaatattgtacaaaaattatatattttatataatcttcaaaaattgttactgatcaatttttaattattaaaattcttttgcaaatgacataacaaataacttaaaatatagagtctttattaaatttgatcattttcttcatattttatgcttctcttgagatatcaatcttagtaaaaaaatattttgatttaattttcattgtaaaagccgagacaaacatgaattagaattgaatttcaaaaatttatgaagagttctgaataggtttttacttaattatttttgccccttggtattagcttgccaagagataaatgctgatgacttttttagtttttttttttttttttttgtatgagtaggagaaaagaattgattttgaatttaacagtgctttttgtagattagtgaagcaggaactataataaaagtgaccaattttatttatgtattctacaaaataaatttatttcttttttatatgtatttttataatgtgatttttttcacaagaatttaataactaaatatatatatacgaaattaattatgattgaattcatataaatttaatgaactcagtgtaacacattgcttccaaactagtatatattataagtttacatcagaagaaatactacgaacgaaaccgtaattctctcccttcgacaattttttctccctatgtccattttctttgattttcaacccaaaatctagttatctaagctctggtagtagcaggatatcaatccttgaagaaggaaagcttaaggtatggtttagttacattttaagctaaaaacgatttgttttatatagtggctttgtgaattagaatagttatggagattctaacttcgtagaattgttctttggtagctatgggactagtttcgatgtttacttgttaaatttgaggtagttttgagttagaaattgagttgggaaatttttaaagtttagtctgaatattaatggtgtttttcatttaagggctcgattttaatttttgttatgtatgtatggtaatatttatggtatatatgtgccgccctatgaactttggaatgatgattattttgataagttttggtagtgtttcaatgagtgcaaaatttggggtttttgagtttcattgtttttaggaattcctaggagatcagaaatcgtatttttgtaataacttttcacttgggtgtccgttttggacgttctatatgtttcaaagcttgcgacaagct

SEQ ID NO: 25272 - DNA, 2317 bp, Cannabis sativa
gcaagttgaatcgcgtcaattggacaattactcagtgagttatggccattttcctgaaggttgttctcgacctaacacctaggttgacatttgggcgcccaggttgacatctgagcgcccatgttaacatccagtgcctaggttgacatgtattgtcaacctggatgctgggagagtaggaaaatgtgtcaatgatgtagtttttgatgcctaagtgatatttggacatcacttagagtgtttctatgttctagtaaagttggtcactaattctcggagatgttgttattttggggaaacgtgagactcgaaacttttgatttctgagtaaatcacttagccagaaaagtgaaaatcttaatttgtgaatttgaatcttctaacttcatggctctcagtcattataaaaaactcgttgaacggtcgagacaaaatacgaatcggataagcaaaacctaatgcactaggccatttgttaacttgagtgttgggtgcttattttggagcgtccgagatgtcattttgacacttccaaggttcttgaacttgaggacgaggtgtcctacctaatattttaccattttagagagaattctcggagcaaaatttacatttgactgatagataccagcgcactagcttgattgtcaacataggcattgggctcagttttgaagcccttgcaattattttgtttctctaaagtttttcttatatctttgttatttctgatgatgaaaaaaaaattaggacactttttcgaaaataagattggaaatggccaggttgacaatatgtccacttgggcactgggtccagtttaagcctcctggaagtttcaatttctccctgaaaatagttgaatcttaatctttgatgaaaacaaagaatatgcccaaaataattttgagaaaaactcctcaaaatcggccaaggttgacaaaatgtcatcctaggccctaggccagctccaggtgttaacttgggctttggtctcttgttttggccctcaagttggtctatttcttcccaaaaagtacttgtttccctattttttatggaaaagaagaagacttatgagtcaggtttttttcctaattcttggaagtggtccagattggaaaattgtcaacctgggcagtgggcactcgagcactaggtgcttcgggtgtaaaaaaatgaaagttttacgaatctgattctaatgtctcaaatatgtcttttgtatgtctagctcatgtcccaatgcaaagtttaacccattttcactaagttagtcccagaaagggtgtgatgtagggtcttgaatgcgaaatacttaaaaggtagaccgtttctgaatttctcttttaacaacttcgactcctagttttggaagaaggtagtaaaatcaaaggacctaatcaaaaagggttcctgcaagctcattttttatgggaatgataccgacatttgggacgatccatgggtgattcatggccagaatttctatcccaatccaaatgacggtcgtttggagggttagaaaagagttgcggaccttcttactgaggatgggaattgggatgctgaaaagctcaatttcttgtttgaccaagtgacaaccaataatattcttaaagggggtaggcgggggccaaggcaaggacaaatggatttcgacaaaagattcaactggtcagttttctacgaaatctacctatcttgctcaggccttgtctcgtgccctacctaccatagtggcgcccaccctttggaacaaactttggaattctagggtcttggagtgccataacgttttgtggtggagtatcctctctaatgctctaccgatcaggaatgctctagctagaagaatgcacattgatgaggtgtctttccctctttacggagatgaagatgaaactataaaacatctattcctttattgtaatttttctgctcacttttggaggtcatccccttggggtgtgatgccagtgctggagttgggggcccaaatgtgggattggattaagttcttatggaggctaaaggacaaaggagtggaggtcaatgagatcttcctgtatgcttcaatagtagtggatacgattttgaaaacccagaatgataagatacataccactaattaaaattgtaacattaaaaagtgtattgacgatatttcttcatgttatgcagattacaacctctatttgctttcttcaccaatgatttcttccttcatctgtgtataaacctagtaacatgataggatctatctaaatcagtttgtgcctgtgcctatatgtttgcttttggcttagatgcatat

SEQ ID NO: 25273 - DNA, 2794 bp, Cannabis sativa
  modified_base (2764)..(2765): a, c, t, g, unknown or other
tggtgagcttgaaaccgagaaaggaagagaaagagagaggagagagagggaagttagagagattggggggaattgaaatgaggggggtattttcggaacaaaattgaaagctaagaataattatcaaatgtatattttctgtgtataaaataacaccatgtgcaattttttagcataaaatatcaaatttccctatatttatatgataactatttaaaatttgtcatttttattgcaattttttaatttattatttattttcatttttgaacagtttgcttatgtgggcttacaagccagtagcatagttagggtagatgagtttatttaactaactgaaattaattaatcaaaatcaaacttattgacattaatattattattttttgtctggactttgaaattgaactatatatatagtagcaccacactaatcttacatgattacatcagtgtatattgcttaataattaatgaataatgtgcaaacataatgattatattttcaataatcaaggtagtttggagaaatttttgccaaaaaaaaaaaggcgaaaaaaacctatctacttatgcatttgtacggtctcacatgcattttttctcataattaactgaaaaaagaatataaaattaacgaaagaggaaaattaatatcacatcaattttgatgaacttactagaattgtaaaataattatacaaataatatattaatacacaattatagtatttacaccgaatcataaaaaaaaaagcccaccgaatcgtgaaaacacaccctgtcatttttgtttcaagtttttttgtctcctcttttgtttttttggtttattatatatactctatctttattcattttttctgaaaaaatatattagttacactaaataaaaatatactaattatttactttagttaaaaaaaaatgctattgtaatttacttttcgaggcaattatttggatatgtgaaacaaataaatatatttgttatcacaaaaaaaaagtatccaaataaaaagtataatatttttatatatatctagagcattgacattaggtaccaatcagagccggttttaagttaagacgggttagtcttatgtttaaagttcacttctattaggggtcaaatgaaaaaaaaaaactaaatatacatattttttaataattttaaaaatatcatttattgttctaaaaagggccgaaaaatattattttttcaaaagcccaaattaactcaggataggccttggtaccagtagtaccaatgcgtaccgtgagatgactttttttgttaatgattagtgatattttataaaaattattaaattacaatctttaattaagacccaatatttaattgcaataatagtatgacacacgcagtggttaaacatcgctaccatttctttttatattacgttaaccaaagaataaataaactgttaatttaagtaaaaacaatttattataccaactaacttcacaaattattatattttgttattattattttcatatttaaaagttatcatgtattgttgtttaagatatatagctttacattcttttagtaactgtcgttacctttaaacatgtgtgataaaattacagaattataacaaagtatacttagtatcaaaattagtagagtcaaatttgttagactacttataacaatatatatatatataacttgggtaagacattaatcaatcacccataaaataaaaaaatatttgttagacaatagagagtaaaaaaaggataaaagtctatttataacctacatgaataatacctaaaatgtctctaaacaatgtgggacttttagcttgtatgtgtagattatttttcaaataaaataagagaatgtatcacaaaatagaaaaaatatgaagaaaatgaagtaaaatgccacctaaactcttattgtgctaaacaagtattagctatatattagttgtaaaatatcaaaaatgttgtgacatcataaaaaagtatacttaatggagtaagattgaattaatcaatcacccatacagtgaaaaaatgaatgggtgatattataggttacaagtctaatactaatcacatttttaagctatgtgagacttttataacatcataaattatacttttataataaaggagaaaatatacactaattacatttcctaaagaatatagggtgtaatataatatttaagaaaattttatgatttattattaggtaaatagtagtataagtaccaaaagttttaggtttgtaagcggcataaactcaatgaccttttttagtggcataagtacccaatatttataaaattgtaattttcttccagttttatcagtacagactctgttattgtcttaaacagaacacatataagacccaaattatagattatttggtctggacgaaaaatatgtagtatcaattacttctaaagttttttttaataaatttaaaatggagtctgtactgacgaaaatagagaaaaattatagtttcacaaacattgggtacttatgccactaaaaaaaaatattgggtttatgtcgcttacaaacttaaaattttgggtacttataccgctatttaccctttattattttatataaagatgagttcacaaatttcttttgagataaaagataaataaaataaaaatatcaagtatcaatatatatccctctctactatgaatccttaagaaaagttgtgatattttgttaaacttaaaaaaaaaaaaaaaannaaaaaaaaagggggggggggggggggggg

SEQ ID NO: 25274 - DNA, 2689 bp, Cannabis sativa
  modified_base (32)..(44): a, c, t, g, unknown or other
tatatgtgtgtatttcatcgttttagaaagtnnnnnnnnnnnnngttaatcaacatacttgtgaatagatctaagattctggtaaaataatttccaacaataatttctaacattaaatccttaattatctactaatatccatggtttaaccatgcggtcattacatgagcactcactcattaaaagacgaagggagtttgttgtttgttggtgttcaaaaatcagattggcaaagtaattacaaaggattgcgataaagctttagagggagtctaaacttgtttaagttaattgtatttcataattatttgagactttactaatttatttcattatctgggtgttgccccatgaattagtagtgtttaaaagaacactgataccacgtacaattctcttgtgtaatgttttaaattctactcaatttatttctattttggttctataactacaaatgtatgttctacagtaacaagtttccaatctgttattgtagatctttacaatcgcatttttctttacttttattaaagaaatttattggcatatgcaaaaacatagttttttaaaaaccacttaaaatatattaaaaagaaaagtttaggggaggtataacttaaaaattgttttcactttttgaaaatagaaacttgttttaaaaaccaatggggtgttttgccaatttttctgaaaatttagttaaaaaaatataaaaataaaaaaagatcaaaatgttgttttcaaaaataattatttgtttatacattttttctcacatacccaggtttggggtcgagtttggggttcgagatcgagactggatctggggtttgggttgggttaaggtttctaaaaaaccgtatttttgcatatgccaataagtttctttaataatagtaaaaagaaaaaaaaatgaatataaagatctacagtagcagaatggaaacttgttactgcagaacacagatttacagtaacaaaatagaaataactgtacagaatataaaaacttgacacaagagaattatatgtggtatcagtgttctttcaaacactcctagtccacgagaccacgcccaaagaatgaaatcaatcagtaaattctcgaacaattataaaatacaattgacttaaacaagtttataccccctctaaagctttgttgcatcctttgtaatttactttgccaatgtaatttttgaacaccaccaaacaatgaaatccctttatttttttatgtgtgagttcttacttcctcctgaagtaaggctttgaaaagtcttcaccagaagacccttctcttgtttaatgaagttcttcaacctattctaaaaacagtataagaacaataaacgaagactaaaacctagcttaacactctaagttcttacaaaataaattctctccttacaatgataaaatatgaaaaatgaaactagaagaggtgaaaaatatttggctactctcgaggtcctatttatatatcataaaaaccctaaagacagccacaaacacgttttcaaagttgtacaaaactttcctaaaaaatccctgatttgcagcatcaaatttgaattctgctgcaacagatcaggaccagacaaaaaacttttcaaattggtcttcaatacctgtcaaataaagattatttgatttgctatgtacatagcaaaactaaaattaacaattagaaaaagggaaagtaaaattttccattaataagtaatttttcataaagaaaatttcttctcttgtaagacaagttttctaaaccaaagataacaaatataaaataaaacttatcctagaagaaaaagaggcaaccatagccacaaaattaacacaagaaaataccctttaattcacaaataaatgaaataatattttgacaactaaatttccaaaaaatgacctaacatgttcgagtctgggtctaaggtcaagtttgagtccgggtctaaggccaggtccgattctgggttcggggctaatctggccccaagtttaggtccaagttcggcgcctagttcgggttcgaggtcgggtctaggctcttaatttggggacgagtccaaggtctgaagtttgatgtttgggtcttgagttcgggatttggtccaagtccgggtacgggctcgagatctggggccaagtctgcgtcaggggtccgtgtctagaatcgacatccagggtccatgccgaggtagggtgggtggggttgggtttgtgtcgtggtgtgttgtggaaattgaagtattttttttagtaaaaaaaaatctaaaaacagtctttcgaaaatattagccaattaccattaaatttttaaaatgaaacaaaaactgttttctattctcaattaattctagaaactaaaaaccagaaacacaaccaaacgaccttttaatgtctggaaacagaatttgttacaagctttttctatttaagctctggtggttttcagctagatttcagcacatttcgaaggtctttcattgcctgccacagtattgtcgatatcattctgaacatcgcaactgttcttaaatcgagcaatcaaaaccagttcaagaatgactattttaaagatggtagaaatagccagaggctaccatgccgatatacatggcagaaattccattctaagagataaaaaataggggttttttcatttttacacttcaaaacaatt

SEQ ID NO: 25275 - DNA, 2907 bp, Cannabis sativa
taataatgataaagttattatttttattttatacatttttaataaaaatattaaattttgcatcaagttttatgtataggggtgttcataaaatacctaatctaatccaatccaattcgcaaaatatccgcattttgcagattgtatgttgattgatacaaaagtaaccgattgaatcttatccacacatatttatatatattttttaaaagattatatgtacaattaatattttaatgtaaaaaatagtaatttaagaatctaatacatatgatataaaatatattttaaaacttaataaattaatttaaaacaaaattaatttctttataattacaatttttttcttcctctaaatttctcattttatatattttaatttattgttaagtacataaaaaaatgttaaatactattttagaccttgtttttttgtaaaagttactaattgggcactctattttgttaaataacaaaatggaccctatattatctaaaatggtaaaaataggacgctgagctcatttttcaacaattatatatttttaatataaccaactctaagacaatttttaatacgaacatatacagaaaatttaaccagttttgtcataacatctttagatcatattatcattaagttttattttgacaaaaaattagttcggggtcctatttactattatgaaaaatatagggtctattttattatttaacaaaaggtccaattgttagcttttgcaaaacatagggtccaaaataatattataatttattttgttttgttgttagttatgtaaaaaaatacttttaataaatattaaataacttaatatcaaaaagtaactaattcaaaataattgatctaattgtagattgaattagatttgagctattgtgccaattagattagatgataaatataaaatctaaacttcaaatgcattactaattaaataatattattaaattagattaacactcctaattatatactagaataaaataatgttaaaaattaagttaaatatatcacaacatatatttttcttttgggcaaatatagccataatttttggatgagatggtcttatttttccttatttcatactcataattgttgtaccacccaccgtagtggataacttctgcctttaaagctcaatttgtaagttgctcggaaaaaggaaacaattggaaaaaaaaatgttaaaaaagaaataaaataattgatttcttgtaacctacatttcctgcgtatagtaacccttggcatgtgtaacataattaatgagcagtactactaattatagcacttgaaagccctaataattcactactcatttttgtagccaaaaacaaaaaaacaaaaataaaaacaaaagaaaaacacaggacacattttagttgttgtcactacacctcacatatattaaagaatctctacatatatataagtatatataaacaattaaatgagatgagagatgtgtgatcctcaactactttcattgccaatttattttcttcagcttttgactttatattaatacaaattgatatttagattcaatttgatgaaattgtgtatttcataacgtggcatgtagaatcatgttggctggccaacaaaccaagtatatttcaaagtcaaacttattcaaatattaatgcattgcatcaaattttaagaataattattaatttgccaaaaataatagatggttagtattaatttaaataattcaatagtagttaaaaatataaaaataagagataatgcaatttaagccattgtgtaaaaaatttacaactaatgtagctaaccattgaataactctgttcatatatcctaccaaaaaataaaaaaaaactccgttgtgtctgttctatgtattatagtacaaaaactacagggaccactgagctaaaaatatatttttgaatatattcacactagcataaataagctcaaaaaaaaaaaaaaacgaataagaaatttgaatagattaagaaccataactcgagaattatgccttaaaattttattttagtactaaactcaataattccccctccccaaaaaaagagataaacacttgaattttatgcaaaataaaaaaggggtgttatgtaaaacctcacatcattttgaggttttacacacctcaaatgaggcaaatagaattttactgtagcaaataacttttttgcttagaattgcaagttttccaacaggatagtacctattgattggtgagagaaataatattttaatggatttatttgttttgcaatttaacttttaaatttgcgggatataattgtaaaatattatttttcggtgatatgtgtttttgatgaatcaaaatgtattgtttgcaaatgaccatgtattctaatgttttgattattttgtttttttttttttttgtttttttgaagatgtaattgcaacaacccacaagaagggcaggactaagatattctgttgtttgtgatataattgtaaagaataattaatatttttacctataaattttgactaatacaaaattcatctatttttattaaaaaaagatattgtgttgtttctgatataattgtaaagaataattaatctttttactcttaaattttgactaatgctaaattttatctatttttattaaaaaaagttaaaatttaaaaattataattttctattaattttgaaaaagttaaaaaaaaaaacctaataaaagtattaaattaataaaaaaaatattaagcttactttaaaaatttaaattctttctaaaaaaatatgtttaaactttattttatttataaatacatatcttaaataatttaaacaaactaagattttgtgaagagaaaaacaacactacaaaaaactgttacttt

SEQ ID NO: 25276 - DNA, 2511 bp, Cannabis sativa
aatggaatgaaaattatttcctttccatttcattacctccaaccaaacgcaaccaaacgccaccttagtaccttagtgtaatataaaatgttctatatgcaagtgtcaaatgagtttatattacacttagcagctatcaagcctgaaccctgtgatatggttttggtaattgggtaaatcctatgtttgatgtaattaaatctatcaaaaaagaatgtcaaataccagtagtcacgcgcttcttctgcccaccagagatacctcttctcatatcatcacccaccaaaatatcagcacaaatttccaatccaagtatctgttgaagaaacattcattttttcttattgagataagaaaaaggcaagacttaatgtagtaaggacaacatacataccttgagaacatagtcagtgatcaaacttgtgttatgaccagccaaagcagttgctttcatgaacacatcaatatctgaatctggttgaacaccttcattcttttcgcgccttaatgtctcaattaatgtttcatacctcgaaccaacaccaaggcatcgtcctgaaaaatccaatgtttcgcggactgtcatctcgccatagtgaagatcatgttggcttatataagcacatgttctttgaggaacaaattctgaaaactcatgcccacaataggtgactttcccagttacctgctcaaaaccattacttttttgttacttaatggaatagaacattactaaaagttagttaggagtaaagacagatagttagacccttagattagtatcaagttttccacttaatgccttaagcaatgttgtttttcctgagcttggtggtccaagaagtagagtcaacctaacaataataaaaattcatttgtgagatttagaaataaaaaccaaccatagagctaatatagaatagtccaaaaatagtatgtaatggaaaattcattaaggatatataccttgaaggcctcactattccactcacatctttgagtatcttaatagtccttttctttgaaggaaaaagtttaactagctcaagaacatcctatttgagttacatgatgaagatcaatagtggaatagagataaaacttactctataatatgagttcattttggataacattacatgcaacataaaaattctcatttggtcaaatgtaatctacaagagtgtgtgtgtttttttagggaatataccaatttggcctctgtatttagcatgaatgcacggtcggcctttgtgttttgttaaatgattattcagatcatgtgttttgcaaaatggatcaaattcatataccctgagctcaatttaacctaaacaaattttcagtaaattgatatcctgaagtcaaattttcaacagactttggagttcatcatattgaaattgtttaatcaaaattgaggtcacgatatcagtttaatctattttgcgaaatagagggtctgaattgtcatttaacaaaatacattaactaaatacgtattcgcattccaaattggtattttttcttttgtttttatagataaaaactaccaatagcatttaaaagaacacaagaaaagtacctcaatagcatttaaggtggtattgagtagagttggaagtgctctagtgccaacataagcatctccttcaatagacacattctcaaatcttacttcaatcttaggaatctcaactccaaccctattatcctcccaaaaaaaggggaaaaataaaaaataagtatctaatacactgaattgctcttatcaaaattattgttgtacatggactcaaatcatttcatgtttaagtttagaccaatatttgtatagtttatatgtctataaataagtggtttatgatgaagttttattggatgaaaacaaggctatctacattttccatcactttctcagcatccaaacaaggagacactcaacaaaaagaccaaaccaagcaaagaagcactaacctgtcagtcctttccctaagccttctcaagaagctctcattatcctcctcgaaaactttgagcacattgtctatgacatgcttcctttcttgaactccaagctttgtaacatcaacctcttcatgcaccacctttccttctttagtcaacttcttgatcaaccctttcttcatcctatcaaacgtcgaaagtctctctatcgcggcccatttcaatgcgtgctcatcttcatcatcagccatactcaatacttttcgatttccaaatagctaagaatctctttatttagtacaaaatcagttagagaagtaggaatttgagtagtgtatccatgaaaaaatggataacctctcttttcctctcaattaaaaactcgagggaaaaatatacattctcgtgatttgtattccagataagtttgagtagtttaagaaagaaaaaaggaaacgaaatgtgatgtaaaaggtgggatataataacatcttcaagtgaagtatccataatatgcagaaagaatcaaatttgaagaagtaa

SEQ ID NO: 25277 - DNA, 4085 bp, Cannabis sativa
ctccaaacacgattaaaactcaattaaaaatatattaaacttaatctaaaattaatactaaaaataacctcacaggaattcgggtcacacatactagaatttccaagtatttgaatgataaattactcctgctatatttagaagtctcaatcactctgtttgcttcatgcgcatcatttgattcaaaagtctcaatcactctgtttacttcgtgcgcatcatttgattcagaagtctcaatcactctgtttacttaatgtgcatcatttgatagcagaaaaatggaagacttggctttactcggcattagtcttgcttagagaacaactttaagccttcaagcattctgtaaattaaaatgaagtcaccattacaaaataaaataacattggcaaagcaaaagtgattcattttcagcttctcacatcgttcaggaaacttaaagtcttctcttgcaccaactttcatcataattcttgacaaatattctattctcaatacaaaaagcaaaggcgacatcagatttccttgtctcaggctacgctttgctttaaaaaattcatgcatggtcccattaatcaataaactgtatttaggagttctcactcatttcattatcaagttaatgaagttagcaggaaaagaactggcaagattttgtgcctaagatgtgcaatggttttttgctcttgagtcaggataccagttggtgtcacttgagttgttgctggtggaaagattggcctgagcttagggacgattctgagtctgtgtgctagtgccatctgatcttaaagagcgtcttgtgaaagatttatcaaaacgaaaagagccatcttgcacagtatgaccaaatcgcaggcattgagggggtctgttattgtagttattgaagttaccactattgttctctctgaaggtgttggtgttacctctaccaaaggaattttggatgggattaaggacagattcattgaacctgccagcattcctgttattgaactgagcatttccattggtgaagggtctgaatcttcgaaagacaatattggcttcagcaataggatcttattcatgtgtcattaggttggcactcagatcaatctctttgtttgatttctcgattctcaattccgaagcaaggagaaaagcttcaatctcaccaacagtgtagttcttaactctggtgttcaatgagatcacaaacgtgtcatattcacttgggagctccttaaagatggacgctacatgatcacgatcagagagaacttcgcctactgaagcaagaagatccacagtctgcttgactttaagaaggtactcgttaagagtcatcgaaccttttttcagattctgcagcttggttcaaaactccaagatttttcgatgagacttgcagagtgaagtgtttctctaaggaattctaaatctgatgtgatgaattacacccaaccattctcgtcagtaaactttcagtcatggatgagagtaaccaagacatcaagagctggtcttgaacttcccattaagagtaaatcagattaactctgttagcttgtcgtcttcattgctcaagaactcagcaggagggggttctttgatgtatttcagtagacgatcacctctaatcgcatcaagaacttgttgcagctgcttccacaaaagaaagttgtgatcattcaattttgattgaaaaattgtgattgagcatgactcgttcctgattttgtcaatttctgacaagagctccattgacagcagctatgttcgaaggatttgcaccagggatcgcaccaccattcccaacagtcgtcatgttagcagttaatgaaagctccctccatcttttttgggagtgctcttttgctagagctatttggtttggttattcttggaaagttaaaactagtgatgctaactttttgaattggatagttggctgaattggttctttaaggaggagcatagacctagcagtattcattaccacctcttctggggggggggggttgcaactgtttttgagagcatttggaatgagagaaacagccttgtccacgatggaaaatcaactcctattctagttattctgaatcacatcaataggaggcttaatgaacttgccgaggttcatttaccagctattgctttgttgtccaaatggctcccgcctcctacaaaatggatgatgtgcaacaaagatgttgcaattggggaatctcagtcgactagggcaatgtgtttagcaatgaggatggagctatcacaaaaaattttacttttcgaatttgtcattttgatcctctggtaggtgaagttgctgccctttgcaggagtgcagaggaagcggttaagaaaggctacaagaatttgatttttcattgtgattcaactaatgtggtgttcacggtgcaaaggaaacgttatgaggttcataacctgcaacacaacatctaggatctagtaaacaacttcctttcctcagctaacaatctcaacctcagggaggtccgggtccattggatctcgagaaagtacaatggtgtgacccattttgtagctcaatgggcaaatgaaacaataggtttggatttattgatttggccaattttgacagtttcctgcacactagtttggcggatggctatgttttgaattctagtttagtttagttctttcgttgtactcaatttcggtttgttagttttatttctgttattgttctctttttggtgggctgcgtcgctctgttcttcttttttttttttttgtaccctatccctttttgtggtggtcctggttgctctttagggctccatttataaaaaaaaaaatggacattgtaacgaaaaaactaaagacataggtattttctagtagtaaagcatattatttaatgagaaacaataacatattacataagggatttcaagggcatagacattacttttggtagcataccatattgtaatggatcctcaataattatttcatacatggttcttagccaaagaaaaaataaaattaaataaaataaaattcatggtggggggttcaagatttatttaagttatgaaagcaaatatcttaataaaccccaccatgcatacttatagctatatagtagtagtactactccagtactccaagcttgatcatcatgagtacttgattagattttatagtttcatagaatcaatgtaattttttccatcaagctcacgtgaaaataaacccttgaaatattctttatttggcagtgttctgtatagggcaggatttttttcgttgatcaagcttttggctgggcctatcattgaatctacacttatattatggaatgtggcaacagagagtctttcatgtgtagagtttactgttgctctatgctcaatactacgatatattccatttgttaaaatctgaaaaaataaagaaataaataaaattattattaattagacaataaatgaataataatatatattattaattagattacctctagtatatctccaatattgacaacaaaagcatttgggagagggttgatagggagccacatgccatctttcttgacttggaggccttgtacttggttgacatgaaggagaaaggtaaggcatcccccatctgagtgatgggtgaggccaataactttctctggctcgggacatcgagggtaacaattgatactataaaactgcattccatcttcaaataaatttgaaatttcgttgtttttgattccaagaatcttctccatctggcaaattagatctctggcaagctttgccagttctaatgaataaatttccaaactttccttcaaagtggtaggaaggtttggaaacaagtgaggcttcctcaaagcaagtggtaaggtgaaaatcaataagtaatcattccaatcaagcttttgttcttcggtgaaaacgaaagattgtccaaagccttctatgtctcccggaagctggcatagctttttcttttcttctactggcaaattgaacagctcttcaattcctttctttactttctctatcaaagaatcacttattccatggtttaccaactgcatgcat

SEQ ID NO: 25278 - DNA, 3428 bp, Cannabis sativa
  modified_base (2340)..(2341): a, c, t, g, unknown or other
attttacaaaaattaaataatatttattatatatatttatatgaactcatgataacccacgtagctatgatatttaaattatagtgacaataaaagtgaagccacacacattagattttgtacattatcccatttatgattttcattaatttatattttaaagatgcgcatttatttgattattttattataattgtgttttttgttgttcttgttaattataactatttgtcaacatatttattctatttataaatgaatgaatatctttatagttttatatatataaatattgggatacgattttgtctagtgatgtactttcacggattgtatttcttggtacatgagtctcatgatacattaaatgagtctcagggtatgttattatttttttaaccctaattacccctaaatcaactctcagccctcaaatcaagtaactttttcatttaacggttaccgtacatcacggaatacattccgtgaaattacatcacggtcgtgtccatataaatattaatattattttaaattaatttaaatatataaatattaatatatagtattatttgtaatattataattttttattattgtttttatattaattaacattatgttctatcaaaaaaaattaacattatgtttaattttaatattttaaaactttatatattttttttttcaaatttttcaaattttaaatattacgtgattttctttcatttataaaatttttaaagtatacataacaaaaataaaaatttaaaatataattaagtatatgtgtaataacttaggatatacatatttttatgactgaattaatcgatgtgttttactgtttttcacacatgaattgttattaattcttgattaattgtttcttaaagaatgaattaatgacttactagcttgatcagcttttgactcttaaaatattcacattcacacaatcaaggacaaaattattagtatcataaatgatcttattccccataatcaacatattctaacacacaaataattaatagtattatttactataacgtaacatgcatatctcacaagaatttaactttgcacaaattctttttctgaatttaattaatttccaaagatcactaaatatataatatctcttttttttttcttctcatttcttttgcgtatatagtttattctcccaaattattaacttttctattattgcctattttctattgttgttgttatatgtgtactcgttattcttaatcctgtgatttatataatcaatatatatataatatactaaaatttatttttaaatatttgtttattaatatagtgaatatacaatattgaaattactattttgtttttgaaaattgaaggaatagaatataactaaaatattcaatattttgatcacattcacacttacgtgcgcagttaattattagttaacagaacatattacgacttaattaattaacttatattgtatatatatgtagattcttatatatatactgccatgttattctaaaatttcttatattgtaactatatatctttatacatgcatatatcatgacgatcgagaggatttgcactttgaacaaattcttttcaaatttcttaaattcttttcgtttccagaaggtacatatatactaaattaatattcacatgacatatatatattttacaattatatatataagaacaaaattagtaatgggatctttgtgctaatcaattctttttaaatgacctagtttgactatttttttttctaaagttgacaaattcaacattaacaatattaggcacaatattaaatgagagattatactttaagatgtgtgctctattcataagatgagcagcctgatcagcagacgatttgacaaaacgtaaagaaacatccctaaattaaagaaaataaaagttgcttacaatcttcaaaagtagatgacaaaacattcaaatttctaacaacttttaccaatactagacaatcaggataatactttaacattcaaaagatcatgcttcaaccatgataacagttcttgagagtcatgggctttaacaatttctggaataacttgcccaatctacagtcctgcagtcccatgccacaacccaacccttgtgatcccgaacaactccaccaaaaccatacatttcatcctcgtcaaacaatgcagcatcaatattcagtttgagtctttcataacctagtttagaccacagctcagccccatctaaaagataccaagtatcaaacgcaggaacaaacttctttcttgagatttaatttttccactgatcaagagtgatacgagnnaaattgacaacgaactccacccgacttttcctacgtacccttcaataagagttaatttcatgcgaactaaattacccaaactaacaacaccgcctgaccaccttgttcctcccctggtcatgagaacaaataaaaaaaccagtccccaaacgaccatgcctcaaccggaatcatagctaaacccactaccctgccaacaattatgagcaaaatcactggcaactaaacaatgcaaaattcattcacctgtcccatgacaaatcggacacaacaaagaggcatcaacttgttagtcttcaactgaactctcgtaggaagacacccacatactgccatctatacacaatttttttacctttagaggaagctttaattgccaaaatttcttctaaaatactacaatctctctgtctacacaaccctcacggttgcttataataagttaaatgcactcttaattgcatacttgctggttgatttaaacccccaataccagtactccttagaaaccgaattagaaaggaaaataccaagaatattgaccgccacttcctcacccaccacaaaagactactaaactttgcattagccaaaccagtccaaactacattgactcggaattgactcttcggaagccacagagcaccaaataaaagaatgatctcctctccattaatatttccttccgcgctcccttacgaatcaaattctttaccgcaataagtcttctctaaatataactttgattattactaagttctgttaaaagaaagttctcatttttaaaatatcgagctttaaaaatgacctagttgactagttattatgttaattatgtaagatattactatatgaaaaatatgaatctttacaatgtgaaaaaaatcaagaaaatcaaatgtatatgtaaatgacaaaaaagatcgaaatacttctaattattgatctttttgagttttaatttattgtcggataatatcccacatggaataaatgataggctaattagtaatttttctccccgaattttgacatgtactaaatcatatcccttgaacttttttagccgttaaaaattccccctgaa

SEQ ID NO: 25279 - DNA, 2542 bp, Cannabis sativa
taaccaattaatttattttcttcagggcaatctcagatcgggtaaatattattttggactaggtattttgtaaaagttaccaattggacattctgttttgttaaatgacaaaataaactttatattttctaatagtacaaatataggatcctaaactgattttttatcaaaataaaatttaataataatctgatctacaaataatatgacaagttggttatattttttgtatctattcgtattagaaattgtcttcaagttagttatattaaaaaaaatgatcgaaaattgagtttagaatcatatttttactattttggaaaatataaggttcattttatcatttaacaaaacagaatgtttaatcagtaatttttataaaattcagagtctaaaataatatttatccaaatcatttaaaatacatattactggtaagtcatgtacttgtttctgttgtgcgtgtcgtttaaatgttttgtttttgtttttttaatagcttctcatgtcgttttaatggctgagaacatataaaacgacattccaaaagaagagaaaaaaatgaaaaaggttgttattagtactcttgttactagttactatcttttaggaggtggcagctataaaacgtggcaattttctgatcatccaaacatgggattcactgccaaacaaacaaacacagagcttcatttgtagaaaaaataaccaaaaaaaaaaagctgagaacttcatataacagtagccatggcttctgcagtggctgctctgttcaacattgccagacctccaaacattactcccacccacatcaacaaattccacaattccaaaatttgcacccaaattctcaaccaaaaatcaaaatttcttttattcccttctaccaatccaccaaatccaaagctagctttttcaaccattacttgttctgctactgataaaccaacctcatcttctgaaataaggttctttcactttctcttgcttattgggtttttttctatcttaatgaaattattcaagaaaaacaagaaatgggggttttatttaagaagtttaatactcaagaattttaatatgtttgtcaaaatgcaataatatcagttaattcattttaattgtaacataataagtctaattagttttcactgagttttacaatgtagatagagagttagagctgaacccatttttattgtattaaattatgtttagcatatcatatttttatttatgtaatatatgttatatgcatatacaataacaaatataatagcatattaaaagataacatataatacaattcaatataataatactatacaatacaatctaataaggtgttctaatgtttaaactagattgtacgatcaaattattcattaattattttgttgaatgtttctatatggcttagtttctataagtttacaccaatgtgttaggatagaaaagaaaaaaaatcactttttaatttcataatatacatatttggagaagctaggaattgaaatcatatacataattccactaaaaaaggaagaaaaaaaactaaactttttagttatcttatgttttatagctataagcaaaagcagaagcttagctaatagttgagacattactcaactgggctttgatcataattttcagttgtgttttgacagttccacagcaagaataagaagtgaagtcctcaccccgtttcgctcagttcgaatgttcttctacatagctttcatggccagtgctggtctaggaggactcatagcgacaacccagttgataggcgcgttaacaaacccttctagagcagcagaagtgaccgaaatctcaaagggtctggccatagatttgggagcagtactagtctttgctttcctttattcaagagaaaacaatgccaaaaatctacagttggctaggctgtcccgagaggaaagcctttctaatctgaaactgagagtggacgagaaaagagtgattcctttaagctcattgagaggcattgctaggcttgtgatatgtgctggacccgagtcttatctcactgagtcttttagactgagccagcctttcaccgaagggcttttggaacgtggagtgctcattgtgccattttgcagcgacgggaatgtgcctagttttgagtttgaagagagcaatgaaaatgaagttactattcctaacaggaagaggctatggcagctgagaacttttgatgtgtctgcatggtctgagtaagtaaaaaggtaatcgattttgctgttgttgatttttgtttgttgctctcattttgttttgtttttctttctattttgttatgtgtattgttaggtggttagatgagcagaagaagatggctaatgtctcccctgactcccctgtgtaagtgtttgtttgttttttcattttttcgaaataacttaaacccgaaatgaacaacagaatttatagaggttcggccaagaagggcctaagctgtctttgaacttccatttaatggttacattatgtttggtagaaaaggaaaaaaaaa

SEQ ID NO: 25280 - DNA, 2028 bp, Cannabis sativa
ttcatccatatctaatctgaatttacacatcttgacttaataatgtgctattttatatgatgcttctggctagaatgggaattgataggaactataacgacacatttacaaattcctcgaaatgattgctttgcgttttttttttacctatgttaccctgttgctcatctagctacgattttaaacaatattcagatgtctccaatgctgatgtttctgactcttgcatggaaaatatcgacttatgcgatgagatgaagctttcagagagttgtgtccttgtagatgatagcactcttcgtgccatatctcgtagagctcgaaagcttgggtcatacaaggtacttctctttgccagtctttttttcttacaaatgtataatttatttgattgaatgaagatttcactcaatggaaatatgtctattaaaagatggtaattatttttttgtactagcctttacgactttagcgctgaagagctctagattattgcgttattagaacaagcttatacggtcaagagaaaatctgatgcttccttcttatagtcatcttccatattagttttctgccatatttatcagttcatcatggtctgacattggtttatgatgctttaataataagtggattcaaatttactatgagatgtagacaattttgattcgattgcccgagcattaggcttcacttgattttacatgtcttgctttcgtcttaaattgaacattcgttttctctataaagatttcgatgttgttgttaggccatgtgtgtctgaagtcttatatgtcttttcagcaagatgatcagacaaactaaactttttctttttcattttctcttctctaattagaaaaagatacaaaacatttttgcttcgaagaagaggctggcaaaggagtatgaacagctagcaatatggtttggggacgccgatatcaattccagccaagattcatcgtctgattcacacaatcaacaaactcgtcacacacgtgattcagaatgggagctactgtaaataataaaagaaaagggtctggtatctgtaaataacggcaaaaaaaagggtgtaacgggacttagtttcatcgattttttctactcttatataaatcgccggtatagtcatttattatggttgaggcactctcttttgattagaaccccatgaaatgaggtagttatgcagcaaatgtggtacaaaattactcttgaaccttttttgaatcaagaaaaataaatgagaaatggaaaaaataacaaaaaattcgtattcttttgtggtgattgtttgtttgtttgttctctcttttcttctcttcttactcttgcaggtactgatcatcttcttcttcatagtaagaaaatttcggaaaagagtcatttttatattatgaaatattttgatgactctttaacaaatatgcatacaaaatttcattccatgtgtcaggaacaccaggcaaacaccagtggatgcaatcagcaaagtttttgggatcagctctctgttcctttgtcaagagcttgcctttgcgttcgccatatattgtagtgtgagcatcttttctgaactctgataatcttgttatgtttagaaattttacattagttttcagccctgataaagtgtcatgaataatatccatgatttcaaggcttgaaccactaccccagtaagatggtgagtcttgtatcgggtatgtttcgttaaaacagttttcgttgctccctcctttccattcccagctcctatagaaaaataaaatgaaataaaaatgatttctttttattgggtttagcttaggattagtcagaggcttaatcttatattggaatagattaaacttaccataaatgtgtaggagacatactcatgaagaagaccttctgagtttggggattgattgtggagtctatccaatttgcccatgtatttaaagccaatctatatgctgtactcacattatattcctgtacatcatctggattcccatatctataccccaagaaaagaaa

SEQ ID NO: 25281 - DNA, 3642 bp, Cannabis sativa
  modified_base (2123)..(2126): a, c, t, g, unknown or other
agccgtgagagtgagcagatgaagattgtacatgtcggggcggttaggcttggagtgtacggtctttgggacagctggacatattttgtatagtcgctaggcgacaccttttgtactatgcactgtgtaaattttataaacattttgtaaacgagatcccagttttatgtaagtacgttattttgatatttataatagttaaataaagttttaaatattcacgattttcaataaactcgttgattagcaatgagctgcccaatttagttaaaaatcacgttaacacgcctaaactagtaggttgttacattaggtctggtgcataccattgcatacattagggcactaacaacatttgcatatggaatacgctccatttgcttcttctcctctgtggtgctaggtgacatctttgcacttaacttaaaatgagatgcaagaggtgtactaacaggtttagtcttctcatctgtgtcaaacctttgtaatactttcttaggatattgagtctttgtcaaacagactgtccttggaactctatttcttgtgatctccatcccaagaatcttcttagcttctccaagatctttcatttcaaattttgaacttagctgagtctttagcctagcaatctccaccttgctcttagatgcaattaacgtatcatcaacatataagagcaaataaatgaaagtaccatcttggagtttttgaaagtatacacaatgatcatattggttgcgggtgggtgtacttatgctctctgatgaagatgtcaaaacgtttgtaccactgtctcagtggctgcttcaaaacatatagtgacttgctcagcttgcaaacccaattctcacgtgctggaactttgtaaccatttgtttgggacatgtaaatttctttatctaaagtacaatggagaaaatctattttgacatcgacctgagctaactcgagatgaaactatgctgccaaaggcaaaaaaattctaatagatgaatgcttgatgataggtgagaatacctcattgtaatctattacttcttttcgggcataacattttgctaccaatctggctttgtattggatgttgtctttaccaggaactccttccttcttggcatagtcccatttgtagccaataacattcttttctttaggaggtcaaaccaacacccatttttgattctggtgtagagacttcatctcttcatccattcccaacttccatttcttgctgtcaacactttgtacaacttatctgtaagtgcatgggacgtcatcaataattattggaagtgcaaatgctacaatatctgtgtatctagtagacttttcgatctcctttctcgattgagtagtgacaatagattctgattgctgattggctggtggtgatgctgagggaatctccacctcagttgagatctcttattgatcatcactttcatcttcaccatgattttcaataatatattttggatcttccagtatctcaaactccaccttagaaagagtatttgagctttcattctctttctctaaggtggttttgcttagcataatagactcgtcaaatgtgacatctcgacttaagactatcttctttgattcaccataccaaagtcaaaaacatttgactccttcattaaagcccaagaaatagctttcttttctctaggatctagtttggattcattgacatggaaatatgcaggacatccaaatatgcataaggaatcataatcacaaataggtttttcaaacaatacctctttaggtattttccaatctagtgtagtagtagggagtctgggttgcatatggcaaagcctcggtcaaaaatacttttctcaatttggattgagatagcatacatctaactttctcaaccaaagtacggtttattcgttttgccatgccattttgtcgcgacgtacgaggtactgaaaaatgtctaatcatcccttcttaacacacttgtaaaaaaggatttgatttgtattcttcactattgtcagatccgagcctttagatcttcctgtctgtttgagtctcgatcattttcttccatttaaggatgacatccataactgttggaacttgttttaccaggatctagattnnnnaacatgtatgtttgattataatctacaatctataatctaacattctaaacatgaatttcttaaacaatgaaataaacacacataaagttgtagaaaaccttacattgatggtagcaaaatataatggctccttccgttcagatctctaaccaaaaataccatgggtaggggaacctaccataacgttcaatgaagatgatgttgtcaaggttaacttcctgcacaacgattcgttggtcgtggaagtacagatagccaaaaaaacagtggcccaaactatgataaataatagagcctccgcaaatatcttgttcaaaacactacatgaaaaaatgctcaaaaatttaaccctctgtcttcagcccgtatacggtttctccaaccagagtgtcgcacctttagggcaaatttgccttcccctcactgctgggcaagctccgaagagcatagctgtaatggcacaattttcggtattggatgttccatcagcctttaatgtcatgttgagccgaccagccttatatgacctaaaagcagttacatcgatatttcattcgtgccttaagtttccaacaaaaaatggggtcaggtgcctgagaggtaatcaacaagttgcacaggaatgttacaaccttgcccaaaccaaggctaaaaaggaagaatcctcctgtcagagtttggacaagggaaaagacattgcaaaatagggaaccgcccaaggcagggacgaagatgtggatccccgacttggggaaccaaatacaaatgttgggccagtggaagaactagaagagattggaatcgacccagatgttctgaccaggaaactcaaaattggaaaaggtttgctgctcgaagtaaaatcagcattgataaaatttctaagagcaaaccttgacatttttgcatggtcacatgaggacaggtcggaattgatccttttataatttcacatgccctgaatattgatcctaatttctggcccgttcaacaaaaaagaagactgttagataaagagtgggccctagccttaaaagaagaggtagaaaagctgcacaataacaatttcataattgaatctctctacccggcctgggttgctaaccctgtactagtgcccaaaccgaacaaaaaatggcgagtatgcattgacttcactgacctcaataaggtgtgcccaaaggactgcttctcacttccaagaatagatcaagtggatgcaacagctggacacaaaatattaagcttcatggacgcctatttggggtacaataaaatcaagatgcatccaccggaccaagaacatacaagtttccgaacagatatgggtctatactattataaagtcatgccttttggtctcaagaataccggagctacataccaaaaattggtaaataaaatgttcaaggactagatcagacgaaatatggaagtataaggccagagaatggttcctctcagttctagttaccgagtccaacctggttatgccttgatgagtaaagcatatagt

SEQ ID NO: 25282 - DNA, 2525 bp, Cannabis sativa
atctttttttaaaaaattaataaagaatacataaaatatttctcccatatatattacataaaaatgttaaaatagtcaattaattagttttttttttaaaaaaagggtcaactaattagttttagtgacttagaaaattagaaatattgtaaaaaaatagtgtggtgcagagcataatataatggtactagaattttttttaataataacaaattataagttcagatatcattttcaaggtttaaaaataatttaaaatcataaaagagtttttacataaatgctccttattgagttttatcttatttcacaattaaatctatctcttttaatttttatctcaaacaaacaaaaaaaaaaaatcagtcaaattattgagttttatatacaataatgatttgaatctttaaggtttttctttcacaaaattcttatttttatatatgaataatataaatttgttggaaaaaataaatatatgaccaataaaaatatagacctataatatttataaaatttggtgtttattttattttcataaaatctcaaaagtaattatgaaaatatacaacttaatagtcacttggaggagattttttctcataaagatttccttaatttagaaaaatatgtttttttaaggtggaaaatataaatttaaaattcattttaatagtctcaccttcattttttttaacttttggccaaaacatcaacctacctaaaaattaatttggtaaccacttgttttgcaattatatctatatttcttactcataccaaacaatttgaaattttgatagaaaatataaagcaaactcaactaagaaggcaggaagtaaaaatcattttgtttataatttaaatcgaaaaagagaaaaaataatatgatcatataaatcgtaattttaaccaatgtgactagtacttctatgatatgacgtcttatgattagttagcgattctctataatttttattaaataaaaataaatgagactcaattttaaattataccaataacaatattacatcgatcataagagtattagacaccactgataccctttagtatttctccaaacttatgtaggccaatagtaagggagtctctatttaggagagttttctatttttggcagttgtataattttttattattatttttttttgtaagggcacttgtataaattatagctcaatcacttttttttacaggatgatttatattgtaattataaattaataagtttttttttattaaatttataaattttataaataatttattgtgccaaaaaaaaaaagtttgaataacattttgcccaaacaatttatatactagatgatttcattaattgaggggacaataaatattataaaaaacaaacattagtaaaaaaaaaatatttgaataatttgggagggataatttcattagtaaaaagatattataaaaatgtggtgtgaaatagagggacaatagaaaacaacccaaagaaacattgatgggaaataaatgggaatctcttcactttatttcagtcacactcataatatttattcaatattattactcatattaatgttaattttacttagtagctatgaatgcaatataaattctacaaatcacccataattaagcaaagtgacactcacaagtgtttttctatatatagatttcaatcaattcatgtcactatttactaatgaactctttgttattattattattattgagcaaaaaaaaaacattaatttattttgtaagttgattacaaagttaacctttacaaagaattatttatttatttttgaaaaaaaaataatatatttttaagtgatgcaaataatgaaaatgattatagccttttagccatttgtttaataaggtttaatcaatgacattgtcatatggctgaagaaagagattttagcataaattaatactcttttgtttgacagttgagtccttaagaaaacaattaattgaatgattttgtttggattattctatacaatattgtgaaagatatatttgaaggtgaacataatattttttttttaattattcataagtaaaaaaaacttaaaatttgttaaaaaataactaaaaataaggttactatttttaaaaatattgttatcagctgctcgataatatttaaggtagcgtttttttttataaaaaattattaaatttaaataaatttaatttaatattaaattacactaatcgtatcttttagtaattcaatgaccaaattgctaaaaaacaaataaaaaaaatggaattggtcacattgtttaaaggagattatttataataataatatgtgtacacataaattatacaccaatatgagatacactgatataacaagtcattttttgacaggtgtcacttatcttaaaaaaatgagtttttaaaattacttctcatataaatgtgtgttaagtttgtgtgtaaattaggtgtgcactcattactggtatagatttaattttattttaaagtgttag

SEQ ID NO: 25283 - DNA, 2721 bp, Cannabis sativa
  modified_base (1110)..(1124): a, c, t, g, unknown or other
  modified_base (1691)..(1694): a, c, t, g, unknown or other
gccactttgcatagaagacatatcattgattcaagtagatgcccactttgttctaatcaccaagaaacaactttgcatgctctttttgtgtgcaaaagagcgaaaaaagtgtggccacgcaaaagagcgaaaaaagtgtggcattcgtctggtatacatataccacaactaatgaatcatcatgcttcttgtaagtctctactcttttatatttcagatttaataaccaagcaagaattggaaccagtggcttgcatcagttggagtatttggaatgaaagaaacaatgacttccatggaaaaaaaatcaaagccaactgatatattattgcaatgtgcattgaattacgtggctgaattttaatctgcaaattgtaatattaacaaaggaggacaagacatcattgcacctaatcaaagatcccattctattacaccacaatggatgtatcctccttctggacggcttaaactcaatactgacgctgcggtaaatacaatggaacaaaaagctagttttggagccattttgcgtaactctgatggggagactttagctgccttctccctccctatccaaagatgttacaaaccagaaatacttgaggctttggcaattttctatagccttcggaggctgattgcactttaatttcctatgcattacattgaaacagattcacttttggtggtgaaaggactgcaatcttctaatgccatagttttggattttcattgtattttatctgatattcatgatcttgtgaccaatttttcaggagtgcagattttcatgttcctagatctactaatactcatgctcataagttagctaagtatgctctttcggtggacacaaattgtatttggttggaggaaacaccccctcctctttgaactgttgtatcttaacattgaacatataatatgtaacagttttattctaaaaaaaaattctcagttgtaaataaatacttaaatttaatttttggcggtaataatatttaagttatatgtctaaaactctgtaagtaactgactgttaaatattaagtcattcacgtgttattttcttaattggtatatttacctatttttttttttttaaannnnnnnnnnnnnnntgacttggaccaattaggaattgcgcaatttacttaatacttaacagttaagtacttacagaagttctagaattataacttaggtattattaccaccaaaaattaaactaaggtatttatttacaactgggagttaaacttaagtatttatgccgcaaattactcaattatatactcttcctttcacaactttctccctcagtgggttcttcttccatcaacactaccttgatctgacccctccaactcatttttgtttggtatctgagttttagttttaggattggtgccgccagatcttcccagcccttgtatctctaacaacactgagataaatggtatgattctcttctacagtatttaaaaaatatatatctaaatataaaatacactaacgtaatattacgcacgtatcacttccttcaattagtgtttcaaatggcaaagttgaggcatatctttcccttctcatctttcaattatctttctatgcttctctattattgttgttatcttttattatatggaaatcttatattttagcagtataaatacactaaaataaannnnatattttggctctaaaacatacatcacattgtagaactcgttgcaagcttcaaaacggtatatagatcgtccaaaacagacacccgagtcaaaagttatgacaaaaatacgatttctgatcttctaggaatttctaaaaactacgaaacacaaaaatctcaaatttcgcactcatcgaaacaccaccaaaacttattcaaatcactccaaacttcacagggcgcatatataccataaatattaccatccatacgtaacataaattaaaatcgagcccttaaatgaaaaacaccattaacgttcggactaagctttaaaaagttctaaactcaatttctaacccaaaatcacctcagattcaacaagaaaatatcggagctagtcccatgactacccgagaacaatcttagaaggtcagaatcttcataactattctaattcacaaagaccctgaggagcctcaagtggagatcaaagacgttgaggaggctgatcctcgggagcctcaagtggagatcgaagaccttgaggaggctgatcctcgggttgctcagctcagccaagctatggatgacttgtaacaacagatgcaagactctcttgataagtaacatgaacagtttcaacactagttcatggaaaattggaggaacattgaaagccaacgtgttgagcaggaatattagagagttaacttatctcaacatattagagaagcttatcgctctaatcgtaaaactacttcccgtggaggtttattcaagttggtgagagagactccttgtcgaccaattggtcatgtggaaactagtgcccaagtctaaaccctttgctaaacctggtaatcgagcaggcactaagcaaataccaggatggagatctcccaaagggaaagtacctttgagcaagagctcgagaggactgaagctcgaggccaccaaccaatgggccctctacatgatgttgaacgacctcacaacaatgggagaaccaataggactcctccacccagtccttctcaacgttc

SEQ ID NO: 25284 - DNA, 1707 bp, Cannabis sativa
tgaaacagcgcaagaattttatgatcgattcgggtataaaagatttgattagttttaagctttacttcaatgattattttcgaagacgaaaggctcgtcttgtagataaatggttagcttttgtagttgagaataaggttaagaaaatacatcttaaaatttacaaacatcgtaatactaacagcagtgtctaccagttacctcctagaatattagacaatgcaagatatttgactgttttgaagttgaatggagtagagttggatactaattcttattcctttagtttcccatttttaaaaactttgtcattggtatatattgagcattcaaaagcttcaaaggttgatttggtatataaatttttgttggttctccttctcttgagaaattgcagttacatatttataaattcttaagtatgaatgatcaacctcgactgcaaagtttaagccttaagtttttagaatttaaaggtataaggaatgagattacatttcaagttgaagccaaaaacgttgaatctttggttttaagttgccttcaattcgacgaaatagatttctctgcttgtaagaaagttagaaatcttagattaggttatcataattatgttcgtccttcaaacaagttagaatattttatttcgaattttcctcttcttgaaaatttgactctgcacttccaatatgcatattttgagcacataagaatctcaaataaacatctgcaaagtttagtggtagagactgatgaatatgtgtttcattatggaaagggaatgataaacacaaagataattacaatcgaatctgccccaaaatttgaatattttcgatatgaaggttatatcgactttagcatattgttagagtcatcaaattcgttgaatggggaaattgtaattcttgataagcaggattactttgatacaaagtggtttaccaatatgagagactttcttctgaatctcaaatgttcttggaatattgtaactctgcaagtttgcacaagtgaggtatgtttgttatttctctgatatgattttgtggtgttatttgaatttcatgtaatcatgttactaattcatttatgtttttgtaaccatgatatacatgaaggctctcatctggccagaaaatttgaagaacgaatgtccttatccgttgcttaactggaagcatcttcgagttattactgattgtaaacccgagaaagagtatgttctcaaagatgccttgatgaatttaacttctttagaaacactatctatcaatggaaagaacatattctagttttttttttctttacaattttaactgctaattatgatgccttttatgagttttctttgctaaatggtccttgagaccttttgttagtaactttctactaatgaatttgagtgccttccattatattttcttgtgaaactagttgatattgttctatttgttaatgttgtagattgatctttctactctattacaattcttacaaatctacaattaatattattattgacggcaaaattacttaaattttattttttttgacacttaatcaataatcacatcaactaaaattttgatggcaaaatcatcagatattattattattattgtagttgtagcttccttgttcgtagacaaagcggattcggaattgtctttcattccaaggcataacttgtatccatgcgcttca

SEQ ID NO: 25285 - DNA, 2791 bp, Cannabis sativa
  modified_base (354)..(354): a, c, t, g, unknown or other
  modified_base (640)..(649): a, c, t, g, unknown or other
  modified_base (1531)..(1540): a, c, t, g, unknown or other
gtttggctctgtgccaatttcctctatgcctgatattatattttgtaatgaccgcgaggtctaaccgtttctaatctaatataagtacgcttttcttcaaaaaaaatgttcagcgacttaggggttgtatgttcaaacgaatgactaggtattcgaatgtgtctcatgtgacgtaccttatcgtatgaaaagatatgtatattatatcgtattatattatattaaattatatataatattaatttttatagacatataaacttatattttaatataaattaaaatttaatatattattatataatattatgatatataatttaatttaatacaatatagagtaatttgcggcanaaatacctaagtttaatttttagttgcaaataaatatttaagtttaatttttggaggtaataatacctaagttatatttctgaaactctgtaggtacttaaccgttaaatattatgccattaaatccacatgtcatttttatattggtatatttgaactattttttttttttaaaataataaaattttaatgacttggaccaatcagggattgccacgtgaaaatttacttaaccaagtaccgacagaagttttaaaattataacttaggtattattaccgctaannnnnnnnnntaagtatttatttacaactagaaattatacttagacatttataccgcaaattactctacaatataatctaatctaatacgacatactaaacgttaaacaagttttatctagtcacatctttatgttcttagttgattatgctcctatgttatcatcatgaatcatgattataagggatcagttttttttttttttaaatattataaggtatagcttaataataaaatattgagagaaatttcaaacgataactgtataactagaattaattttttatgggtctttctaaattatttagaagtctaataaattttttttagaaataaatttatgaaaatacaatttagtaacttttaaatttgaaatataaataaaaatatttttcagtaaattataaaagtataatttatttaccagtaagtttagttacattttagttaattaaatatattaaaaactaagtgattatttatttaatattgctctttttaaggtaaaaaaaaaaatatatttctcaaatattaaaatattctttttaaagttataaatttaaattcatttcaaataaaaaagttctaaaagtaatttttttttaaaataaaacaaaaaaaaagttcttcactaatattaacctacacaaacaataaaacctctcaaaatattaaataaaaaggtaaatactagtgttttgtaaaagttacaattagactctctgttaaatgaaaaataaacatgatattttctaaaattgtaaaaataggaccctgagctcaatttttaacaattttactttttaataataccaactttaagataatttctaacatgaatagataaagtaaatgtaaccagttttgttagattggattattattaagtttnnnnnnnnnnaaaaatcagttcagggtcttatttgtacaatttttgaaaatatatggtctattttatcatttaataaaataaataagccaattagtaacctttacaaaacacaatgtccaaaatcatatttatcctaaatacaaaagtaatgaaatcaagaaagaaaatagcatgacaaaaacaattaaaaaaacaaagaaaagaaagaaaacttaataaagaaactctgttgaaaaacaatgtgttgtgtcacttcattaaaaaaaaaaaaaagaaaaaaaaaacatagaaaaagaaagaaaagagttctatttttgcttaacaaagaaagaaaagagttgacttgtccaatatgcagtatggatgctgaaaccatattacatgcccttgtgtcttgtccagcagtagacctcattcctcgactggtgcatggaacgttttattgtgttgaatacagaccagtcatgcacgttggtggctgtctgttgggcactttggaacgctagaaatgataaggtatggcaaaacaagacattaggagttgagagcattgttgtatcggctacgaactaccttaattaatggtgtattgctcaaaaatcaagcaatgaactgttattcactaggtacatctcgggggacggtgatgagtattaatggagtgcctcaattgacaatagtattaaggttaatgtcgacgcgtcggtgtttagtgactcctcaacatatggagttggttttgtggctagagactctggtggtatcctcgtggaaggcggtacaaaactttttcatggttcaattactcctgaggtggccgaagctattggggttcgggaggcattgagttggatcaaagaccatccgtggactcatgtgactttggaaacggattgtctttctgtggttcaagctatccgaagttcaatgaccatatttcaatgtttggcaaagtgattagtgattgtaaaattttatttcatgttttgtgtaatgtttctttttattttgtaaagcgatcaacaaatatagtagctcactccttcattagagctgctatatcccatcctgatcgtcgttttaacttggacaatgttcctattgagttgttaccttgtttgataactgaattaatcatataaaaaaaatgatgattttattttcaaaaaaagaaagagttgaaactttcatttcgatgtatgtgtaaaaagaataattaaaaaaaaaagggttaatttcacaaatgcacaaaaacaataa

SEQ ID NO: 25286 - DNA, 1324 bp, Cannabis sativa
taaaactaaaaaaaaaatagtgtccgatgggtccgattggcccgatagggtacccatcggaccctatcggtccaattggacaatcacaagttgggaggtagttctagtccgatggtccgattggtagtgtgcatcggacccatgcatcggaccaatcggacccatgcttcgaaccatacagtcggaccatcgggcccatacagtcggacaccatcggacccacacggtccgaccatcggaccatcgggccatcttcttccctagatccgaaacgccaatctcttctccattgacagatccgaatcccaatttcacaaaaaatttcttaaatctaacaaataatatctcacaaacaatcccaaacaaaatatatattttaaccctttctaaaaaaaaacaaaaaaaacacaacataccttcgacattttcagttcgggtcacggtggtgtcgccggttgagctttgaatgttgtttgttgagcgttgacggtggtcggttgagtgttgtgggttgagcgtcggttgatcgcgggtgagcgtcgttggggttggggttttcgtcggggtccgtgggttgagcatgggtgagcgtttggggttggggttgagcgtgggtgagcgtttgggtgagcgtttcgtgggtccgtggtgagcgtttcgtgggtgagcgtttgggaggcaattagtccgatggtccgtgggtggcgttgggtgttggtgagttgagagagagagagccggctgagattaggatttcaaatgggaggggtacttttggaaaattaataaaatggtcatatattaccaattttagtatgtatttagggaaaaaataatagagttttgtaagtatggaaattcaaatttcccttttagtaatacatttttaaccaatagaatagagaattggatgtgagtgctcatagctttttttttatatacatttgtagctatttgacattagctcttgtgagtgtttattttgcattagccatttacagcgtagagaaatagagaatccaaaattaatgaagaccaagacaaattataaagactatattacctataaactataattaacaaaaaaaaaaaacaagagaaaaaattaatatagttttttatttaccttaggatagaaaattttgattaattttttataaaaaatggccaaaatcccatattaaaataaaattcaatattgcccaaagaggatgcagagaattacctcatgtactatttttaacttttttttttttcaaatttacagtttggattgctccggtgatttctatgtgggttactatacggattttggttgcgattt

SEQ ID NO: 25287 - DNA, 1385 bp, Cannabis sativa
ccataagatcatagccattttatctataccatctcctgggtgagcattacagaagctctcaaaccagtaaccaaaatcatcatctccactcaagaaagaaaaacccaatcctctctccaaacaagccatagtaaaaggacaagtaaccataagatgaaatgtagtcttgacatctccactacaaagagggcaaatactagtcacattcactcgcttagttcgaagtgaaacaagagtcggaagacaattagagagggctcgccaaaaaaaattcttaacttttggagggagttttaaataccaaaactttttccaaaaaccagagttgtcttgagaattccatctcccattaagctcttgcaacgcacgataggcactcctaacagaatagcttccataatctttaaacgcccaataccatgagtccatattcggtgttaaaggcagaggtatgttgcgaatgagatcaatatctctcggttcaaacaaatcttccaatatttcttcatcccaactcatttttcaacttgtaacaagttaaaaacagaacaatgacgaagagctttatgagaagaagtcacatacggattgtcttttgaaggaagccacggttgattaagaactggaatggaagtgcccgatccgatcctccatcgagctcccatttttacaatttgtgcttaaccataaatatattcgtgtgttgtttccaaatagtgttatcgtgtcatgtcgtatattgttatagttattggtacttagcatcctctttagtaatatattaagaaaataacttttaaaaaataccgttaaccaatcgtaaagtgctacctataaaattacggtaccaattgtgtaatagctctgctcaaacccaaaaggcccaacttatcactattgtaattatatcaataccttggggacaatatggtcaacctcaatttcccaaggttttgtaatgaaaaaaaaaaaaaaaaaagacacagtaaggtttttcttcggtttctcgtgtatccatggcgattcttggcaatgagaataaccactaagaccgtctaagacaaacataaaaacctaacagacacaattgttgtcgcaacgaaatgttgaagcttctctactcctcttcgtgccttcagaaccgactctacaccctacttcccacaagtattccaacaccctcacatcactcgacggcgccgtttcttcctgctttgacctctctcactggtttcgctgggcgaagtcgtaatcttcattctcgtgcatttttttgctcggacgcgaatgattgttcggagccagtggccgaggtaaagccttcctccgcaattttgtctaagaactccagacccgaaggttatctaacggttggttgaatttag

SEQ ID NO: 25288 - DNA, 1334 bp, Cannabis sativa
gaaattaaaagcagaaggaaaatattaagaaacttcaaattcctttcgaaggaaaaaaacaaaagcacacagaaacattgacatagccattgcatgcatagtcagaaacttttataatcaatgagattacatactcgacgaacttggaccagcaacttcgttacttgcagaagtgtttcctggttcaaccagcctgcatagagacgtggagtcactcatcctttcctgagacaaaattagcttaaacattatgaaatattgatgaagtagctaaatataccattagcacaagaaattgataatggtttggagatattcttaaggtatccattattacaggatataaagaagaaaggaaagtgaaaagcataaagatatccaacaactttactttgtcaggaagaagcattggttgcctaaagccatacgcacttgaactcatgtctgctcccaatctggaagtggatattatttcaccattcgaaacctgtacaaaaggatgtaattaagaaaacgtaggattttttttacggatatcagttgttgatttatcaattaatcacctttgaagataacagcttgacacccagattttcactatcagatgaccctataattttccttatatacattgtctctccaatgtgtaccagctgcaaagataagaaatatggagaaatgtaaaatcatgaagaaaaaaaatccataaaattgtcttttttgccttatttcttaaatatgaataaacggaaagggttattttcaggcaatttcagcttgacgcaagagttataccttcataatatctggatcattccaaggtcctttgtccgatctaagacacccaccattatttggacatgagcatgttcctcccagaaaatctggaagttggctgttcaagagaaagaagcttaaaataaactttgtaaccatatcaataaataagaatagtatgaaatttataaacctaaacaacaaattttgtaatgccctgaagccacaacaagtcagataaccaaccttgagtcaataacctcaagcagcctgtttcgaaatctgtttcctagaacctttggaatcaagtgaataacatatttagattacttcatagaacttctgaagataatttggaaaaaaataataataatttacttgaaagttcctacatgtatctttgcagtagtctttggatcaagaaagccttttgcggtattccatagcaatttgaatccgccaccagcattgactatgaacatctgatgtaatgtctgtagagaatgaactaatatcataaataactgattaaattcacactgtaattttgttagtat

SEQ ID NO: 25289 - DNA, 3141 bp, Cannabis sativa
atggaatggaatggaataaaatttctaatgcttttatctcatcttacattgaaatggtttttccttctattttaaaataacagaaaaatcatttcattagaataacattccaataatataaaatgcaaccaaacaaagaaatagaatgaaaattgatttctttccattccatttcattattcccaaccaaacgcaacattagtaactaaaaacgaattgaaaaagacaaaataactggacacttgataagtaaaattgttgtggctaatccaaacaagtgggaattatccacttgattagaggcatgaggaaggtaggtttaggttttctaaggttacatagtattgtcagaaattgctagggtggcagtcaaggatcaatttccaatacgtatagcacattgatcagggaaaggacactgggtgaacttcacgttgcaaaaacacattaacaccttaagctaaagtccaacctgagttacttgccagcaacacaagctcagtgtttagctttaaatgaagcactcatatcagcatcgccaaaatctcactttctctattttacgtcacactttaatattacaccatacatcaatttttttttatttttttcatcataccattaaaatattacatcttttaacatattttatttatacaaaccaaaaagttgaaaatattaaatgatcaaaaaataaggaattggagagaaattattaaacaattatttgaagaatgaatgcactattcataatgtataattttgagctattttagctcaattgatagagcattttttaacacattttctttatattttactttttgagctatttagctcatgagatgtaagtgaggcatgagtataaaatgactactcataaagaaacaaatcataaagagagtaatcaagacataaactataactaacacgttaaatgatgtttacctgctcagcagttttatgcttgaaaagaacatacgatgccgagactatcctacatgactccgcaatctgagcttctagatcaactgctgtggtgggcccagtgtttgaatgaccatctttcctcttttgagatgctgaacgacggcccccgtatgatgagagtatgaaatgagaaagtacatgagcctgtaatggaaggtaacatgaatatcaaacaacattgggtccttaatattcatcacttgcagctagacacaaaaattaagttgcatgtctcacatgaaacgctgccttcagaatgtcatctggctttgcctggtcctttagcaacgcatatacttggtcctttgatggattatatgtaacaatatatttctccctctgtcatcaatcaattcaaagaccgtaacatatttatgagaaacacagtgtcggtcaagaagaacttcaaaagtatcgatgagtctgaacataattttaggggaggaagaaatatagaggctgagacttgggaaagagaaattctctctcaaacacacaaataataaataaaaaaaatgacacagtaagcacacctcaaagaaaggctctaccgcaagatactcccctgggtcttggaatgcatctttgaatcttggtcctgcatgcaatttaaaatgattcaggttcaaatcaagatctagcaactcataactcccaaataaaaggcatattcaatcagcaagcttattacttgaacataccaagaactacatggctctctttcaaccatgggaaactaaatatgttttcattcttgtttccctccttcaatgaaggtacacgtcctgtgatatatagcacagataagacatctatcagcaatttgtaattgagctcccaatgaaactctcatgaatggacaaaacaaggaagtttaaaagacaaatagatcaacaaaaaaataaatatgtgaatccccattgcacattgtatgtaacctgtctttaggaaggactctacagcaacagtgaatcttgcccggttcaacgtatgcaacacaacagatttaacctgccaaaacaaataattgcaatatgagaaaaaaaaaagtaccagacgcaagagaattgagagcaatgaaactataaatgatatatactgctatgtgaattatacctcttggtaagagctgagaacatatccacatgaaagcaaagcaaatgtagtaaccaacgaaggatttctttttgaaatcagtatgctcatcccagttcccagcttcaaaaacatagagtgctttaataataataatttaaaaattgtgcctaagccacagtggacactacaagtttgctttaataataataatttagtttaaaaaaaatacaaaaccttttcctacatttgaaactagcattttcaaaactcagcaatattaatagcactaccatctgtcatgctgtttcctctccttgtctactgcataccttcctcccaataagatcattgacatttttttctaatgctctagcagaattacttttttttttttttggaaaaagagaaagagaccacttgtcttagacaggcctcaaacagaagagtgatgttaccctatgccataaatgagttctttgattcattggctctcaatcccaagattctaagtgaggagctcatgtacataaatccttttaaagacacaaacctatagttgacaaaaggaacttccaaaatcttaaaaggaagataaaccactaaaagcaattacaaaaataagaaaacaaacacctagaagttccagatgtttgcttaaatacaccaccacatggaaattgaacacttgtgctttactttttcaagaatcataggttttgattctgttgacagcataatctaaaagatagattattagattcttataatggctgaataaaggtgttacgtattgatcccatattggcctgtaaatcttattagactgtacaccttttttgacatttttgtcttcttaagctcaaagatcgaaatgaatgaattttatgttagggttttaaaaaaaaaaaaccaaggttcaccatcatattgtcttttttctttcacatctttaacctgtgtttctagtttatctcagccttcttttttgcataaaactcatccacagaagaatataaagtgttacaagcataccaggtctgcaatatttccaac

SEQ ID NO: 25290 - DNA, 8494 bp, Cannabis sativa
  modified_base (699)..(704): a, c, t, g, unknown or other
tagcattagggcgttacacctattgtcggcgtcgatctccaccaaccttctctctccgtttcactcatctctctccccttctcggcagtcggcatctcccagcttcgacctttctattttctcggcggtatgaatctccatttttcttaatggctctctaattgaagttgtgccaagtaataatactgttgggtaatttacaataatattttaaaatttaaaaattttgtgtcaggaaactgtgaaggtttatgagaatttgggtataggactatttagagtgttgactggaagatggaaggggctacaatggataatattgggtatagtaaagattctgaggatgatgatgaactttgctatgcttctgtaccagtgtccaaattacagcctaggtaaacattaatcattatagtttatataattcattaaaaaatcttttggatatgaagaaccaacaaatggcgattttttttctcccttgttagtttccagtggtggtgagacgagagagaaaggggacctgggaaggatttgtagaaaaagaagaagaaagaagaaagaagaagaaaaacaaaaaaaaaattattttttttaattttttaaattaaaaaaagtaaaaaagaaaaaatatttaaatttttttttctgattttttatttatttttaaatatctataattattttttaaaattaatnnnnnntggaccactaaaaatttgtcacgtgtacaaatgcgtacacgtggacagtttatcgtggcatttaactgtgatttttggacggaggtgtgcacagcaaaaccggaacgtttaggtagttcagctaccaaaatttcaatttttgtggttaagtgttacaaacggtaaaatttaggtaatttaaccgccaatatcaaaaataaataaataaataaataaaaaataaagattataaaagttaaaacaataccactaggttattgatatattaattgattaactgattttcaaattcataaaattgaatgaatccgggatttgataccaaggaagccctatgaaaaggaaaaagaaagaaaggaaaatagtaaaactgaaacctatctctttctctctctctttctctgcttgcggcggaaggagcaccgtcgaccctcccctctcacctcaggtggaccgccgttcctttttctcgaaaccccgagcccagcttccctttctccctgtcggtgctctcgttaccacggcgtcaccaccaccgccacctgaagcgacgcaacctgagaactcacggaactcgaaggttccttccccctcgcgaatcccgacgttgtttctcgacaaataaagcagtaagttaaagttgtggctattatttggaaaacagtaaaattttgattatttagctctgaaaatctcaacttgttgggtgagttgttcttcttatactgcgtgtataatgttgagttattattctggataatgaaaattatattgaagtgtttgttaagcttctcctattttgtggtcttcttagtgtcctttattattggaaagatgggttttttatattttaagatcaatcgactcagtataagtattcataaccaaatttttatatctccaatttgacatatgtaagttgttttaattaattagacagtatatcatcaaccagcagtacaacttattttacaagctcaagatttttgtttatcaattcttttaaaagttggattagtgagttctgatatggctctttacttgcatgtcgtctttttgttgctttaattgatttgagtgaattacatggagtattattatgtactctattattttgtgtgtacatggatagaaaattaatgggcttgtgatctgactgaaacacaaacacagccataattaatgtctttcatttttgttgcttaactatccaattagtgtttgaatggggatcttgttatactttacgatcaggagtatagtaaatatgtatgataaaattgaatctattgaatttgacatatttaagcttcaatagaggatagatggagtgttgaaagttgtgtagaggcttatgggttataaaattaaattattcattagagaattgattgcttctctttgcctacttcagttgaaattcttcgtaaatattcattttccaggttttaaacttgtgattttaaattttgtaaatgatttaatgatgtcttcaacctctatcaacgttgttttctacttacaaaacattcttcgccttttatatattttgttttatatatattttactaactcttcatttgtttcatcttttaggagctatttcatttttgttagggccatcatcacatttgaatttgatatgtcaaagtgtaaacttaggtgtttattgattaaatgatcttgcctgttcatatatgttttcttactacaattttacatatttctagattgtattctaagactcaaaatagtgcacttgcaacgcaagtgcctctcccaaccttttggaaagaagtgcttatatatctttatcattatcaatttattcaactattttttaattaaatttaaataatatatttacagagaaaaagagagagaataaaccctaaaaattccctcattatctgagtctcaaagaacctcttcggttcccctgcaagtttaacagctccgactcaagctccaatttcacaaggttttccctttctttgtaactgtgatttagagaaatttgttttgaaatcgagatgaagaatcccaataaccaattttctaagttaaagaaagtagagtttcccgatagtgaagaggacatcgaatcaccattgtcatcctcttcctctgaacatgtgagtaaccattgactctgaaaaagctcttttttttttcttaacaatattgatgagttagtttggataaaaaaaaagtattattttatcttctgggttgataataggaggaggaagaggagatagagcgggaactagcagatgtgacattcgaggagttgcagaaggcacgctctaatgggtcacattcagtgtctagaaaggacaacaaagagaagaaggttggtcgtgccaataagaacaggtaattctagtttgaatatgtatacgcaagacgcacacattggtggttatgtggctgatgaggttgctaatttatgtgtatttgtgtttgaagaccaatggaagttagttgtaagaagccagttggtcgatttagagatgttgttcaagctcctaaaaaggttagttttgttgataattgtaggtttttaagttatatcatgtttaaaattggtatatgagtatatgggatttgattgttttgttggtctcgtgatgttcaatttttacattgttttggtagtttgcttaaactggttttgaatgagattactaaggtggctgcttctggactatgataagagaaacatgaccactactttgttcttaaggaatcctaacttcctgattcatcatttgtttattacacattgtaaaactgattgagtttcttgtgtgtattagctccttatgttgtagagctttattatttaacagatcttattcttaatgtttttttaggtcctacgagacccacggtttgagtctttatgtggtacacttgataatgatgggtaagcattcagtctcttgaagatgtcattcttaatactaatatttaccaacctggaaatgtgtatctatacatatatgaataataataagaagaaaaaaaaaacagaaacaaaagactgtcatttaaaggtcacagtttgagtttatgcttttgtcatgactcgcaagttggttatttgattttatgttttgacattatatactttttctaaataacaaaaaaatgttttgacatatatatgattgtgtgggatcttcagctttaaaaaaagatataattttcttttcgaggaggagcttcctgctgaaaaggaggtgagtttcttgactagttgtgttttctacttcaatctcgattttcctatttgttgagttttgacttggattttgcaggaactacgcaagcaattgaagaaatcgagtgatccagaagtcgttgaagagctaaagaaccaactatcttggatcgtaagtgctttgctcatgctattcatttacttgaacaccttcctttagattttgtataaaatttttgtaaaatatttatggtttttctgttaattattgcagaacaaacagctgaagcctgattcaacaaagcatagagaaaatgctattttggctgaacataagagaaaagaaagagaagcagtaaagcaggggaaaaaacccttttatcttaagaaatgtacttctttctctccctctctcatgatttctctttctcgatataggtaatctgtataataagatgtatacatgatccaatttgactccttcttgcatttctaattgcagctgatgtccgaaaacaacgactccttgaaaaatatgaacagcttcaggtatgtagagaacacgggacatgtattataaaatcactttcgcagcaagtctggatactaaattactaatgaactattctcatatgagcagggatctggcaagcttgaagcctatattgagaaaagaaggaaaaagaatgctgcaaaggatcaacgatacatgccttatcgcaagcctatggagaatcagtaacaacaaagttaatgagctgatttcgtctttaaatgtagcatataaatcttccatcttttatgttatggtggtggagacattccctgctcttaggttgagactcccacaaggccatatagatgttacttgaactaaacacagtggtagaaggaaggaaaacaatccatttttgtgaattttggttcaccaacttaaggcatgctgttgatggttttggttttccattgcatcttaatttgatcccatcaaatcagttttgggatgttgatacttgatggtaatattattatttttaaccaaaaaatgtattttttttaagaaataatatttacatattgttttatctgttatgattgttttggatacattagttgagttatcttacttgtaatattggagaaaaaaatacaaagtttccaatcaaacggtgaccactgttgtcctaatgtagagtgccccatggtacagcctgccttttctattatttatttttcggttacaagaaaagagtatcacttggtgccacccacccatttgatcttagataattttggggactagattttatttagtgtgatatggaataaaaatagggattgtacagaattttaaatatttttgtgattttatttacagaaaatgcggtttttttatgttatacatttattaatttgttgttgaatttttgttatatgtatattgtttttttttgttgttgttttaattttgtttagatgatattattctgttatttttatttttttttttttttgtgaaattataatgtaaaattgtaactattacaaaattaattatttaaaccttattttgtatattggtaaagagaaatcctataagttctataatgtgcccgtgtagggtctgtggaagttatggttttttaactgtttttttctccctaactgatttcctccttttctttttttgaatcttgaagataactgctcccgcctactctgttccttcacccttcctctgcgtttttctcctgataatcaccctcctttctcctttttttcaatgcattctgttatggataatctgaactctgctctttcacttactgatgaggaaagatctactctcacattgcctgacattgctgctctggatgtaccaacttcacagccagtttttgctcttttagcaagagttttaactccccaaaatgtctacaaaccaggttttatagaccagatgtcggggcactggcagggacgataccctgttgcaatcactgaatataaaaatgaggaaggtctctttcatatctgcttcggttgtgagggggataaacgccgggttcttaacaaagaaccatggcactttcaaaaccatttgatcattctcttggcgccagatgttctgcaaaatgtcacaaaggaaaatatggtttatactcctttttgggtgcaaatatatcgcctgccatttcttagtaagtcacggttccttgctgaagctttgggaaatatcattggggagtttttggaagttcatgatgattctacaaatgagggatggggtccctttctgcgaatccgagttaaacttcttgtcactaaaccacttatgagaggtcaaatgatcaaacttccgaagattcgagatgaattctgggtggactttcggtatgagcgtttgcctgaattttgctttgaatgtggctgccttggccatccttttgaacgatgtgtggcgttcatggaacgaatggatagcggtaatgctgatgatgattttcaatatgggccatggatgaaaggttcaaagttaccaaccaatggttatgacagatatcgtactgacttttccaaagccaatgcttggcctcttctcactcgtttggctagaaactccatttcaccttcccttccaacaactcgaacccgtggtcagcctcaaccaccatatttacttcctggagagtcttcaactacacctttgaccttacactctagatcaaacatccccacttctcatcatcaccaatctgtgtcgacaacacataccccattactacacacatctggtttgagactacatgcttctggtgcaaatattccttctaatccgcctcagccatctccatccttcccttccactactgtttgcattactcaacttattgattccactgccactatgctttccacccaaactactacatcacccaaccaatccactccttcaactacactaaaacaacaaacagacccctctctctccacagctgatctctccaatatatatatgcccgatatagattacacctcctccacacaacactctcctgccaatgtttttgccacttatccacctatgcactcttttcaattgcgctcacatgtctcgtctcaactcaacacccacatctcgactacaccaatttacaccacttcacaccccacagccatggctaatgttggacaagaaaatacctcaccaaatgttatcccgaaaagacaaagtgaaactatgtcagttcggaaaatgctcaaacgaagccgatttttgaatggttcatcatcaactgtttctgaagatgatgcttgtgtgactgatgtttctgcaaatgtggattcagcagccgcttttatttcaacagcgggggttgctatgcaaccccgcccatcgccatgaaaatcttaagttggaatgctcggggtttggggaacccgaacgcattcagacatttacgattgcttatacaacaacaatcgccccatgttttgtttcttatggagacaaaactcagttctaattcggttactcggtttcgtaatagtctacatttttctaatggtttagaagctcctagagttggattaagtggtggtttattgctcttatggaaggataatgtctctgtcaagctctcccactttggacatactttcttcgattgttcgttgtcttttgaagatggcccctcattccacttcacagctttctatggtgcacctgccacgcaagacagattggcttcttggactctcttgaggaggcttgctgatatttctcctcttcaaccgtggcttgtaattggagattttaacgagattctatctaatgctgacaaagaaggaggcccgctgcgaaatgaacgtttgatgcaagatttccgtgcttgtcttgatcattgccatttgaatgatacgccttatgagggtgattcttttacttggattaaaaatcgtactgctgcaacaactttaaaagagcgtcttgactggtgtttcattaatcatctctggaacaatgtgtttgaggtcccaaaagtggttcatttagactattatcactctgaccacagagctatctctgctgtgattacaactcctggtgaaactgtgcagcagcccaaaagaagaagtcgctttcgctttgagaagctttggttagctgaccctgaaagtcgagacatcattactagttgctggacagatcagttctcccatagcccgattgataatgtgctgaataatattgacgtttgtgctactactttgcaaaaatggcacattgggaagtatggtcatatgaagaaaagagttgcagatgctcaaactcgtgttaataatctcaacaatacattgaaccgatcgaatactatcatggaagaactaaggacctctgaatcgatacttgatgatttgctagaacaagaagagatatattggcagcaacgatcaagagtggaatggatgagttcgggtgaccgcaacacaaaattttttcatgcaaaagcttcagcccgtcaatcgaataacaggataaaatttctaattaatgatg

SEQ ID NO: 25291 - DNA, 1226 bp, Cannabis sativa
ttttttggtgagacaggcctgggatccagttgcgaagagattcatggcaggatggtgttcttggtaccaattgtcccattcctcctaagtggaattggacttatgactttcaagttaaggatcagattggtagcttcttctacttcccctctatcaatttccagagagcagcaggtggcttcggctcctttgtcatcaacaatcgaccagtcatatccattcctttcgcccagcctgatggtgatattgaaatcttcattggagattggtatatcagaaatcatactgtgagtaattctatgttcaatttgtatttttcatgttaagaatataattttatttgctcttggaataatgttttgtttctttctctatgttttaggcattaaggacatctttaagtgctgggaaagagcttgggatgccagatggagttctcatcaatggaaaagggccataccgttacaacaacactcttgtacctgatggtattgagcatgaaaccatcaatgttgaccaaggtatgttttggacctctactactcattatggtgtttgtactttaatagtctttatggtctttaaaaagcactagcaagctttttgttgagactttttctctcattttcacttgataccaatatgctttttttttcctttacaatttaaatgatggctgtctctataattgtatgtttcattgcctgttgtttgaaatgatgctgtatgttgtgtaggcaaaacttatcgacttcgcgtgcacaacgttggagtttctacaagtttaaacttcagaattcagagtcacaatatacttttagccgaaacagagggacactatactatgcaacaaaactacactgacttcgatattcatgttgggcagtcttattctttcttgttgaccactgatcagaatgccagtaccgattactatattgttgccagtgctaggtttgtaaatgaatctatttggcaaagggtcacaggagttgcagtcctgcactactctaattctaaaggtccagccactggtcctctccccgatccaccaaatgatgtgtttgacaaaacaaggtcgatgaatcaagcattgagtgtcaggtttgttcttgcaacttttctattatcttttactttttatgccaaatagtaatgacccagataagttaaaagtccattttttttttaaaattttagttatctttatccatttttggtgccgt

SEQ ID NO: 25292 - DNA, 2517 bp, Cannabis sativa
ttccttacttcaccacttacagcacaagcaagagactttgctctgtctttttggacaaaacaacaatagtcaggaggatgtgtctctagcagggtcgacccgtgagtattagggtcaaaggaaaattttgataattttataatattttaaggacattttatacagaacaataaaaaatgacattcttccaaatttttgaccttttaattggaagcactaggtataggcttgctttggctatgcctagggacaaccctgctctctaggtgtgttttcacttttacttttttcttttttttttacattttatgatttagctttaatgttagaagactcctaccaaaatcaatgtcgaaaactactacatgagctcctctacttttggcaccaaaggctaaggctcttcctgctccaccagctccaaccagcacaaacaacttgtctttaagtggagaattcaaagatgtttttccattagtacatctgtgtgctgtaacatttcaaatgaaacaaaatccgaaaagataagaaaagtatctaaaaaattaggaagaagcataacatttttcttgggaaactttcatgcatgaaaatacctctaattagtgcatcctcaattgcagttattgcagcttcacaatctgtgttataaccaattagctttccatcactaggcctccttataattgtattagcagcatctatagactgatgcaaacattgattagcccaaaaggaaactacaattataatcataatgtaatttgatacaaaagctacttcagtatgttttttttttttttgaattggagaaagtgccaacctgagcaagttgattaacttcaccacaaaattcaattactgcctccttgtatggaattccaacactagaggatcaccataataaaaatacatgtagaacttagaagactgtaaatccagcaaagagctcatgatatcgttcactaatacgcttacctaaatccaggaaagtccggactgggatagacactgaagaatttctgaagatcatcaacgaacattggaacataaactccattaaaattaacatgcctgatgacaggattgtgcaatataggacctttgctatgtccaacaggttttgagataagtccaaaaactttagtatccttgtttatgcagtcaactttatagacttctataaggcttgctaaggtaggcaaacctggtatggaatctccatctatagagccatacaccaagaacccaccatattttggggacaatatttggcttataagacctctttccccagaagagtatgcaatcagtggtacctacaggacgcagaaaaacctttcaatcatttatctacttatttatcccttttaagtttttcattggaaactctagtgaaagattgcataaagtgagaaccagagaaaattagcaagaactctgacctggcaaattgagaagagattaaaaattcttggtaattctgtaatatcagctgcattagtgactaatttgatgatatctgctcttgtttcttgcatacttgaaataatatgtttaagttcttgttctgaaggggtctctccatttacataaaatgatacaatatttttagtacctctgctaggactatttctttgttcttccataaacttagaggccacctatttaaggatgaaaattgattgatatatgataaaaaagggaaaacacctcacatatttaagtgacaaataagcctaaaagcatcaccttgagctcaaattctacataatcagctcctaaatcttttgccagatgaagtgcctcaattctaccatgttcatcaccttcatagaaaccaccattccactttggcctgagatgatcaatatattagtatttacactatatttcaaacaacagaagaaacagtttctcatttgtgactttgacataaaaattcaaatatgtttagttagaaatgatataccgaaaaacgatgagggttgtcaacagtttatctttcaagatgatttcaaggtctttttgaggatgaaaattgtcaatgcagtccaacctgatctcaacaacatcagctccttgtgccttggcctggttcatgccactcaccattccctcggcagatttagccattaacggaacacataacaaggttgcggttttcttcattccaacacttcccatgataaaaataaataaataactaaatccaacccaaagaggaaaagagttcaactcttttacccgcctgcacctgcagggctaacccaatagtacaatactaaaaaacctgaccaaagacagtatttaagccacaaatcaatgtaggaggatggggagtcaaagttaatatttataggatttgcttgaatggcaaaaaatgcaacaaaagtggtaaaaaagttggtggattattggtgacaaatgaattggcaggtaaggtagggtagaagaagcagttctctgacacacatagtaaaaaaagagagaaaaaggcatagtttggcactttgg

SEQ ID NO: 25293 - DNA, 1764 bp, Cannabis sativa
  modified_base (1302)..(1306): a, c, t, g, unknown or other
ttattttattaatttaatttgataaaacatatcaaaccattaaatttttagataaggtgtaacataagaaaatgttctcgatatttattttattttggcaaatatatttatcaaacaaaaaaattcaagagacaagatctataagttttatggtttcgttgggtaattagaacttaaaatatgtatgtatctatgtagtttagtatgaacagaatataataaaaaaatgaagttgagtacctatcaaatttaaaattcataatcttgttccacactcgtaagctcttaatttccgagcttcatattaataattatcatatttttttatatttttattctatctgcgcatataaataactttatatttatatttttatttttattttttgacctattaattaaaattattcataaatttacgatgcgatgctgacatcagtaatcgttacaagaacctcttttaatcaagataggccattatttaactaaaaaaaatgctttactaaaccataagttatatacatttgataaattcacatcattattaattatttgaaaattttatattacttacaaaatttatatttcatatacaaattaataggaacaatctgttaattaggatatgctaagaatctaatacaaaaagcatataaaatactcttggtgttagtaatatattatagtctatattgtgtgtgcatttattgacattttgttgtgttttctctttgtacttatctaacttatacgtgtatgatatatttaagataaacatacatacatatacactataagaaagataagtacaacaaaaaaaaaaaacacacaataaaatgtcaataatggtggtggtatatgtatagtcaataatagacaaacactacgtacagatatatatagtaattaaaaaatatgtgtatacataatttagggcaagccaaccaagtcataaatattaggttggactcaaaattctataaataggacatctagatctctctaattctcaaaatcataatctgcctatatatatacatatatagtttactcatcatattgcaagagatcagaaactcagctagcaaaagatatgagttgtgaaggtacatatatttatctcttaataatcaaatataatatatatatatatatattatattaaatgtgactatttaacaaaaattattaatttaacaatttttattttttcgttaaagttagcagtgaaaactattactgttaaatcaattaattaattatttttttaaaaaaacagttttaaatatttaaatttaattnnnnnattaaaatataacttaaataattatttaaaagtatatataaataaaattagataattattttttatataaattttaattttaattaaatgttaattcaattaattaataaactctaaacaaatatgtataaaaagtgtgtcattataaagtaggataaagtgaggtgtatgataagatatgtatagaattttatcttaaaattaattagcaattagagaagtacctcatgtattttatttatgttattatttttcatacattaacaatgtgtgactctctaatactctctgaacaaagtgttagttattttttgttaactataacactcctagacaacttaatcgcaaaagacatgtacttttagctcacaacaactctttttattatttggtcaagtcattatataattaatcttcaatttacaaaaagtatctaataaatattaattacaattata

SEQ ID NO: 25294 - DNA, 2049 bp, Cannabis sativa
  modified_base (1977)..(1987): a, c, t, g, unknown or other
attcactattttcaataacctcgttgattagcaacaagctgcacattatgtttaaaattacgttaacacgcctatgctagttagggtgttacattcttagaagttattattgttaggggttcagcttctacccacttggtaaagtagtctacagtgactgcggcatactgcacccttatttttccctttaggagttgaccaatcaagtctattccccatactgcgaagggccaaggagactgtatcatcgtgagctcgttaggtggagctctagggatcttcgagaatctttggcagctgtcacatttgttgacataatccattaaatttttgatcattgttagccaaaagtacccttgttggagtatctttttagataggctttgcccccggcataatcactgtagaagccttcatgaatttctatcgtcaaactctcagcttctatcttagtgacacaccttaagagcagcatcgtgaagctctatttgtacattactctgtctaagattaggtacctagcagctttacttctcatcttttttgcctcatttttatttttaggcaaggctctagtttggaggtaagctgtaatagctgtcatccatgttgaactatcgtccaacatgtcaacttcttcaaggattgtaatgttatgttcttttaggaactgtattggcaccaagtttgccttgtcgaaaatagtgctgcttgttagatgggcaagtgctcatgctgtggtattctattctctggggatctaccttattgtatagcttttgaactgacttaacaagtcttgtattgtgcttaaataggacatcattctatcacttcgagttgttaattcacctaggacttgatttgcgactagttgagagtcactatatatgtctaggtggtcagctcatacttcatgtgctagcttgaggccagtgattaaggcttcatatttagcctcattgttggaggctttgaagccaaatttgattactccgtgcagttgttgcccccaggtgatatgaaggcaatgcctgcactagagaattggtcaatgtagcttccatcaacatgtagcttccatgttgattctttaggtttttgctgctgctcttgctctcgcttcttctctggctcttgtttttctcctaaatcttgagagatttcaagaggtgcacttgtacattcagccacaaagtctgcaagggcttggccttttatggccattccaggttgatatattatatcaaactagccgagttcaatggcccacttgattagtcttctagatgctttgggtttttgcaaaacttctcgcaatggctagtcggtgtacacctttattgggtgagcttggaagtatggcctcaactttctagatgctagagtaagctataggtcagcttctccatgagtgggtaacgactttcggcgtcaatcagtctcttgctgatgtagtatactacgtgttgtatgtcatcttcttctcttattaagagtgcactcacagtatgttctgttatagctaggtacatacctagctcttcattatctagaggttttgatacgacagaaggttgagccagcttttttagctcttggaatgatttttcacactcccctgtgcactcaaattttttgtttctctgagaatactgaagaagggtacacatttgtctgtggatttggacacaaatctgcttagggcaataatacgtcccgtcaagctttgagcttctttgattgttatgggcgacttcatgtccaaaagggcttagatcttgtttgggtttgcttatattcccctggcgttgactatgaagccaaagaattttcctgagcctactctgaaagaacatttgaggcatctgagcttcatgttgtactgataaaggatattgaagcattcatctagatcctccacatacccctagccttttttgttggacttaattttaccatgatcttagatctacnnnnnnnnnnnttgatttaacaacctaaatatgaccttctaaaacgataaataaaacacataaaagttaagaa

SEQ ID NO: 25295 - DNA, 3266 bp, Cannabis sativa
  modified_base (1284)..(1287): a, c, t, g, unknown or other
tctcagcaagaactagggttatcataaataaggaataatagatatatgaaatgatcatcaccacttttactaaacacatattcatgtgtgtgtatatatatatatctaaatttgcagatttatttacataactgaaatgcatttgaaactttatatagctttagaaaattatgtttagaaattaatttgttttaatctttttcatgactcaatcaaattattatttaatatgaatagacaaaaaaatatataataatatataaatatatatatatgtatatgtacatactataccacttgtgcaccactgggacaagtggacaagtgtagactaggtaaccaggttgatggattcaatacaaattttgtaaatacatattatatatatactaattagataattatgtattatatgataccacttgttgttatttaatattataccatcaatacaagaaaatacgttcgcaaaagttggtattgtgttggtattataatttttgccagcgtaaaataaaaagtattgttggcaaaaataattttttcgaatacgtaaatgcattgataaaagttagaattttaccattgtaaatgtgcacgctaataaaattttgacttttttactagtacagtttcgagatgcactaataaaagtaacatttcttgtaatgtatatttgtctacccaatatttgttttacttgttgtctcttatgtgagtgtacatgatccatccaagttggatggtgtaactgtaagtacattacacctatactaatgatttcattaatatatgagaaattttcaataataaagtaaaatagtaaattacacccatataaaaaaaattgtgtcacggattgttagaactttgcttttaacgaataaaaaatataaatgtacctaatgatgagtacgtaggaccaaaagtggcactacaaaaattattacttgtgactaaaaataaaaaagttgtgactaattaaaaattattatttttatattgtaactaaaaagtctgtaactaagttagtcacaaaaattataatttattgtaagtaaatgtgtttttagtcacaatatttgatgtgactataaaattaaattagtgataaacttgtatctaaatactatatttttatttttattgtggctaaaagtacatttagttacaaaatatttatgttagtgactaagtaactgtttttgtagctacaaattaattatcactatagtgttgtccctctataaaattcaccaataattaatatatatatataaatannnntatatatatatatatctatgtgggatcaatattagttgtgtataatatcatcaagtaaaatcattgtttaacactataatataataacgaagttgttgagctacccataaagactatttctggacagaacctttttgctttattaatttcaacaaaacaactacaaattgttatgattacgtactatactatggaagtttccaagttgacctagctgactttataaaattatgtgatcagagagagatatatatatatatatatttatatatttatacatacttataagaacaacaatggattggagaaacagtatgatatcagaagctttcccaccattcaaaatgtatagcagacagcctcttcttctagtcttggtggtcataacattaatgctccatggaataagttgctatgcaaagaataatataaaacataaatgttattcttcttcatgtgggagtatctctaatatagattatcctttcagactcaccactgaccattccacctgtggagactttaggtaggtagcttcattcttattaattatgagaatttacactttttgtaactgttataaaaaaactaattttaactcacatcttatgtctattgatgttctccattctttagatagcactttttgtaactgttatatagaaactaaggtggcgttcagtaatacttttatttttaaaatttttaaccacaaaaatataagtaaaatttttgtttttaaaaaacaaaagtggttcaaaagagtgttttgtaaatatcatttttattttcattagtaattttattaagtcggatccggggaggtcaggatcgggggcgagtccaaatctgaggccaggtctgaattcggtttctaaggtctaagttggggtcggaatctaaaatattgattaaaaaatatgtttaaaaaaattaaaagtgatttttttttattttgaaaatttaaattcttaattaaaaacttaaaaaaagtaaaagtagttatataaaacatgattttggaaaatatttttatttttctaattttaaaaacaaaaaactgattaaaaagtattaccaaacgcaccctaactaatttaaactcgcatcttaattctattgagctattgcaactttgtaggtacaatctttcttgcgagaacaacattacagtcttaaacttgtatattcgcacagactttaagtatcgaagatactacgtaagagcaatcaactataataactatacgattcgagttgttgatcccaaatttcacgaattacatgacaaaaaccattcatcttcattcaacaccaacactttgtcccttggatattttgacgcatattatcataatttttattcaccccaatttagtttggtgtttggaagtacgagaaaagttgcgaaaaccctagtgttgattagctgtgaaagaagaatgatgaaatcttcttattattacattgatgctaatccttgcatgtcaagaaagaaaaatagcaacaattttacatggtcatattatttgttggatgttgatgaaatgagtccttctaaattggatttttgcttgatagaacaagtaactctcattgatcaaagttttcatggttcatcatgtcatgacattatcaagcaactagcttatggttttcacctttcatggatccaaagttttgacaaatcaaaatggactcaagagttttgttccctcaatgaatattccaataaagttcattgtgtttctagtaaatgtgcgactaaagatacattcgaaccagatgatcaaaaactttgtgagggtatatatatacacatttccaaaaataattgataaagaatgatttaaatatataaatatttatatatctaatgattgtttgctatttttatgatgcagtcacatttctaataatgcttcgccaagctatgtattacatcaaatgtaagtgatggctaatttttttttattcat

SEQ ID NO: 25296 - DNA, 2077 bp, Cannabis sativa
taattttttatgctctaaactgcaataaaataccttgtttgaatgtttttgtttgtctaaaattatgaaatgattgcaagtaaacaaataagaaaaggaaagtgtcaaagattaaattattattatcattttatatttgtaaatatacaaactcaaccaaacccttatcataagtttgtacacgcatttcatcaacaaaaccacaaaatgaataaattccatttttttttttatatatgtatgtttactcaaaccacaaaaacgaaaatggcttggttttgtttgtttcgttctgagattccaatttagacatccaaaactatactaccctatgtatagatatattgattacatatatgaaaattatactcatgacaagttcaatcatttactttaattttttaaataaacgtgtgatgatcgtgaatattaaaaaataaaaataaaggagaaagagagagagcaagtaggacttacttttcaattctgtccctaaactttctcaagaatttttcattatcttcttcagcgaccttaaaaatcctatcaatgaatgtctgcctgtcgttcaagtcaagctttcgaacatcgacttctctgtggatgggaacacggttgttaccgtggccaccttgattgtctacgaacgattgcattatgcttgtccgcaggcgattataggtgggaagcttttcaatggcagcccatttgagtgcctcttcttcttcgtccatatggaaatttctacgtgaatggtttcccgaagcaaacacgtcttccatgctccaatttgctctgctcatactcctgcttatgcttctactcaaactccctcttctctctggaccctccattctattttatcttttcaaaacacctttaattcccttaacaaaataattccaatcaatttcaatatcaaattaactgaaaagaaacatgtaaatcgggagagaaataatatgctctgttctgctctgtcttgggttggtctctgtttcttgagagattttcttattgaccaaacaagattgagtgaatgaaatggaaaagccacataccttagttgatttttttcttcgatgaaaagggtagttaagttgagaatgaaattgtgagtttttttcttctccaacaacttaatttttaagttcttgtatttttttctctctcactttctcttctgagtttggtgaagagagagaagcgttgagtagtaggataggaattgtgttatgagggaaactttgaggctttatacatgagtgagataggaaaatgtatcccgaaagaagtttcatgtcaatgaataaaaaaatatgtgtgtaaggtggtcataattacttgagcattcaaatatgactccttcttcaattttttctaattatatttttataattgtatagtcacccgtggtgttgggtgagatatattttatcacgagactatcacgtgccggggtttggtgattgattcacattcacatttattgtccaagtacataccatatatatggtacgctctcattactgaaatactgagtttaagtgcagaataaaatgtcttgtctttttctttttcttcaacaacaaagtaaaatgttaaagaccatctcccatgtacaaaaaaaattttgtggtacatttacattaaattttaaaattgtacaattataaaattttgatataaaattaaatatctaattaatgtttttattaaaaaaatataaaataataattttattattattttaatatgtaataaaataaaaaaataatataaatactttataatttaatgttatagttaaatatattaatataacagtataaataacataaatataaattaaaaatagtgtatttattataatttaaattttatatcataataaatattatcttaaatttgccacaaaatttattaaatttcaaatttacataatttttttggcatactattgaaatacattttttattaaatgagctataagtaagagaattgtggaagtattaagttgaaacttttttgataaaaaaaaaaactaaggatttaagactttactatttatttaatg

SEQ ID NO: 25297 - DNA, 1766 bp, Cannabis sativa
tggaggcttgaagcggggacgttacaatcctagtagaagccaaacatttctttagccttcttcatctctaactggatggtgggtgtagtggcatttggctttggcaggtcaggccattcaacattggcccctttagaacttttggctggagcagttggaagttaatcttttgaagtcttcttggctagaggaagggactaataaatgtccatgacgacagttgtcgagctcctctcaacttctacttaggtgttttggagttcgagtcaatacttgttggaagagcagcatcaacctttggtcatttcgtaggtaatttttggtcggatgcatcaccggtcctttttttgaaagcgcgtgtttcatcttctctgacatggctacacaaatgaaaacatttgttaaaaatcagaacaagtaaaaataaacaaagataagtaaagcaatggctaccctagacttcagggggagcaccctcccaaacaagaaaagacggagcatcctcgttttaagaatccccatcatcttccactactacgaccttcccattccctattacatagacaacatgacgaatggatacctcggggtcatctctgatcttcatagaccggttagttggcacctgatgcccatttggagttttcttctatcctggagcctcctgctcagtgataatctccttaacttcctgttcagattcttaaacctcattggatgggtaaagcccatacttaagaaaaaaatttgtcgtttccaaggaagaaatgtttcgagctgactccgacagttcaagaatttcttgagctctagaccttagccttaaggtgaaatgaggacgacagtaggggatctgttagaaagaaaggtggttagtatccatgtctttgacaatgtattaatcctcaagaaatccaccaatcttagatacctccttatccgtagtaccgcttagccactagtgctcattttgggataaataaaaatttcagaccaatcctgcttcaaacttgacttcaagtcaaaaagctagttggtatcatgggccgaaggctggccccatctgtgtgtggcagcacaaacactgtggccaaatacttaatgcccttgggagtgaggtgggtcagacaaatcttgtagtatttggctattttcttaaagtacggatgcaagggaaagatttcacttatttttgcatggggcccagaccattcacatagcccttttcctaggttcattgccaattgcccagaacagggtaataaagcctctacttccccgaggataccctcgtctaagaggttcttcttcctcttttaagtgagtatggacggaggcaaaatcaaccgaggacccttctttccttcggtgctcaagggccagtcttcctcgtattccacctagacataatcttggcccgccaccaggatatcactcagctcggagacaggctctccaaccttattgtatctaccgaaaaggaaaacttgaactcctttttcctttttcgatatcagaagggccagcagggcagacctcaccctagtcctcaattttttggactttggcgtccccagtaacaactttaacatcctcattcgggggtctagcctgctccatcccagccattgctaatagccaagcaaagtgagggtcagattctaaattcttcctcaaggtttgttttgtttttgccatccttctatctttagacagtggattcaactcagaagtgtgcctcgcaacagtaacgacaacctctattg

SEQ ID NO: 25298 - DNA, 2368 bp, Cannabis sativa
accaactttaggatctacattctccttgtcttgaacttcaatagtagctatcacctcgttatccttcctaatttccttaaaaaatttactttctgttagcttttctttcctttcttccttcttactcacccacttagccttttctcctttataattttccatactatgattaaatctatcacaattactgcacttaattggcaaccattcataatccacaccttgttcaacaagttaacctacgcgctcgacccagcagcagttcagaaaaattcttctgggtatattctctattttcattaaaaaattaagatttgagtgcttttgggaaacaaacagagccgtctgggggacataattgagacccagcgcccaggttgacccggtgatgggcctagcgcccaagttgacactttgtcaacctgagacatttccaaggagtttttctgagaattcatctgggcatattctttgtttttcccaaagattaaaatacaagtgtttctgtgaatcaaagtgagtcatctggtggtaaaaaaaatggccctaatgcccaggttgacattttgtcaacatgggttgacattatgtcaacctaggctatttccagtcatttttctgaaaaagtgttctgggtatttttttcgtcataaaaaaataacgaagatacaagtgacctcgaggagaaaaagagattttcagggatccagaatagggccccaacgcctaggttgacatggcactaggccctacgccaggttgacatgcaacctggtttgcatgttaccgctccttaaacacaaattctgctctaactttcttcttaaaatggttaaaaacagggtagtagacttcgttcgcaatctcgaatccaatagaagtatcaaaacaagtcttgggaaggagtccgggaagcacccagcgcccgggttgacacttaacttggtgcgctgggttcggctgatcagaattcgattccgtttcgagtgttcaactatttttttttcatatgtgacaagttaaatttagactttgaaacatgtcaaattcacctacattgcctagtaggaatgctctatgcaatagtaatatatatattatttgtaatcatgtttattggatgcatcatattaaaggtcatggtctcctttcatagtggaggctgtaaagttcactttggcctatgctataatattttccaatttggggtccaaatggataaaaagaacccatctaaacctaccatgataaagttacaattaagtacataatttgttcatttttgtataagtgattgtcgctttatccatattattattatactcgttattgtatgttttagtctttaatttctatttgtagaataccgtgatcgaattattgttgatgttctagtgtatataactttagccaaaaattatacttatacatgtccttgatttgcttaagaaaataaaactctcttttttcttaaaatagagaggaatattataatacaggtaagcaaattaccttttaatttcttctgttgatatatatcaaagataatttaattttatcggtttaactaattaatatgtgcctttttaaaaataaaataaaataaatatagttttaagagtatttccaatagtagtatttttcaaaggtgctaaaaatttatatattatttaaaaatataatattttttttccacgtaatatcacttctaaaagtacttcgcacttttcgaatttattacggtgtctcacacattattatttgatatattatttattttgattttaatgagaaaaaaattgagtatagcatcattgctaagtataaatatatctttttgttttgacattcaaacatctccaatggttccaagtattttttttatatcaccaagtattctcttcaagcattatcatttgagatgttctaatcttaattaagaatagttttgccttttaaaaaaacaaaataaataaataaaaaaaaaaagaaaagataagaaaagaagagtttggtagttatttcttagatagtatattagtagtaatcaaaaaaggaaaaaaaaggaaaaagaaagataatatattagtaacacgtcatgcattgccctttctgaatagatatcaataatacatgcattacaaattttgtatctcgattaggagaaaatcgataacaatacaaataaaataacttgtattataaaatttgtataaatttctcgatataaattttgtattatcgtgcaaatgcgtttctcattaattatattgatgggttgttgggcaccaagccaaatgttagattgtgtgaaagaaggggctatttataaatttaattttttagaggaattattatttccttcaat

SEQ ID NO: 25299 - DNA, 1767 bp, Cannabis sativa
tgatagctaatcagctaatcagattaatcagattgtaaattgtaaagagtttttttctttagggcataaaacccaacagttctaacatcaaggggaacgaccaagacctctcccaccgaggctaaagagatgatgaacacctcgaaggttgtaaccaaggagaagacagagacaacacttaaagccacttgaaagtgtgcccaagatggggcgacatcaagccttgttttgggaaaattatctcaagagctggtctatccaaggaattcgtggaaattcccctcaacacgatggacctgaccaaggcagtgaaggttggtaaaaatttgatagaggttttaagcctagctcttatggcttgcctcaggaaaaaccaagacatcttttcctagtcccatgaggacatgatctccaaatcgaccctgaggtcttctctgtcatgccctcaacatagaaaaagaaaacttcagacctatgcaatagatgcgcatgctccttgacaaagagcgctataaatctctcaagaaagaagttgaaaggttgcgagagagcaacttcattaaggaagctttctaccttgttttggtatccaactctgttctagtgcctaagccgaatggtaagtggaggatttttgttgacttaagtgacctaaacaaagcatgttgtgaagactatattcctatgctacgaatagatcaactagtggatggtaaaacgtggatggtaaaactggccatgaactcctcacattcatggatgcttattctatctataaccaaatcagcatgcacgcaacagaggaagagcatactagcttccgcacaaacatcgagctttactattataaagtcatgcccttctaactaaagaatgcaggtgttatgtatcaaagactagtcaaccatatgtttcacgatttaatgaaaaataatatggaagtctatgtcaatgacatgctggtaaaatcaaagagatttgaagaccacataaatacatggaggaatgcttcaacgtcttacgataatatcaaatgaagcttaatcaattggaatgtgcctttgacgtccaatcaagaaaatttctcagattcattgtcaactcaagatggattgaagcaaatacagaaaagatcaaggcattgtaagacatgaagtcactgttgcggataaaagacgtgcaaatccttattggaagaattactgtactaagcagatttgtctccaagtacactaacaagtgttttctcttcttcaatctactcagaggtagcaatatgggatttgaatggacaagtgagtgtgagcaagccttcaagcaatcaagcatcacttagccaaactttccatataatccaatccaatagatggcgataaactatgcatctacttagccatcactaagaatgcagccagtgctgctgtggtggatgagaaagaaggaatgcaacacccagtgtactacattgacaagcgtctcattggggccgagtctaggtatcccccattgagaaattggcttattacttatcattggcccattgaaaactaaggccatactttgaagcccgcccactcaaagtgttaactgtccaaccactaaggcaagttttgaagaagcaataagcattaggacgttactcaaatcagcagtagagctaggttaattcaaaatcacataccaacctcgcacaataatcaatggatagacattaagagatttcatttgtaaagaccgcttagtttaacttggaaattagcagttaat

SEQ ID NO: 25300 - DNA, 4380 bp, Cannabis sativa
cacaatgttcatagaattctaactattcaagctttacctttccatgtaatccctgcttattcagttcacacaaccctcttccacttacatggccaagtctcttgtgccatattttagtttcattctcgtgcttgcttgaaacacatgcctttgtgtttgtcattgtggcaccttctagaggataaatctcatttgatttcctacattttgtcaccaccatatatcctttacaaattttcatgattccattctcaactttgacaagaaatccttgatcatctagcattccaacaaagatcaaattccttttgagatttggtaccagtctgacgtcctttagtacccttttccatgccctcatgaactttcaatcttacagttccaattctcaccatcttacaagacttattattaccaagatacacagtctcatagtttccaggtttgaattctttgaactaagatttatatggtttcatatgaaatgaacactcaaaatccaagatccattcaaaatctgaattcttagaggtaaatagcaaagcactagtcaagtcatagccgtcactcatcactgttgcatctccttcagatctcaaatcacctgactttagcctctccgaacacatccttctgatatgcatgccctagtttttttttttttttgtaattacagcattgaacatgcttctgaccatcaaactgtgattttgatcttgagtttcctcttattcccttgtgatttcccctcttctcacttctgtctttcgtataatccatcaccactttcaaatttctttaaatcactcctttgattcagctcttttgaatcaaatgttgattcgacaccatcgagtgtaattgaccctcttccgcatagcattgtatctttaaattgaccaaatgaattcggtaaagaaatgagtaataataaagcttgatcttcatcttcaatggcaacaccaatatttttaagatccataatcaacttgttaaactcgtcaatctgttctgcaacagatttgtcctccatcatcttgaatgaatacaaggcctatttcagatataatatagtcaccaaagatttagtcatatatagactttcaagctttagccaaatctcggcggccgtgacttcttttgcaacctttcttagaatcttatctccaagagtcaatatgattgcactatgagcttttataagagtctctttcttgtccttctcagatataaaatcaagaagagatttttctccaagcatagcctcatacaatccttggtgagccaacagagccttcatcttcattctccacaatccaaagtcattcgtaccaataaactttttcacatcatatttcgctgcagtcatgattatgaaccaagctctaatactaatttgtagtgaatcaatcaatcaccttcgatgtaattatactggaccaacactcacacaatcaagaacgatactatcaaagaattacaagagccaaagaacagattaaagtagtaaaacaaagaaaagataacagtaggtttaacgagttggagccttgtgcaatgctctatatctcggtccgaacaacaacaaccatgtctttattgatatttgtgttttcaaggttacaagaatcttttcaaactattacagagattacaagataaactttctctctctagtttagagtctttcactctaaccttacacactcacaattttcactcaagttgtccaatggtctgattccttatggattaaaaaggtaatagttatttatagatttctattattgtcaaaattaactctgattctatcgttgctaattaatgccgccttaaattctctaaatcagcctcaacaataaattccacatcaacttcagaaataggttttcagtacagagaaattggaagagaatacacccattctagatgtgcgttcaagactgacaacaagctatctcgaagtatgtctccggattgatgacaagctatccggaagaaccattggactggccacaactttatgaacaaatcttttcggatgaacaccaagtttcccgtaacttctttttggaataataacaagctcttaggatgacgaaacttgtaaccataatcaacattattaatttttattaaaattatataaaattatataaaaaaaaataaaaaaaaatatttaattaaatgaagaaaatgaagaaaataataaaaaaaaacttttcatcaatatagtttattaatttgtggaaagtaaataaattaaaaaaagacatttattgttgtacaatctaacacaaaataagctcatgttatattttatgtcaaatttggccgaatttttaatatttattaaatttagcacatcttttgtaatatcattaaagcttattttttaaaatatattaaaatgttacaatacacttcttttataacacttcatattaaagatgttgtaataggatatagttctaataagaattatattaatgatcatactcaggttggccttaagttgaaatggacgataggtaaaaaaaatatgggcttttattataaaaataatagtatttttaaaaattaataaaaaaatatgtatattttttaaaatgtatttttctttatttgaccccctaaaatgagtgggccttagacacgggcttaacccgcttatacataaggcctgacctaatcgtactcaatataataatcattatattaattaaaaacaaaaaaaaaatatataataaatttattcattacaattacaatttataatattacaaaaaaagtttaaatgaaaattccagctcagcattaggtggatgatgatattacaaaaaaaaaattaaagaaatattatatagattgaaaaagaaaaacagagtagaaaagttggagagttagtaaaataggatccgtattaaggtgcgttattatgaggaggttgccaacgcaaacgcggtaaagcgcgttaagtaagagattagtaagatctaatgaagaaccattcactggatgatgtgtatccgattcagcacaaccataatcaatatccaaaataactatattcttatctctttcttatttctttattcattcaatcacaactcaactctctcatttataataaaatctcaaaaacctcttctttccatttcaactcacattttattcattacattcattcatactttctctatctataatccagaaaaagatcatcctttttgtcagaggataaggctgtttttctttcaacacttcattctataaatataaacacagatatacagtttttgggctttggagtcactctgtataagaaaatttttgatacgtacatacacaaacaaagaataaagggtatgtattatttctttatctttgattttctcttgcaatgaattattttattttgattggtttttgttcctgacaacatagagctctctacagctcaattctttttctttttcaaaaatttaatttttcatcatggagcagaattttttgacaaagagagggttgttttcgagtttttcacatttggtggttgttgcctttttatttttaacctatgttgaattgagaatggtcccaagttgatcagaaaaaaacaaaagattaaaacagagaaaattttaacatatgattattaacaagttgtcgacacaggcaatgaaagtgactaatttagtaatttggttaaagggttttgttattattcaccaacttgcacgatggagaatattttggctcatttagattaaaactatgacaagccttaacaaagtccagtattagtaatagtactactactttggttcttgaaattctgagtgttattgattgaaacacggtgtttgatttcatttttgatattttgttcggacccacgaaaaaaaatggaccgtgcattatcaatttggttagatatttgctttggctgatgtaatgcggtgattattttattttattttattttatacatatgagatgtgatctcccttcaaatacctccaaagttgagtacaagaatcaaatttgattttgttctttgtcataacttgtgtagatttcagccgttaaatttttgatgaagctggaaactgtagtaaagggtggatctgacccttttgagaagagaacatgttcaacaccgcaaccgccgctgccgcccccggagccttcaaccacttactctaagaggtcagtaatgggtggataccactgtatctcatcagccacaacagacttgtgggatcgcttatttgatgaaggttacagggcagatgtgtgtgttcatactgagaatggcagcatcatttatgggcactccaatgttcttgtaagttactatgttgactctttgtttca

SEQ ID NO: 25301 - DNA, 1565 bp, Cannabis sativa
ctaccataaaccattgattatgcctaatcatcacctccataagtgatttctgcaaacctacaccaagctgtctcattgataataacaattaacttcatcctattgaatgatactaattaatacaaaaattattattattggatggtggtgccattctctatgcatagattgccattatttttaaagtatatatcaaaatataaatgttgattggaaactatatatgcaaatcgctggcgccacctatgaaaaataagtaaacttcttgttgctattttgaccaatacatgaacctggtttttctaataggactaattatcatcttaatttggaaaaattgaaaagaaaaagactatggtgagatattcttgaacaacgaaaataactttgaataccctacaagaaattaaaagtttgactagtcatgagtggtcctcaacagaatacttccattaccgtaataaaaatgacaatattttgggccttaactgtgtaaattaccaaaaaatcctttgtttttacatacatacatactcacatattaatatccaaagcattttttgttttttgtttatttttttttttgaggtaacatacaaagtatttgggtgctttataatgtgcaaatcactttttacagaaaaaaaaaattgtgaatgtccatttttaattataataacatactttctaattttaaaaaaaaatataatttctaaattttatattttttgtaattttagtagacatgtaataattttttaaataatttatattttcaaaaataatattcaaattaataattaattgcacacttttgtcttagttgaaacaaaacaaaccaaatcattagtattagtaatagtaaacacaatattttttagggcttgtaaacactattttttttttttgacaagaccttgtaaacactattaataaaactcattgaaaaaaaataatacatttttaattatgattatgttatgtcatttattcttttaccaaattttttgatctaatttatttcatattttaataattgagttcatggactattgatatttaattatatgttgaaaatattttttttttcattctttttttggattattttttttcacatttaagtgaagttcaattaattttagttaagtaatgaataacaaattgtggacaaaagcataaaaatacagtaaaaatttttaaaaataaataagattttgtccccgaacaatatattacacttgtagtatttagtcctatttgtttattacaaaaattctttcaacttatagaaatttttttaaaataatttgttggacgaagcttctttggtgttatggctgcccaatttttttaaaacttattttagtaagacttttctaaaataactactttaaattttagttttatattttcgtccttcttatagtcactctctgcccaattgtattatcattatcaatttagctaacagataaatatattggaaatttagtttattgatgttaaacatactaaaattaactctttaaatattctacagcactatctatgtttgtattttt

SEQ ID NO: 25302 - DNA, 2374 bp, Cannabis sativa
gcacattgttgaaatgggccttaccttgcttgctcaagctcaaatgccactcaaatattggagtgatgcatttgacactgctgtatatctcattaatagacttccaacacctttattaggtcacaagtcaccttatgagattatttacaaacaaaaacctgattatgccttccttaagacctttggagttgcttgttttccttgcataaggccataccaaacgcacaaatttcagtttcactctttaaagtgtgtcaatctaggatatagcaactcccacaaaggctacaaatgtcttacacctacaggtcgcatttacatttccaaaaatgtggtgttcaatgaacttgagttcccatttaaaaagggctttcttaacaactatcaaacacctcaacctgttataattcatagcacatcttggtctagtcttccagttccagcatttgagtccactgatttttcttcctctggccgtgtacattcccatactatggcatcctctgaagcatcaccacgatctcctcaggttaattcaccccctgttgactcattttccactaatcacagtcccatttcaggtcaggcaggggaggaatatgatcattttgctgaaccacttgaatttggctcgactgacaattatattgttgagcctgaacctgaaccagcaactgccactcctggtgcttctggtgttgacatcacaacaggtgatgaacctgctcttgacactgaaccgcagcctactcttgccactgccttacagccctctcatcctatggttactcgtgggaaggcaggcatattcagacccagaacatatctcagcacatccaaagcttctcctacctttgctgaaccagaatctgttgaacatgctctccaacatcctggttggaaaggtgcaatggacactgaagtggttgctctaaagaaaaacaacacttggattctagtaccaccaggaacttatcagaatttgattggtaacaagtggatattcagaatcaagctaagagcagatggaaccattgaaagattaaaagctagacttgttgctaaggggtttcatcaaagacctggaatagattatggtgagacattcagtcctgtaattaaagcttcaacagttagaattgtcctcaccatagctatttcaaaaggttgggacataaggcaactggacattaacaatgcctttctaaatggcacactggaagaggaggtatatatggttcaaccacaaggttttgaagaaaaagggaaagaaaattgggtttgcaagttgaataagtcactgtatggcctgaagcaagctcctagagcttggtttgataagctcaaaaagacactcacagattggaaatttcaaaattccaaggcagatacttctttattcttctacaaatctgaaacggctgttatacttgttctcatttacgtagatgatattgatgtgactggaagcaactctaagatggtgactgaattcatttgcaaacttgacagattgtttgccttaaaagatcttggatccttgcattattttctgggaatagaagtttacagggacatgacaggtttatatctcacacaaacaaagtatatagaagacatattgaagaaagtcaatctgagcaacctaaaatcatgtcctacacccatcaatgctggcaaaccaatgtctataaatgaaggagagcctatgcatgatccctccatttacagaagcattatcgggtccttacagtacctctgccacacaagaccagacatagcttattctgtgaataagctaagtcaattcctacaaaagcctacaaatgtccactggaatgctgtgaagagggtcctgcgatacctgaagggaaccaagactttgggattacacataagctgcagcaacaaactcagcataactggcttctctgatgcagattgggcctcatgccctgatgatagacgttcagttgctggctactgtgtgtacctgggagagaccttggtatcttggtcttctaaaaagcaagctgtagtctcaagatcgagcactgaatcggagtacagagcattggctcatgttgctgctgaaatttcatggatcgagtcactgctcaaagaactccgatttcctttactgctgccttctattacatggtgtgataacatcagtgcaagtgcacttgcatccaatcccgtgtttcatgcaagaacaaaacacatcgaaatcgatgttcattatgtccgagacaaggtgcttaagaaagaactcgaagtgaggtatattccctcacacgatcaggtggctgatctcttcaccaaaggactgtccaattccaggttttcttttcttgttgacaaacttggagtg

SEQ ID NO: 25303 - DNA, 1996 bp, Cannabis sativa
aaaaaaaagaacgaaaagaaatagaaaattccctaaattcctcacagctacatctacaggataaatacaaacaaatgaataaacctaatcataacactaaaaataaaaatttaaaacctcccagaattaaagtaaaataatttccataattctttaagccatcgattgaggcgtcatatttgcgtaatccttgggaaacaataataactcaaaggaaactgcgtcacctcctaacgcagtaagcataatatgaaaaaaaaaaataaaaaaaaaatccgtaaatatacaaaacaaaccctaacatacaatctgcccaaattctgatcaaagcacagaaaagataaatacacaataaattattatttacgaaaaaatgaaatcaagcataataacaacagcaaaaaataataaaaaataaaattctaaatacctaaaaaatgaaaaaaaaaaaaaaaccagagagaaaagaatagagcgaaacctggggagcagccaaaacagcagggtggtgatacaaggactgttgcatgatcgcttgttgtttcagcctctgtggttgcatcttcttcttcctcagacccaccaaggctgagatttctctaagcaagcggaaactttacagggaaatcgagttttctagggtttcagttcaagatttggaagagaaaggggaaggaaaataaatttttaaaaataaaactaaaatacaataagaaaaaagaaataaaacaaaaaaaaaaaacaaaaggaaaaaaaaaaatccctctgagagggtgagagagaaaaggaagaacaaggcgatgggtgggaggagaagagaagaaatgtgaaaaaaaaggtgtttttgctgtgatgggagttttatataaactcgcccttcgaggaatgtaaaagttattacaacttttaccgacacgatcacgcgccgcgcgttggtgtttttgtaattaaaagtcttgttttgtaatcgttaggaaatttaatgcccctgttactacattcttaccacccaatattcaatcaaagaaatatataattagcatttttgttttgtgaattttcatcgaattttacctacaaaattaatttccaatttttttttttaacgaggagtgctaattacaacttcttattacaattttttagttaatttttacgttcgaaactatatgtcgaaatttttgtttaatttttttaatagcgatattcgttatagttacagtatcatccccgtaaatttttaaaaattttcgaatagtttacagtgccaaaaatatagttcccgatattctagtttaccatgcatgttcaaaaaacatcaaacgtatttttggcactgtaaactattcgaaatttttcaaaaatttacaggaatgatgttgtaagcataacgaacaccactgtaaaaaaaattgaaaaaaaatatatcggcatatgtttttgagtgtagagattaactaagaggttgtaataggagattggctgtagcactcctctttttttaattcttaatcgttcaaatttcttttttttttttttttgagaatttgctcgtgaaaagattttagtcctttgatggttcattatagccatttttctaagtttttaagaacttcttgctctcttcaatccaaatttcatccatttttttccatatctgttgcaatgaattcactcaccgataaaatgaaaggcatcatgcgcctatctgaagaagaaaagttaacaattaccattgatgatgaggatgacgattagaatgttgcttctattatggattgtttcctagttgctcgaattattaccactaagcatgactatctttccattttgcagaagcaaatgaaggaccattggaatgggaggttccactccaagattgctaaaaaaccacctgatatgtttgtactcacatttggctatgaaaggaataagagtagagtgtgttgtaatttattttaccatgatcttagctctactcacaagtatgttgttt

SEQ ID NO: 25304 - DNA, 4886 bp, Cannabis sativa
  modified_base (2113)..(2113): a, c, t, g, unknown or other
  modified_base (2140)..(2140): a, c, t, g, unknown or other
gcatttcaatcaatccattctcttgatattcatatcaagtgtagtgtgtttgactaaacccaaataacaggaactgtaagcctatggtaagcaactgttttatccgccattacttcctttttgttcatacaacattatgtaacatcgtttttctatatgcattacttctctagggatactgaaattctgtaatgtttattaagtgcatctgaatatacaaaagaaacatccctaattctatccaaaatggaatagagataaaacagttaagaactttcttcagtttgaataacttgaaacattaagtttcttctagactaagcgatcaacattggattctagtattaacattaatgtaaaatacttgcttaatattaagtaacaattagagacaccataaacttttcataaggactaggaattgtgcttaagtcttttgaatagaaattgcaaaaaataattcatatcttatcctcatccaaataataatgggttgaaagtttaaaatcctcccactaagataaggtactgtgattctatgtccaaggacttcattgatatcaactaactattacgatagtaacatgttaattgaaacacttacagaatcaagtataaatgctattagtttactagttcatttactatattatatccatgtcttatcaaaatatgtgtgtcatagagattctgtggtgtgttgaatatagtctagagttcaaatttaaaagtgtttgaactacatatgtcaataacttcttccacctttaagtgttatagagattatgtggagttttgaatataatctagagtttaatagatataaaatatatttgaactgcatatattacttcttaccttcttccacctctatcagattaaaagatctttttattaaataaagtctttataattgtttaagaaatgacaattattcataaacatcgaatttaaattctaagtgtttatgtggtattatctcttctcaatgatttaaaaaataccatagattttgtattattaataaatacaaaacacataaaacatgataaacatataaatataatatggtagggtgttatacccgaaattcagctaccatctcagtggaggatacgtgtcaagataaagcgaatatgaatcgatcaaatcattcttaatggaataactcattaattgcataagtagtagagcatactggtaactcgctgactatagggtcttatgcaaggaaaagatatgcaaactgttgtttggtatattaacgagaaattgtatgtcattgaatgcataaggcgaggcttcaactccattacatctgggaagacagaagcgacacatatcgactgtgaaaacacttatcaaataatgtacaaactaagtataacagtcgagttggcttgagacctaatagacgaggtgcctatctcattataggaagactcattcctataacctccccctagttaacttcagacatcttcttagcgagactgacaatctcaacgagtcagaagataatattcaaataagcctcgagaaactctttgttaataaaaaaaccgtgattgtttcaaatgaaacattatggtatcaaacaaagaagtgatgaggcgtacatcatcgacctcaaaaggataagaaaaaaggctccagctcgctctcacagtcactggaaccgagctcctgtcgagacatcccagaacgctacaattaaagacatgtttaaatacacgatcattttgacccagtaaaagcgagagaatcactgttgtgcaattttcaagtaataaccgcaattatactacgtgatatgtaatcaaacaccatcattttagggagaagaacattgtaaagatcacagtcaactttgtaattaactgtccactatatgattataaatagtggcaagtaaaatcaaaaaggggatgaaaaaatgatgcaagagaggtcctaaaaaactatcagaaatctgaataagattgactcatggactatgttgaattttaactacgaaaccacgtaaaaaattctatgtgttcatactttttattttacagcctttattttttctgtgtgagattgtcactattaggctcaaatttggttaacnaaaatctgcgttaacagtttggtgctntcattgagagcctctgtgaaaaaaaaagctcagaaaaaaaaaaaaaaccctcctttcttttgaagaaaaactacatccttcatggctgaaaaacccagaaaatgttaataccccacgtgaggaaactcatcattgtcctgggaaagagcccttgggctttagaaggtctactaacccaaagtccagacggaccacccgctctaagaggactcaacctgagggtggccccagcattcagaccacacgttcctagaggacccaacctaaggttggtaatagtacgcgagcagcgcgcttgaggagaactcagcgtgggaatggtcaaaaccctgggatgagggatgaagagccaatcgtggaggtactcagactatgggagaaaatacttatgaaacgaaaactgtcgccttgggcaccttcttgaagaggcacagcagccaaacgttgaattagagcatgatgtagccgcgactagggcggcacaggggactaacgcacaaaatcaacctgaacctggagtgagaagaccacgaggcaaacctcgtggctcatgaactaggagacaagaaaatgcacgggaagaacaacccagggaaaatgagataccccctgaaaatcagaatgatcagccaggaccctctcacagaaatgagaatgggaggtaaccaaaaactgatgaacgggaaattcctcatgaaaatgaggaggatcttgggactcaacttggaaaatgtaggtcacctacgagaaatcattatcgttcttcctgaacgcatagagcgagggctcgtacagactctaatgggggaaatacgacaaaccacactcaaggggaaagaacagagcgtgaagaagcaagtgtgaccttaaagcagttaaggacccacagtcgatcaactcgaagaggagaaagtactcaacaagctaattatcgagaaagcataggaacaagtaaatccacgagtcactcaaagacaaagtcatgagcaagatgaggtccatgagtagaacgcaatctgtgagtaaaacaaggtctgtcagcaattactcccaacaggatctacgagagcatttgaattgcaagaaacctgaccattgccaacaactcgatccaaagcaagaggattccatccaattgcgaatatacgagttggaggacaacttcaagagaaatcaagtgggagaacaagggagacaacctagatacgactcaaatgagatgcttgagccgtatcacccacacatcatgaataccccttttccttcaggatttaaaaacctgcatgtctcgtcatatgacagaaccactgattcggtctcgtatttgaacaactttaatacaataatgcgagcgagtaatgtaacgaacaatttatgttgtatcttgttccccaccttgcttgttggagcagcaagcagccggttcaacaagtttgctcaccattcaataatttcctgggaacagctgtccacagatttcaagaaacagttttaggccactagggatagatgacccgaagcagcgttgctaactaatataaagcaacagctcggcgagacatttaaggcatacttaagtcaatttagcacggctctggctatggttaagaatttggatgatagtacgcaacttacagcccttcaggcagggatctctactgatccatcaaccgctgagggtgagctgtgggacaactaacatggtcgtctagtaaaaacatcaatgagttcaacgaaagggctcaggtattcgttcaaaaagaagaagcccgaaaggaaatgagtttgttgaaaataggctcgggaagcaaacccagcaacgtttcaacaagtactatctcaatgagaattgataacttaggggcttctagctcgaagagaacgtcgaaggataaaaagaaacagaagaagcacgataagtacgtgccagtgtattatttataccaagcttaatgaaactcgtgagaatatttacctcgcgcatgagcaaaaggttgccttcgaaaagtctgagcccatgaggaatgcgaggagcaaaagagaccctaataggtattttaaattccataaggatattggacacacgaccgatgaatgtcaccaattgaaacatgacatagaaagtctcatcgctcgaggccacattaaatagtacgtgaagagacagggccatggacacaactagcccagtctgcttaataacccaaacaaccaggggttacaacctcttcctgtcgaaggggaggacatcctggttatttcaagagggccacatatcgcaggggagagtaataacatccaaaagagatatgtgaaagagataaagaatgagtagtcggcattcgccccagaaccttccaagaagcttaaattagaggaacttccaattatattcaccgaggaagacgagaaaaacatgagatatcctcacgttgatccattggtggttaccattcaacttgccaataaaaggattaagagggtgtttatagacaatgggagctcagtaaatatcctttataaggaaatgttgaggaagatggggctcgaaaaagccaagttgagaccttgtatggtaaatctttgtgacttcacttgagacagcatcgccagtcctggcataatcgagctagcactaaccttgcgcgaagcacccctatctgccactattatgcaagatttcctagttgtcgacctgccatcggcttacaacatattgttgggtcatctagcattgatcggacta

SEQ ID NO: 25305 - DNA, 1893 bp, Cannabis sativa
ataatataaaaaaaaaaaagaaatatgcaacccacaataacccattaataataaaaaaaaatcttaaaataaaaataattttaacaaaatcaataataatgatatatcataatgttgaaatgatatgcttctaaatatttttaaaatatataaagaaaaaaatataaattgaacattaaaattgtaagaaccataaaacattatgtgagaaaagacactttaactaataaatagtgtgaaaatattatttctcaacaaattttaaaatgaaataattaccaacataatactatattttgagatcatttactaaaatttatctttcagatatacttacctgcaaattctttattaaattttcaatattttttatatataaatttttaatttgtgaatatattaccgttgtttcgctaccataaatgttgttttattctaatcaaataaaataatttaaggatcataattttttaattgttattttataatttaaaaacaactcaaataaaataaacaaacatttataaatatctcattttaattataaagttttaatatgaaatctaatcaaagattttgtaatttttattttattttattttgaaaaaaacttaaaattttgtaattaattaagcaaacatgttacatggcagtataaaaacacaaagctcgataagagaagaactagggggtatactaattctgcaattaatctttatggtgacaggtttcactaaggtagttcatcaaagaagaagtcctagatgaaatttgaagaggtatacttcataaaaccattgaaaattccttcccctattacattgtaataaaatatttcttttgcacactcttctgatggtttttcttttgtatttctatttttatttttatatatgtatacattagaagtcatattcaagaacaaaagaactccatatggcaaaaaggcacataggtagattgaaggggaccaaagatatggctgactctatgaaagctcaggctgaatctgatctctatgatgctaaaaagacagtaagagatttatcttcctcaatacgaaacacagactctgaaacaaaagctcaaaagcaagagactgaaatgttgaagaaatcaattaggcaggaaaggagttcggcctctgtggatgctgatagttataactatgtagaagtggtaaaggaattggagattgttaagcaggaattgcgcatgcttaagcttgaaatggctgcaattttagcagagaaatcgagggcagaggatcaaatcgaggctgtaacatcgcgaatatcatcttgttcgaactctttggaggctgtgaagaaggagattgaggaggtaaatgaggagcatgttttgattgagttggccaggattgaggctttgaaagagtatgaagaaattgaggccgaaagagaaaaggaagccgctcgtttcaaatctaccattcagaataccaggaagaaaatgaaggacattgttgatgatattgaggaatctaaagagcttcaacccaagttggatgcaacaatggctgatcttgaggtgttacagaaggaatggagtcttgtaaaggaaatggagcagagagctcaaagaagtacgagcttgaaaggttcagaagcaagttcccaaggaggagagacagaccaggatgctacactttctttgcagacaattactgaagaattagaagaagcacaaaaagaattggctttagtcaaagaagaaggttttcaatacatgtcatcaatggatatcataagaaatgagttaagacatgtgaggaccgagacatctagattggaggaaattgagaagaagagagatataactgtacaaaatcttaactcaaagctactcagagcaaaatccaagttggaatct

SEQ ID NO: 25306 - DNA, 4238 bp, Cannabis sativa
gttgtttcatcctgaaatgcccaagtagatataaggtgatgggcaatcgcaaatggtccagggaaaaacatcggtgcaagttcaccactctcaacattgaagtctcctgaaaagctctgtgtcttctcaactcctttgcacatctgttctaccttcacagctgctgttttttgagccttcttgtactcagcagctagcaaagcttttttcacatcctctctactgtgccattttgcatctagagaaagtggagtttaacagcatcaaaaatttatcagcaaaaaaattgcatagggataataacaactgatgtagaaatgcaaaaacacaagtgaaaaataattataacagaaagcacaactcagtaagaataacagaatttactatatgtatacatatatagacaggataggaaggctggtaaagggatgctatgaatttaggggagaaaaagctaaaattaccttccaactcttccttgtcgacatttatttcaaatgattttgcataagcgaagaacccaaccattaattggcatgggatgctacttggtccaactgcagacaagccaaacaagaaacaaaattacattaaggaataatctttcatacagttgataacatgtatcagttttcaatacagaccatgctgcagtactaaagtcaaatgaaaacttgaaaagattaagttgacagagtacgaatgttgtgtatgaattatttcacagaagtaatgcagcaatttagcaccctgaacataccctaaattctaaacttaagtgaatccaaacatagcaagagtatgcacatgtaacgtcataaaagccactgaataaagatatagaaatgacttgccgcagtttaagtacctggccaaggttgagaactatggtaaacaacttcacctacttcaataccagtctcttcccatgtttccctcttcactgcctcttctaagctttccccaggctaattacacaaaaacacattccaattgagaacgaagacaccttttaagaaaaatactaatgaggactacaaaaagcaaatatacaagcactttcaagaatttcaaaaaggcatctcaaactttttcaacaagtcccaatgcctagctacatacctctataaaaccagccaagcaactccacatacgtggtacaaatctagattgtctgcttaaaagggcacagtcgttctctctgtcaattactaacataatgacaacctgagtcatggagaaacataagtagcaaagtcaacaattaaaaatttaaaaggatccaaccaagttagtttacttctacttctgcataagagactaaacaaaaccgttgacaaaagagagtaagttttaatcatacaggatcgacacgagggtagattctctgtttgcacaaatcacttgaacattgctttcttcttccagcttccttagggattgttttctctccgcaacgtccacaaaagtttgatgtactgtgccattccaacaacgctctggcctgaagaatagccaaaaccaaacaacaacaattataacaatacatgaagcattatctcacgtaacttatcaaatgtatactctatgatttggttcctccaaaaaaaaaaaaaaaaaaacaacaacacattaaatttacaaatacaaaactctaaccatgttcatttttaacaacttttcacaaaaggcaatcaacagaaaagatcaacgaaataatcagaccctttaacacagctacaaaaactcacatgacctgcaacagccaactgtcccatggcattagaatcagcccaatcagtggcaaccatgagcattctaagctcaacaaaagagaacctcagactacccaattcaggaaccaacttagcctcttcagaaacatcaattgcccagtaaacgacgtcgtcctccgcttgcgagcccagataaaccaacgagtcgccgttaatctcagtgcccaacttggccaacaagtccttgaaatcagccaaagcaagccaacccagatgccaatttggagaggaagaatcaccggtcccatcgagagaagaggctaaaggcctaccctttctaaagggcaagaccttaaaatttggcgaggaagggaaatgtgtggcctccaaaatccgaattttgagagtttcgagagcttgggtcggggaaagagggtccccagtttttggggtcttggatcttagagggttaccagcaaaggcatgggactggaggttgatggacatggtggtggaggtgaaaatgtaagagagagctctctttgttgtagagctatgaagttttgtagagagagaaaggacggcagaggttgttgatgatgaggacgagaggaagagagagagcatgacttccttgtgtctatttgaccatatttttcttttcttcaatttaatattaggcttcgttttctggttttggaaagaaatagatgaaacatatatatggtgacgtggaagaatatgaaaatgacaagtgtcatggtgacgagaacgtttcggatgtgtggggtccttcttcgccgtggtgctcagttttcgtaagaggaggagagtgagactacgtcaccttgttcgtatgtgatgtaaccgcgatggccgacagaataattgttaactaatttcttagtaaactgtggtgaaaacatatgaatttaggacttcttgttttgcgggtatgagtaaaaatgagctatttcaatcaatcaaatataaagatttgaaacaaactttttgagtatacgtctaaacttttcttctccctattctattgaaatcagtcatctaaaccattcctaattttatgaatttatttcgtttgccgatgaaaattgttaatgaattcgaaatttattgaatgtgtgctagattttggtaggggatagtgataagaaaaagatacattggtgtatttggtccggcttattttagtataaaaatgatagaggtatgagctttcgtgatctatttcttttttaattaatttttacttgctaaacatgcactaaagttattttgtcatctaactctttagctgctaaagttataaagggattctattatgccaatagttcattgtttgatattgaagagacaaaacgtgtttcttttctttggaagagcattctttgggatcgtgaccttttgaacaaggttgtcgctggttggttaagaaagttaatactttcaaaattcgggatgatatgtggataccaaatgaccatataggttgagcctattcttttaagggcagtcctactcttcaattggttagtgacctcaaactttaggtgggttgaaattctctcttattcaggaaatgcttgataatgtcgaagccaaaactatttttgtctattccttgttctttctttgatacacaagataggtttatctgacatttttcaaataatggtttatatgctagttttatggtactaaatcaagtacgcagcgaaagagttgtttctgattttatatgtccaagatcaccgtatgtgtatatatattaaactgaacgtaagttgtatcattatttagatgattagaaaacttagatcgtagccttccaaatcttccatcacacacaaagactattgtgggctagtaggaaaatagagtatagagttcttcagtttatctcaacacatgagcaataacttttctttttagtgatagagagaaaaaattaattagattgacctttttaggcttcccaaaaattatacctaataattttgatctccttaatttagtttaatttaaattgaaataaatatttatctttaaaattaattaattaactcaaaaaaaccagtggggacaccttatgtaggtggcgcctacaccgtgtctcgacacaatgtgggtggcatctgccttgtctcaattaagacaatagatgtatcttttgtcctgacaacttttatcgtttcctaatttatttaatttaattaatttgaaaaataaattatttattacaaaataaataatcattattttgacaattcaaaatagatttttctaaactttcatacacatctattgttcccttcctttgatagtgtttgatagtggaaatccggggaccatggacctataatcctaagttccaatataaactagatttatttattgaatcttatcaatcaaataatcttgtttattaattctatgattactttactattaatatggaactgaactcttagtaattataaaatt

SEQ ID NO: 25307 - DNA, 1819 bp, Cannabis sativa
agtactttttgttttattttaatattttattatagataattttcgacataagaaaccgtttttttagcatgtactataaaaattttatttgatactaaattaaattttggccctcctaacattcaagtcctagctctgctcctgttaataactaatttatgacatacttgtacatattgtcaacaaataattaatagttatattttaaaacaaattaaaaaaagggttaggatgaaaagaaaaactatgtactaatttggtgtagattaaaaattcatcactattaatggtataaaatttagtgcatacttatttagtgtataatttggtgtattcttaaagtgaaatactatgaagatttattaataatttggtagaatagtgtactatattggagatacttgtgaagattctataacaatttgatagaatagtatactattggaaatgttctaatagtgtaaaatttggtgtaccattagtgtgaaattttcaaagtaaaataatgtaaaaacttcagaccaatttagcaaaataatataactttagagatgctacaacaaattttctccttttatatttaagatacaaagattggtcttccccgtctaccatagttgacgctaaagagcctacaagacacattaaaaaagcaacacaaaaatgtatataaaataaaacccttgaaaatgaaatccccaaacatcatcaaaagttagcctacctaattgattagtataaacaaagatgttaatatatataatataagcagctataatctatattggcatctgtttgactttgaccacaaacaaaaaacgtgcccttttttacttttaagtatcagtcaacgttgatgactggtggtttttgaaccaaactcctcaaattgaatcattatctaatatctactctcttaatcaaaaccagatatgaatacaattctaaaacaacacaaagagtaatctttggcgatatcaacagcaatggacaagaccctcctattgctttctttactcttctttcagttatttctctcagcttcttcttcttcttcttcctctcaatgccccatggatctcagctacgtcaatacatttccatgggacacttctttatgccgaggaaccgttcacaaagattgctgtcagactcttttgagtcttttcggtatgggaatggcacaacaccttagagacacttccaactttcaactttcagatgcaaacacttcatcttcttgcttatcagattttgagtctcgcctctctgatttattagttagtccatctttagttaatcagtgctttaagaactcgacccagttcgtggtcaaccctttgggctgcgctggaatcaccacagctaaagattggatcgagaaggccggtgaaacgacgccgttggaccaatcttgcaaaagggacctaacgggtttaactagatgtagttcctgtgttgatgccggaatgaaggtgaattcaaagcttacagctttggacccaaatggaaccaagtgtttttacttgactgtgttatatgcagctggaattgtcagtgagttgggtcctaaggatcccagtacagctacttgtattctgggcttgcccttatcaagctcagctactagaaattcatctgaccaaataagcaagaaaagcttatcgaaaatcattggagggtgtttgggagttatcattggtgtcttacttgctggtgtgttaatcatcttgtacagaagatgggatgggaagagaaagaaaaatgcccatcatgaagaatttgtcagcagtttcagggaaactgttttgcctaactc

SEQ ID NO: 25308 - DNA, 1724 bp, Cannabis sativa
ttttaggttaatattaaaaattaagtgtgcaattacatatttttaagttaatatttgcatatttctaccttggaagacggtcttataaaagtcactttatttgtatagtgactcgtattttgactttgtatatccttggctatacaattagctttttagctgaaagttctcacagtgtgatccagatcactctaaaaaattagatacaattaataattagattggattatattagattttgagaatgatgattttccaaatctaattactaattggtttgaatcgaatgagtagaaaaatattgaattggatcggatacccaaccctaatcttaaacatgcatctccacattttataaccttaaaagattaattaatattatgttaaaaaatggtaattaatacaattatgcaaatgtttacactttatatataaatatatttaattaagcaatattagaatgaactgcaagttatgtttattatgaaacgtacttgattcattaaaaaaataataattatatgtgtttattagcatagacatatatattatgtgtggatgaaaaaaatatcaaccacactacttagaaataaaattaaaaaattgatcaactaccacattaataatatcaaattacaattatttaattaaaaccccatcaactacctcattagcaatttagcatatgaagaatataatactaattaatgatgttcattaattttagtctctgaatgttataaatgtttatacattatattctttataacattgaaagtattttatattatttgttttactaacgtttatttcattttcacaacataattgcctaatatataacgataaatatgtattatattttgaagtcggtgttttacaaaatttattaactgttttagtaatttacaattaatttaaactttatatttttaaaattgtacaaaataatatttggagctcaattttcattaaaaaatataatataataataacttaatttagaagtgttaatacatgttgattaatttttttttctttacatatgtttgtactaaaaactgacttcatatctgatatactaaagaaaaagttaacaaaaattaaactaaaagtactgatcgaaaattttataactttgtatgtatattattttaattctaaatattatttaaagttcttttattatatattataatgcgatcacttatattttctattaaggacgagagtgtgtattgagatctatcatgttgagaacacgataagctttaacgttgattgttttttttctttttttattagtaatgttgattctactaaattaatttaattgtggattaattggtttgaatcaggttgaagattgatgaacttaaaaagcatttgatttggtagtatgatttgattttccagtcaagttttcaattacgttttagattttatttaattttttttattattgttttttatatttattttattttttaattaaccattttcttaacgaacctaactggcatttatcagtaaaaaagacttgtgaaataagtcattttttttattaatgtcataagtataagttgtaacaatataaaatgattagaaaattattttagcacaagctagtatctttttattattttatgtatcacacaaataaaataattacttgctccaacaacacatatggttaatattatgcatgattagctgagttagct

SEQ ID NO: 25309 - DNA, 5448 bp, Cannabis sativa
tataatttagatattattaccgccaaaaattaaacttaggtatttatttataactggaagataaatttaaatatttatgccttaaaaaaaaagttgacaagtttttaaccatatatatataaaagttttgtaaagattaaattagaaaattgtgacaaagtatatttagtatttttgttattatatgtccatatttacaataaatttatttatttttctaaaaaactatgaaagatgtaatttttcttatacttaatatattcttatgctagttctttactatagtttttattaaggagaataaatttgatttcacatattctacaataattttggcaatgtagaaatcctgttgcatacataactccaacaaagactaaaattggagtaaagccagcgccagttatggcttcattttcatcaagaggacctaacgttattcaaccagctttaattaaggtcatcaactaatgttaattaattttattcttttcaaatcataattatattttatcatgaaaaaaatatgagttcacactatttcggactttgtattttgcaaaagttaccaattagaccttctgttttgcaaaaataggatcttgatcttaatttttgacaattttttttaatataactaatttgaagacaattcctaacccgaacagatacagaaaatgtaaacagttttgtcataacacctttagattggattattattaagttttgttttgacaaaaaatcagttcagggtcttatttgtaccattttagaaaatacaggatctattttgacatttaacaaaacagatggtctgattggtaacttttgcaaaacacaagattcaaaatagtatttaccaaaaaatattgactaagtttctcaattgtgtgtgtatatagccagatattacagcaccaggagtccttattattgctgcatatagtgaatctgcttcaccaacaagtgaatcatttgataagcgtcaagtcaaattcaatgcaatctcaggaacttcaatgtcatgccctcaagtttctgggatagctggtcttttgaaatctctatacccaaattggagttcagcagcaattcattcagctataatgactacaggtatagatagatcattatctgtatatatagacacaattttgtagaatgtggaagtatgatttagaaaaagtagaatagtgagatgtatagtcactacaaaaaaatgttatttttagtgataacttcttagtcataacaagtactgtgactaaaaatatatttagtcacaataaattatgatttttgtgactattacttttagtcagactttttagtcacaacgtaagaatggtaatttataattaatcacaattttttcacttttagtcactgtagtgttcaagaaatacgaggtttatacttcttataatacccatcaccttatcatattttctaaagagcataatttccatctacaaatactattatcatttacttctcattatattaatatatttgtagcaagagttcgtgataacaacaatgaggcaatgttggattgggacatgaaaaaagcaacaccctttcaatatggttcgggtcacattcaacctaatcgagctatggatcctggacttgtgtatgatcgaacaatcgatgattacatgaactttttgtgtgctcatggctacaatgaaacaatgctcaagaagttctacaataaatcatataaatgccctaaatcattcactttagccaacttcaactacccttccattgcagttactaatctaagttctaaatcggttacaatcgttactagaaaagttaagaatgttggatcgccaggcacctacaaagcatatgtgagagctccaccgggagtttcgatttatgttagacccaataatttacaatttaccaaagttggtgaagagaagaaatttgagataattttgaagccaaaggttgttgggaagcctaaagattatgtgtttggacaattgaaatggtctgatggaaagcattatgtaaggagtcctattgcagtgaagtactaaaattaataaggaataatgcaaaatattgatcaaatattatgatcatattatgaatagtattttgtcaacaattcaaagagtatttggttatatatccatttatttattatttttctgtgtttatatttatatatatatagtcacatgcaatttccccaatattattgtacctaaaaccctaatggatcaaatatgtctatcattagtcctaaaaatattcttctttatccaaagatttgtcacttgtcaataatgcttatattgtttaaaaattaaaagaaattcatagcaacaagatcataggatatgttttgttttgtatataggagttgcattaatttttcttttctcttgttttgcttttttgacaaaattaatattctatttattatgatccacacactataaaatgggaatgaaaattgcttataataaaacatttacttttgttaaatcaaaggctttcattacaatattgttgaagtatatcttgtacatgtttataatagttacattccccgataactcttccatttatatcatgtacatgctcttataataactacaaaaccctagcataaaacctgatataatcaaatgtagtaatttatttggtaggtgatataaaagtcgtattgtattaaataataagtaatactatatttggataaaatattaattgtattgtattaattattaccaccataaattttaatataatgtgaattgagttatttaatacatgtaaatgatccgtataagcttgtattataatatttacaaattaaaggtccaagattgggacccgggcctcggtcccactgaacctcgaactcaaacctagaccccaaactcgaacccagatcttggacccaaaatcagccctcagccttggaccctgaactcgacccttgaccatagacctaaactcggcctcgggcccctaaccccaaaccctaaaccccaatccatttagcaattgtagaacaagttcctggtcattaatagaggaaccatcaatatagcaagagaatcgacaagattctaaactttattattaacgtaattagagatggaaaggctacatttacgaatactagcccttgagctagagaagacgcactcgtgattaactcaaaaaattttgttctaaggcaaaccaaactgcaaaagacgtgttgaaacttgccacagtagcaagaagttcctttatcatcgatgatcgaagccatgagagcaacaactggtccttgcattcccattgaccgtgcattggattaggttttccaattacaagggtgagaggaggagcaacacttgtgaacagaatttcatcaagttcatggtcaatcatagttggaaccacctgtgatttccatgctaaaaaattggtgcaatcgagtttgattgcgagcgagaatgagaaggaactggaaaatatcttgttctaaggcaagccaaactgcaaaagacgtgttgaaacttgccacggaagcaagaacttcctctatcatcgatgatcgaagccatgagagtagcaattggtccttgcgcttccattgaccgcgcattggattaggtttgccattgacaagggtgagaggaggagcaacacttgtgaatagaatttcatcaagttcatggtcaatcatagttggaaccacctgtgatttccatgctaaaaaattggtgcaatcgagtttgatggtaagcgagaatgagagggaactggaaaatagattctagatcgagttagtcagagctggagtagtagctggggcaggggttgttctagaggccacgggatcaattgaggaggactccaatggcagttgataccatgtagaaactaatgaaaagaaaataaagaacaatgagtttctattcaagatctttaggtggtatcgatcctcaaaacttaaccaatatcaactaagaccaaactatttaaagatgaaagagttcgtaaaaataaaaacaaatcaagaaaacctaattacaacttgtaacagaaaactaactaactaatactttcaactaacagttagtggtactaacacaccccctaccgcttcaacatcccttttatttcaattctttttcaatggtcaaaattgaaaatagtattcaaacagcctacttcacacgcgtataaaataaaagaagcacgtgtgcaacaaactatttaaaatcttattttttttgacgtgttaaatttttcaaaattttgcatgattacaacgtaaatgactatgaaaaaaataaactaaaaaattatcttaataccgaaacaaatataaaaattattaatcggtgtacccttgcacccctttggggatgtatcataaaaaactctccaatatttaattttttttttcttttttttttttttggtaatgaaaccattggatttcttaatcaaaagttaagagaaaagtgttcctaggggaaataccaagccgccacaaaagcaacatccttttaataatacttttttttattctttattataacacaattaatattctatttttattaataaaataatatgaaaatatcatggataaaatgaaccaatattctgaaagagtaaattgcatcttaattttcacattatcatattttaacactcaattccttatcaacctttaataaagtgttcctaccaattagggcaaaaaaccaagccgccacaaaagaaattgcatccttttataatatttttttataacataattaatattctatttaattatatagctatagtaagttgagtacttaggtagcatttagttaaaaaagaattaaaataagaatagaatgcaattaaatttaaaatatataaaaaattgataaaaaaaaattattacattttttttcatcttacattagaaatggaaaagtcatttcgctaaataatggaaaagtcattctatattggaatgatattctaatattttaaaatgcatccaaactaaaaaatagaattaaaactgtttcatttcaattccaatccattttattaccttcaactaaacgacaccttaagacagggtcgaccctaggcataggcgagctaggctcatgcttaaggtccacacttttcgtagttccaaaataaaaaataaaagtggcattaggcgtttatttaagtaaaattaaatgtattataaacaataaatattcatagcttgtttgcttggggtgtatagcacattacacaatggtgtaggttcgagtcctatcatactattttttaatatttttttatatatttttgaaagtaaaagttctaaattttaaatggcgcccttagttcatatattctcaggatcggctctatcttagcgcatagtctcattcaaacatataaaaaaaaagaaaaaaaaaa

SEQ ID NO: 25310 - DNA, 1819 bp, Cannabis sativa
agcaccattgtatgtgatggtccggacatacgcctcttcatccgggcgaggatgtagccccttcatgactaccaatgtctgtttaacaaagaaatgcaaaataagtgttaataataataaaaaaaatgtttcaaaacaaaaaaaaattatcgaaaaactcacaatacttaaacaaataaacacaaaagcacataatcgacaaagcatcgacattatgtggatatcatgtcgacaaacataaaatctttaacaaattaacagcctacactcaaagcagtcatcgataaattgtcgataaaatattgataactcatcgacaaactcacgatacttaaaaaatcaaacataaaagcacattatcgataaagcatcgacattatgtcgatgtcatgtcgacaaacatttaatctctaacaatttaacagtgtaaactcaaagtagttatggacaacctgtcgaccaaatattagtaacatatcgaaaaaatcgcgataattaaaaaattaaacacataatcgacaaagcattgacattatgtcaatatcatgccaaaaaaacataaaactttaaaaattaacagtgtacattcaaagcagttatcgacaacctgtcgacaacatatcgacaaactcacaatacttaaaaaattaaacacaaaaacacataatcaaaaaagaatcgaaattatgtcgatatcatgtggacaaacaaaaaatcttaaaaaaatcgaacataagagttcaaaaaaaaaaaaattaaatgatcatacccgttttaaaaataatgaactgatttccttctttccaatctcagccctactggtccagcttactatcctgggaaaatgaatccctgacacgaaccatacttctttcccacctctagaatggcctcataggcccaatactgtcatgcaggtgcgaatccataggttgtgtacttgtagtcgtgctgaacatccatcttcagcttcttctcataatttgccttctatttcaacatgtatttttggagggtatgcatcaatctggcaaatgagtagatcttcaacatattttagtatgtcagttgtaatacatccatttccctctcggtccaacaagatagtctccacaaacaagcacaaccctagcttgtacgcgtcattcgagacctcgcaggctaggaacttattctgaagtagttctgtcttcacattatctaaccggttgaaatagagatttatcaaccggttaaatcctaacatggcttctttctcatcgtctgttggcccctttgtgaagttgaggcctgtaatcagcgcgaactcgaccacaccaaatttcatctcgttccgtgcaatgtaaaattgcattttgtcatccttctcagcattcaccatcatttatgtagcatcagttggtggaatagtactgaagaaaaggatagagcaccagcctgctaaaattaaccaaaagggtttgcctttgccctatcagtcaaaccgtgtttatcaatatctggtttgataaacttactaaaaataccactacctctgtaggtcacacgatctgtaaaatgctcagggaatggaactataagcttcggaggcatctgcaaaagggaaaaagattagccacataatcaaaaaaatatcaaaaacctatagacaaattatcgataaaattattattccttaaaaatcaaaacacatacaaacaattaatatgccattgacaatagtcgataaaatatcgacaatatgtcgatattgtatcgatattcaatcaaagaaatgaaaaaacagaacactatcataatttagataccatatcgacat

SEQ ID NO: 25311 - DNA, 4272 bp, Cannabis sativa
tttctgatctttattaaatctgattatattgaaattggttttatttagggcacaaaacccaacaaatcaaggacactttggtcttttgtaattatctaacaaattatgaaaacatttagggatttaaactgtaacctagggttttaggcctcctatataatgggcttaaccttaggctagtaacctaagttgcatctatgcttgaaacctgtctccaagcttcaagtgtctaacaaacaatctctcttcctcacttcctctctcacatgcctacactaacatcatctcaacacttgagttttgccattattgattcataccgtgtatacctaagggtactatagttgatcccacctatagtgatttggatagtcttaacccttggtattaatacaactaaaaggggagtaggtcattatccgctatcacaaaggggccgaacctctataacacatatgtagttaatttcttttcattcttatttatgaaaacacgtggcaagcatcaaatccatacgatcccgctgtcagttgatcactttttgaggttaacaatgtggtcctaatgtccattaattttagaatttactttttcttaagtcaatttatgtttgttagtttctttttttcttatgtttttttttttttatttctgttttgaatttcttttcttctgaaataaaaggcctcatttttttttgcccaaggccccgaaagatcttgggtcggtcgtgcctaggacttacaccttggtccagtcatagaccttgacctaggaccctgacctcgactactgacccgaacttgagcacggacctcgtccccagacccaaaaataaaacctagacttgcaacccaaccctcactagatgccgacccaaacaggaccccgactccgaccccagacccaaacctagacccaaaccctggacctcgcactaggacccgaaccgccaccttggacccaaaatcaaagtcagacctagacctcgaccctgactgcgaacccaaaccctgaccctagactcgaacccagaacttggaccattaccaagaccccaaactccgatcccagccctgaccacggacccacacctgcacctgaaccctgaaccatagacctaaactcggaccccaaacttggacccgccaaatggtttgaacctaggcacaaagctcgaaccctattccttgaccgcaaacccgatccttggaccaagaccacgacttcagacctacatttgaacacaaatttaaactcaaactcataacaaaaataagagcccggaccgagatgttggactctgacctactttctttcacctcattttcttatccatcatttaatcaaaaacagaaaataaaaatataatttacatgacatatttttattttttcttattaaaactaaaatataaaattagttatagaatatatttttatttttaaaaataaaaaataaaaatttactttcacatttataaataaaaaaattaaaaactaaaattattactaaactttattttacaaaacacttgcaaattaagggaaacattgttagaaaatagaagcctacaattattatatcgggcaagcgaccaacattattttagcaaaatctcactattggagataaccttttccatcaatgtatctcactattggagataaccttttccatcaatttttacatcaatttatcccactattggagataaacattgttagatttcaataaaattaggaacacttttacatcaattttttttttttttttgataaagtggagatgtttgtctacggactaaacttatttttcttttttttttttcttttttttttttctggtatttttttttttttgggtacattttcattagtttttgttgaacttggccctgctagctgcctatctttagttttacatcagtttgttgttgcttaattacttagataatttcatttgacacctcgtttaagatgtaagcctatttgttatggaattattggataagttgtatgtcacattttatcaggctccactgtcttgctaactttagtatattccatagcctggtttccaagtcaagatcagtaaacttcaatagtgaattaagcaagtgatctaattaaagccatatatctatttagttaaaaattgaatcaataagctacacaaagcctataaaataaaaagagcagaaaagagcctcaattgttgggaccccaacagctcaaatacatgactgttctaagtgattcctcagattgcttcaacttgtcatccctgaaattattagacacatactgcgaagctgggatctttttggcttgagaataggatctgagattggtttttgtgtggtgttgtattgatctcaaagcagaattccatctgcaaacaccttggtctttcaaagcttcaactactccaatacttgctgctgcaatccaggctctgcttgttgaactcatattgctttcttgaaatatttctttgtagaaatgggaaagttctttggcaaaaatgggaatagaattattttgttcgttttgttgagtatctgagttaaaagtacttatagttatggtctttatatagagagaaagagatgaggtttgtgagtgagttggactttggtattgggataaagctggcagccaaaactagacactgttttagtagtagttttgggcgagcaaaaccatattgcttagaatatctcattgggatgtgagtgaagacaaaagtgactattttattttttaaaaaaacaataatgaaaacagcttgtcaataagaaacacggtaatatgattaatttgttttcttattcaattaaatcataagtagtaagtattttattattattattatttttgtatgggcatcagtagaaagtattgattaattgtaattagtaaataaattatacttcgcttgtttataaaagttttaaattatatacataaatattaattagacaataaaattatatcaaataatttttaaagtattttttttttatgtataatcttaaaaaatatattttggggtgacccctagagccgaactacttgtctttctgtgtagtttcagtaggggcacatattcccagcagatacaaaatgagaaatgcatagcctataccctaagtatcttaggggttaggtggatataatcttttatcccttcttgactgatgtgatccctcataaagtagtcgtcactaggcttattaatcatagcgtaatagctgcaccagaggggttacgccgtcagacttaatgcttatggcagtttcaatacgtctcctcccatgcggcattaaatgcgaggtgactgttcaaatggggtctggtatctcctggaggtgctttgccatggttctgtcctccgggagtatgtggacctcccatatcttctccgggaggcattttcttgttgatactcttgatccaaaaagacttagttaatttgtcccaaagtcatatttttcagatccacgtgtcgcagtcgtattggtccacgtatttttggcaaaattaagggcaacaattatatatttagaaataataaatacatgtaaagagctctaatgaattctaaaaaaagtcattatataattttttgtataaaaaaaagtgcacaaaaaaatatcttctaatatataatatcaaaataactactattaccgtatagtttatatttttaataatataaatttgataataaataaatgtaatagttcataaaatgacaagtttgatctatgttttaaaatttatatattagactttgtacatttaaaaagaaaacaaaaagtagacaattttgctttcattatctttacatcttggctattaaaaatccatatcattctaatcttgttctatgagcttttagtattatgaatacaagataatgtagacacttataaaattgtcaactaaatgatttaatattttaagtatatcaataatgaaaagaaaattgtttttgagaatttcaatcatcccaaaattttcagatttatggcctatttgacacagcttttgaaaaatttaaaagctattttttgaaaaaactgtgataaaaatgggtttggtaagtagttaaaaaataactttttaaagaatttttggagaagctacagctaaaagctaaagctattccaacccaatatctttaaaaaaaaactattttgattaaaagactataataatttttttttaactaaaactatagttacttatttattatatattaaaa

SEQ ID NO: 25312 - DNA, 2974 bp, Cannabis sativa
tgtcttttttaaatatttaaccactcataattatgacctctgcatgtattaattttttttttcaaattaattatacatgtaatgttagcctgatattaacgtgttaattatttaaatagccatattattattttatttaattgacagaataatcaatttataatactctaaataatttagaactacacaaactaaaaaattcaaagcatttataaattatagtaattttttcttagtaaaattgcaatttatatctaaccaatctttaaatgtggatattaaacaatactcctaccttagctagccaagttcataaaaattgtatttggtttggtcatatatatttcttctttgaattagttaatagaagaagacaattaattaataaataattagatgaagcaatacaagaaagagtgatttattaaataatagtgctttttgtttagatggatagccttataaatattggacaaggccgacatctcttcatatataatactaatacacacaattaataatttaatactacacacaacacaacacaccacaactcaaataatattactttgattaacaaatataataagacaataaaattaatgaaacaacttaaacaatttcttctaattaattaagacattttaaatgataggccagaaccacataatttctccttcattatgttattaacacactttaccatagatggagtaagatgattcatccaatcgcccacttcatgatcatgatcgtcatgatcgtcttctttcaatttattcataagtagtacttgttcaataattccatttttctcttcctctttcgagaaaggaattccaacgaactcagcaacccttttggcttgaccaatgttatcttctttcatttcctcgtacttcaaaaacaatactttatcacgtttttctaaacttgctttccaaaaccctaaaacatgatcccaaaaaggaccgaacacactttctcctctacaaaacatgtccacacactcttccatactagaaaaaccctccttattgttagttactattacgtcaagagggtttctactaaggtaaacaattcgagacttggaataatgctttatggaatcaggaaaagatgcatagggaatatgtgtcgagattaaacgacagttattatgatcatgtaaattgtttcgatttaagatggagaagacaagagaattgaggcatttagttgtgcctgatttgggaatggaggctaagattatatcatcatcttttggtttgaatttttgatgaaaattcatttgatgtaacatcattacacttacattacctaatgatttttcttctttttcttcttctttgttgtctatagttgaaattgaagtgttttcaacataaatatattgggtttgggttcccttcttctcctctgatcccatattaatgttttcacctgcaaactaaactatataaatatgtatatataatgctaagaaaaagaaaaaaaaaagcttgaaacttgatgaaattaagagaagagcataacaatattatatatgattattgggaaggaaaataaataaataatttcaagggaatgtatatatgtgtatatatagagattgagatggatattaattcatgatttgctatagctttaaatttaattaattagttaattaattattgtagttggtgatataggcttgtggatgtggtcgacagtggtgtaatatatgattgagtgttggtattggtaagtaaagagcacttcagaaataattattaataatcaattactaattctttattattttcacttgattatcatcaaattatatatattatttaatacatatcctgctttttcattttagatatcttattttaatttgtcccaaatctctgtcttccattatatactaattaaattattattatattataaatatcacaaagatattcctttcatttcctttcgagcaaaaaggaaatgaaaaatatcacaattattataataagtataaaaaaaataagaatataattaaaaagtttttagtgtctctaatccatggcttccacattgttaattgttttagtcaacaaaaacaactttagtgataattataattgcttattacaatctttttcttaatttttattttttagagtatatattgtaatattttttttatgatagtacatgttatagttataatattgtaattttttttaaaaaaaatttaattaatttacagtgtcaaaacatatttgaagtattttaaacacgtgtgataaattagacgttagagattttaattacttagttagctagctagtgtgtcagttcggttttctcacttctttagtgctagtgcatgtgttcttgggaattaggtctaagctaatctgccttatgattgaacttggttaaattttttattgttgctacaatacttattcacaatatttattggctatttttagtgtgaaatatagttttttttgttgggaaaaagttttaaaggtgcaacaccaaaacttctcaagaatttatttattatagtactattttcaccccaagcacgggccattaataattgatagtactgaaatagttatagaattgtgttcttgattaggtgattattttaggaactctattttggaggttatgacatgatattgaatacagttatttctgtcatgcttattcattctagaaagttagaactcaaattcaatttatttaaaacaagttgactacttacataccaaacaagccaatatcattttgcaggggcttgaagatgatgatgatgataaaaatgtttactggcttcggtaaaattgtcttctttcttctaaagaatgaggggtattttggtaaaattgtcttctttcttctaggggtattttggtaataatacatgttcattgtttataggtcagaaaagacccaacaatttcattccttcata

SEQ ID NO: 25313 - DNA, 1683 bp, Cannabis sativa
atatatatataaagatacatattgtttaacacgtaccataatatagttaaattatatatggtattatctaattggttggggtgatttagaataagaagcttttctaattaatcaaaaccttccttaattaatattttcatgtaaattgtaatccccacaattatataaatattatatgtatttttcacttttgcatttcctagctagattttgccaacttttatgataattaattaaaatagataggttaggcaattaaaaatggttcccacatacaaaaacctctatacatatataccaataaataattaactatatataacctaattataaggaaagtgtacctagctattaataatataatatacatatgtactatatagtctctaatttattagggttgaattaaacctctcaaaaaatattacttaattatagccttagatacttaatgtcttgtttatatattagccttaataataattatgtaagttgtgctatatagctcttttcttcataaacctaattaattagccctagctagctcgttcttgtatatttcgataatatcatcattggaaaataatgatagtaattaagccacttaatcaatcaatattaataatttttatttatttagtttttaattttgttgccctaatttgcagctatcaagatggttagatagcttgattattatacagctatatatatatatatagatatatgaaagtgagacaaaaatgatgttctcaatgcatatgtaaatattgaaatctaagcaagaagagaaaatcctttatatatatatttgttaattattttagtaaagaagattgacaaaactagctccatttaaggagacaaaatgacaaaacgagatctgtcaaaattatttttatatatatatcagtggcaattaaacgattaaaacttatttgccagctaaattattattttgatcataattatatataataaaaattttaaacattataattatttaatttgtaccatataataaaatatataaaacatttgagggtgcgacataacctagcaatagcattattaacaggcttgttcagacttttaatattttctatatatattatttagtaagtaccaaataccaataccaaatatatatactaataatatatatagatataattaaatagagtgttacatacacacatacacaaaggcacatgggattaagattatgtatatataaaaagacgtaatttgcaagacatataatggtgcatgggctagtcaggccgtacagacacaaaatgacaaaggcattaatatgccataatggcctggattttcccctttacttaatcaccacacctctctgatcatcagtctctccctatgtatatatatatatataaagctctttaattaatatataacctaattaaatcaaattgtttcattacatagtatacatacacagctaggtagctgagctcttaattattgttagagcatcttctttacaagatatgtaattggattagaatataatatatatatatatgattatctctaatgcatgtttttgtatttatatatataattggtaattagttttcaggtgggtgtagagcatgttctttgtggatggtttgccccataatgcacgtaaaaaagaatatgctatataatatt

SEQ ID NO: 25314 - DNA, 2692 bp, Cannabis sativa
ctatataaggtttttaaatatgcatatatttgtgtgtgtattcataatctaagagaaccagaaactgacagaaattacagttccagtttacagtaatggcatagtgtaccaggcatgaacagagaattaacaaggtcacctttctcataaatggtcctgtcaccatactggtcttgtgctagcttcaactgaaaccccaatctatgttctccataaaacttaatccaatccgaggtccaagtatttatctgtggagtactgcaagacaagaataaatcatcaaatcatctcattataaactatttagcataaacaatttaagcagtcagtgaattccactatattgtgtgttcacaagcaaccatgttttttccatatccaataagactaccttccaatagtgttatcaacatcaaatccaaagcctttgtctgtttttccagctctatgcatttctgcaagtttccttcctaaaacagactgcagaccaataaattcaatagatttggacggcaagatttttagcaacatttaacttattgaaagaactgaagtaatcctcacctgatcgcctctagatgcaccaaattctataaactccatgataatgtaagaaccgcccgtaggtagggacccaacctacaatgctttagaatacattcaactaagcctggcctcatagctagtaaactattaccagattaatagattcaaatttgaagaccttgaatggttttggaacatggattgaattggttttgtacatggcatttaatccaagagcttctccctcaaacattgatggtccaatactcctgattcagggttttaaaagtataagtacttgaattatttgagaatgaaagttaagtattggagtagcattacaacaacaatggccaaagagaagcaaattttgcaatactctgatcaacgacaatactaggtgtgtatacctgtttgttttgacaaagaaagaaccagcatcagtgtcataacgattggcacgattaatgcaaccaccacctactggactgattcctgttattttcgtcgcgtttccttccgagagaatccattcacgaattggatcatcactcatggcattcactgtgagacaactcataaacatatgagtttggttagcaaaaagagagttcctgaaatttgaaatttaaggcttaagaatgcaagcctaacagctagtgttaatcagttccattcaagttctaaacattcaataattgccaaccgttaaggtgtaaattcttctgaaaactcaaataaatccatttactcaagtaacacaaaaagaagatacaacaaatgaaaatcaaattatactgtaaataagaacattaatctaatcattatgaatatgttaaaccatctaattactgggtacattatagaaaaacagactaactccaatagccaaatgcaaagttaaaaagagaaagcacattcataattgcgacaaattaggaaatgagtactccgaaaaaaaaaaaaaagaaacagtgaaaacattgagctcaattcttcatggaaaagaaaaattaaagctaaatcaccatctgggtcccggtcctcttcattctctatgttaaatataccacccttttcattaaataatcataaatttgatggcatatacttactgataaaaggtctatgcttgtgcttggtagaggagagtcgaggtagacgagtaagacgacaagggaagcacgaagaaggagctatggctcccaggtgagccaccataatcaagtttaagaaaaatctgtttttacagaacggaagaccactgaactgaggtcggtgatctgtgactcgtgtcgttttgattgctgggctttcattcgcctgttatgaagcgagggaaacagacaacgactaggatgggatttcgtcaaactgtcgtctacgtgagacacgtgtcacataaaactggcatcaaaaaatatattcaaaaaaaaaaaaaaaaaagttttttattttgacttgagatttgagaagtctaatttttttttttttttgttaaattttcttcatatcagtcaacttatcttcttccaaatttgccattttcctttaactttcctttggacttaaattaagggttaaagtgtctttcccatggcggccattttctcaccattggataagatgaatccaacggctaatcgcacgggttcgttgcagtacagtaatttctttctcttacgtctctccctctctctttcctgtgacagtcctccatctctgcaccccaaataaaacaccgagctttgttaatcaatatattttttttaatgcgaaattcgtaaattgaaacaggttattggtgatctccctgggtcttttttattctggtgagtttctgggttctagtttattatcttgtacatattattttctttggtttaaatattatttgtgttattttattttaggcatacactttgggatcaaaatttaagggtttctttctcttcttcttccgcgaaaggcatgtttctttttaattattattgttgatgttgttgttgtttatggtttttttttttttttttttggtatttgtgctctagatttgggtttggaaacaaattgagaagtgtcaatctacattttgggctatgattttgtgactttactttcgatttttgatttgtgggtttttata

SEQ ID NO: 25315 - DNA, 2167 bp, Cannabis sativa
  modified_base (48)..(68): a, c, t, g, unknown or other
aacattaaatgttatttctgatcgatattaataagtaaatctgattannnnnnnnnnnnnnnnnnnnngggcataaaacccaacactaactctctccagaaagtataatgttcttccacgccatatttttttctctccgtgaccacttggaagtgagttcttgaaagtgtcacacacatttctaggctcttatgagaaaagtcataggtttgttggcgaaaacccaaaacccaattgtatagttggtcccaaatgacccttccatgacatggaccttgtaagggaaagcatagacttcttgcggcatggcaggcttttggtttcccggaaggaaagctcgacctacgcccttgtgcgaataacttttcttacgatgaggtctgtttcaacgagcgagagttatgtcaaatttagtaatggcaaacttttgaccttcactaggaaaggctaaaggtgctcaaaaaattcgaacactaactttctgaagggtgaaacaatacaaggcatgcgagagtcattttaaatttttatgtatcaagcttcagcttcttggaagtaaggctgtagctacataaaattcaagctttgactttacttgaaagaatcaacgggtgaaagcatcacagggagtaagacagacttcaagcagtcgttctgttctaggaaggaggcttgaagatgtatcatacccttagtcatccttcaagcacggaaaaaatcgtgcatgcgagagtcatgttgtatttttatgtagcaagcttcagcttcacggaaggaaggctgaagttgcataaaagttcaagcttagactttgcttgaacaatttaaagggaaagcatcacgaggagtaagacagacttcaagcaatccttcgattgtgagaaggagggttgaagacgtattataccccttgtgatctttcttgcacaaaaaacaatgtgcatgcgagagtcatgttgaatttttatcaagcaagctttggcttccacgaagaaaggctgaagttgcataaaaatttaagctttgacttcacttgaaaataacggagggaaaatatcatggggggtaggaccgacttcaagcagtccttccattccgtgaagaagggttgaagacgtatcatacccacaatgatcttccttgcacaaaaaataacatgcatgcgagagtcatgttaaatttttatgaagcaagctttggcttctgtgaaggaaagctaaagttgcataaaaaaattcaagctttaagttcgcttgaaaagatcaaaatgagaaagcatcacggggagtaagacagacttcaagcagtccttcaattccaagaaggagggttgaagatgtgtcacacccccagtgatccttcttgcatgaataacaacgtgcatgcgagagtcatgttgaatttttaagaagcaagcttcagtttctacgagggaaggctgaagttttataaaaaattaacttcacttgaaaagatcaaagggaaagcatcacagggagtaagacttacctcaagcagtccttctattcttggaaggagggttgaagacgtattgtaccctcactgatctttcttgcacaaaaaataacgtgcatgtgagagtcatgttgaatttttatgaaccaagcttcggcttcccgaaggaagggtgaagttgcatagaaattcaagcttagactttacttgaaaagattagaaggaaagcatcatagggagtgagacagatatcaagcagtccttctatatccaagaaggacggttgaagacgtatcgtacccccagtgatctttcttgcacaaaaaaaaaaaaacatgcatgcgagagtcatgttgaatttttatgaagtaagctttggcttctgcgagggaaggcttaagttgcataaaaactcaagctttgactttgcttgaatagatcagaaggaaagcatcacaaggagtaaggcagacttcaagcagtcctattccaggaaggagggttgaagacgtatcgtacccctagtgatctttcttgcacaaaaaaaaaaaaaagtgcatgcgagagtcatgttaaattttttttaaagcaacctttggcttccgcgtaggaaggctggaaatgcataaaaaaatcaagcttagactttgcttgaaaagatcagagagaaagcatcatggggagtaagaca

SEQ ID NO: 25316 - DNA, 1559 bp, Cannabis sativa
gagtattttattatagaaaagtagagcagtacaatcaatgcagatacatgaaccgacatcataagcaaaatccaaggtttagaaaaagctcacacaacgacaaaagaccaatgctgatatttacatgcaaatctctcacaagctaaaacttttttatttttatttttcttatttatatatattatacagaattagagttcataaaaaaatattaaaaatacataattaagacaataataataatcataatacacgcaacgaccgcaaatattacgtcatttttgacataataataattattaataatattattatgtttctcaaatcctaataatataagattctttggtggcggtgttgctgatgcgttacgacgtcgtctaacatccacaaactcataaccgactcggctccctcctcttccaccacctcctgactagtagtaccgcttccactcatcatctggctcggctcagccgccacgtcagctaattccatacccagtagcgattccaggctcaaaatttgctcatccagctcaatctcgctcggctccattaccgcttcctcatctttacaataaaacccatccggtagtactaattcgttctcaaacatcggtgcaaaagcagtacttgcgtacgacgtcgtttggggctgattaatactcatcatcatctctgcagaaacaagacactgcttcttcaacggcggcgtatccgaagccggttgttgttcggcggcgaaattgagcttagccttatcgccacgaattcgtttagcggcttcatcgtaagctctggcgggttgttcagctgtattatatgtaccgagccagactcgagaacctttgtgtgggtcccgaatttcagcggcccatttcccccatggcctctgtcttattcctctgtacacattttttcgagctcgcctactcttcgtcttagtactactactgctactattgttatcaccttcatcgtcttcttctttaactcgattatttaacttctcagctttattatctttctttattaccactatggaatcaaaatacccacaaaccaaaaccattaaaatatactctaaaaatgaaaagtttgataataacaagaaagaaaaggaaaagtagtacctttggtggtgggtcgtttaggattttgagatgtagtcacgtgatgaaacaggttgttggagtgttgttgtggttcagtgctgctgccattgaagtagttactgtcgaggccaaaaagttcagagatggtgtcaaggtcggaccagaggtcctcttttgtcagcttccggccacgctttccgtcgacgaagtcggaaataatagcacctccgcacattgttttggtgccacttttttttttttttgggagtgaaaaagaagagagagaaagaaagagaaaaggttaagagcggttctgtcttttctcaatgagaagcactagatttatagaagcaacggttatgagtgttatgactagtcctgtatgagcctcgttttttcacacggcacgagttagggagacacgaacaaagtattgttattg

SEQ ID NO: 25317 - DNA, 3164 bp, Cannabis sativa
  modified_base (266)..(277): a, c, t, g, unknown or other
aagttgacatcaaattttccatttgtgcatcaagtttccaacaaagaatggggtagggtgcttcaaaggaaatcaacaagttacacgagaattttataaccttgccctgaccaaggccaaaaaggaagattcctctagccagagtttggacagggggaaaagcattgccaaataggaagtcgcccaaggcggggatgaggatgtggatctccgacttggggaaccaaatataaatgttggaccagtggaagaattggaagagatannnnnnnnnnnnaatgtcccgaccaggaaactcaaatcgatccttctataatatcccacgccctaaagttcaacacaaacaacatgaaaacaacgtatttaaaaaaaacaacaaaattaaacaacatgtttacaactttaaaacaattctaaagcaacaaacaatgctactacaaaatataaatttttaatagcatgtaaaacatgagacctctgtcctacttgattttcaaaaatgagtagagtttttttaactagatatatagttgtatgtgtgttgttgcatgattataatgtagttatatatatcatttaaattatgtagttattttattgatttactactattttatttttccaaaaaaaaaaaaaatcaattaaatatgcaacaaaaatacaactatgtaaaaaataacactaattaaatatgtaaatcaagtggacataaaaaaatattatcgacaaccttaaaaaaatatacacaatacccaaacaactttaatacatgattgaacaactaaataataacaagcaaatatctgtataactactctactttaatatacaaattaaataataagcataaaaaaataagacatcaataatcttataaaataaaagaaacttaaaagcaattataatatacttgctcaacaaaaatataagtaaccttgaaaactatatatataaatatatattcattgttcttttaattgaacaactaaataacaacaactaaaaaaaattgattacaactccgcattaatatgaaaattaatcaaacattaaaatagtgtgtctaaatatagaattgaaataaaaatagcgaataaataatccaaaaaaataaataaaagaaattgtacatcatctcaaaaataatattttcaacacatctattataggaaatttatataaaaaaaatagtaaaaataaagaaaaaaaattctccaaacataaaaagttttttattagtaaaataaaattagcacattatttgtcaaagaattttttttttatactgctggaaacttatttaaatttttgagtttttggcggctaaactctcccaacatttgtttcacttgcatttaactctccaagctcaaattgtggtggtaaaaccctccaaactactgaaatagtagcaaatttaaggtgtcatgcggtcatgcggttaactgttactatagatttatagattgctagattgcttatgtgtacactcttgtacacatgatacgtttatattggtacacctaatattattatttaaaaattatttttaaaatttattttaaaattaaataaaatattaaaaaaattataaattttgaaataattttctgttttttgaataataatattagatgtactaatataaatgtgacacatgtacaatagtacacattagcagtctatattgtcagttaactgtgtacaatggatgacatcttattaattgcaagcagtgtggtagtttggagggttttaccatcaacatgtgatcttagatggttaagtacaagtggagtgatagttgagaatgtttttccgtaaaatactcaatttcttttttttactttttcatcattactctagccactctaattggcactttctgctgacaatactatttgtaagtttctctttatgtccttactttataattgttttatttaatatcatttttagttttcaagtattatttgatttatagaaaaaaaaatagacagactaagctccaagagcgacaagcgtaagtcctcttccaactggtagcaagtgggggagccaatggttgtcaaccactctcctgacaccgtataaatgaaaaaaaaaattagaaaacttaaaaaacaaaaaaaaaaaaaaatatcaaactaaaattgtaaataaaaagaatttttaattgttttgtgtaaaattaccataaaaataatcaacactcttcttatatatatatatatatatatatatataaaagtagatatatattgataaaatgataaaagtaatgtaaaataacaaaattttacttgttgatattgaaataagtaaaatgatatatataaaaaaaaaaaaataattaaaataatgaggaagttatattttttattttttttttaaaaaactatatttttcaataaaaatacaaaaagagaatgaaaaataaaagtaaagcaataaaattgttcatgatatatgtaatcacttaatgataatattgtaatattaaaagaaaaaaatatgatataataataataaacttgtgccatcataagacaagaaaatatgatataataataaatttgtacaacaagacaaaaaccacttgtttttttttttgttcgttcttctgtatagttatagatatatatataaaatgtatacacctgaatttagaccctcttgcctttttttttgccggattttatagagcaggttgtaacaaatttggagcatatgttttttatattatttattaaataatataatatttaagattaaaattgtgatatattcaggtccggccctaggcataagcgggctaggcccgtacctaggccccactctttctaggggcccatttaaaattttaagacctcattatttaactactatatttaactaaaattaacagccaatataatcaatttaggcccagcgtagtggcagtcggaaggtaagatttatgttggctcgaacttgagttcgatgccaccaaacttcactttttagtattatttttttaaaataaaattatttaagaaacaactacaaatatacacttgataactaaagtaaaaaaaaattaaatatataaatattatttaaactttctttctaaatctaacattttataagtttatttatttattttttattattttctttct

SEQ ID NO: 25318 - DNA, 2835 bp, Cannabis sativa
acctaaaactaacaatgttattttaccatatttaaaaaaataaagtgaaaataccataatacttttttatggaagaaaaataacataatatataattttttttttctgaagaagatactaaccttgtgtccccattgagtattgttttcataattgcaactagcaacacaatgagccaaatccatcacttgtttagattggatagagttactgacaacatgatttgggcctaattcagccatttctggtaataccaagtttaatgggcctccaaagaaaactcttcttctaaagaaacatccagttcccacataatttgggcctgaaagcccatccattcctatggcattaataaagaacaatcttttgacctcacaagcataggtatcattcttattgattccataaaatctttgaggaaattgaatatacccaagtttagattctaatttagaatctaataaatagcacaaaactcttaatggtgtttggggatcatttgagtacgtgtcacaatcaagggtcaagattattggtgcattcgtcatcgtggccgatactcgaatctaaaataaatatattaattaaaattattatatcagcgagatttaattaaattaaaaaagtaataattataatattttttattttaaaaatatatgtcgaaacatatatattaacaaaaaaaattgaattttttgaacgcgtatagtaaattaaaatatcagtaatactattattaataaatattgtataaaaataacgttgtaactataaagaatactgttgaattaatgaaaatttaaataagagattaataaaaaatttaattgagaattaactaataaaattattgaaaaatggtgatgaaagtacttacaaggacattaagggcaccagctttgaaattatggttggaagtcttgctcttttctctagagatgtatacaaggtttggcattatatgaccttttatgtctttgtctttgttgttatccaatataacctatatcattacttagcacataagtatattaattaatgaaatactcaaacataattaattacttctactataaaggtaatgatcaaaattaatggtttgattacatgatgctattgtgcttatatttataataaaatgaaaagagtattgttaattgtgtaattattaagtagtttaattaataaaatagtaattatataacataataattattttttatctcaaaatactaggtgtgtttaaatatgagatgttagttatttatgaatttttaatattttatttgacaaaatagttaataattataaagaaaaataatatctattaatagttaatattttaaaaaaaaaattaagtaattacactgtaatcacattcaatttttataaatgactgagacatgaagagtgtagctggaactcttcaattgtctccaattacacaattattgtataattaaatggtcaaataagcataccaaattatataattgtcgataattatatcaaatccaattccaccataattttctaaacacactcttatatttacgcaaaatatcaaatcataatgatgcctaacataaaatctaataaagttgtttgttaatcaagtaaaaacacgtagcatcacaatataatattttaaaatgagaagagatagattatattttttttttcttattagttaatttgattaaaagattaattataagatctaacgagcaacagtcgttccctgtattgttgatgccctaataaattaattagttagcaattctcaaataaaaaccaatattattaataaattatatatgacctgaatgaccgttggatgatcttgtcgcgagaatctatccgtccatttattgaaagctttgtgttcatcttctttggtgatgtactcatcatcaatttttcctttctcaacaacattttctactctcactttcatactttcatacaaagtctgcacccataatttgtaatatagttaattttaattataaattaaataataaaatattaatattattgtgtaagaaattcactactcaaaatgtacttcaaaatacaaatactaaaatataccagtagtatttagtatttctttttaatattataatattattagttcaattaagtattagatcctttataatttaaaataataatttttagagaatatcgctaactaataataggatactacctttagaaaaatgtcaagtacaactgatacccaatgcataaaatgaaagaacaatattgttattggagaccagtgatgtccaatattttttataggtgacatcttataatttgttagtaatattttttaaaacttattctcttaagttatataagacccgatacttaattacaccaataataatataacattaactaaaatactaaatatctacacaccaaaaatattttttaacaattgtcaaaatgaaacctccaataaattggacagagatttcaactcaaattcaagattttattgtatgaaaaggactaagttattcaataatatattggttaagttatgatatggataaatattgattatactaatatactaaatatatttaactattcgagataaacttgaatgtcccaagatgataactctaagataaggaaacttatctctgtcttttgtttttttttttatgaaaggaaaaaatgttgtcttctatcactatatccaagatttcatttgaggttgggatattattttgtactcgtagtaagggaagagtattatttttagcacttagctagataaattatattaaagaaaattattttatatattat

SEQ ID NO: 25319 - DNA, 1982 bp, Cannabis sativa
tttatatttagatgaaacatagaatactaaatgtgtagatattttttttttaagaaatagtttttttttttttttggaagataagaaatagtgttttatttacaattgtatatagttattaaaaaaaattacagttgtatattaaaatttttgcataaaacttttctttaaaaaaaaaaaaagaaattccttatattttaaaaatgcttcagacgcaattggccttggaagctgaatttaaagcgatcctacttgctcttaccagggcaatcgatttggggtggcaagaggtgcatatcctctcagatttgaaaattgcagtttaagccttatctacaccagttggagacccaaattggagggtggcaaatgtattttactcaataaataatttatctaaaatatttttggtttgtcttttcttttttatcaaccgtaattttaatgttttggcggatggtgcagctaaaaatgctagaatcgctagtaagttagcagtttgtatcaaggggagggtaatccccatgtgattcctatctactttcttaatcaatgaacaagtagttctttccaaaaaaaaaaaggagtgatttcttccaactaatataatttattttttagcttgaacaaatgtttagtcatgaactaccaacattgatattgctaaccaaatttaagtttctatgctttatatcaccttttataaacgtattatttatgagtttttggcggttaaatctttttaattgtcgtttcatttatatttaatcattcaagtttaaattttgacagtaaaattcttcaaattactaaattagtagtaaatttaaagtgtaatccgcttaactatcactgtgaactacttaagtgtacactcttgtatacatgacatgtttatattggtacacttaatatttgtgagattaagagaactggattgaaagagagaaagagttgttctgtattgattatcagttaggaattacaagaggttatatatacaagtggagaaacaactaactaacaaacaacccctaactaacaacctaactgtcaagacaaacattgctcaacataatttatagacttaaccaacgtagctcccttaacaacccccttcaaactcagtggtgagagaaagaacactgagtttggacctgaaatcactgagcttgctgctattgatgggcttggtgaagaaatcagctagttgagcagaggcagggacatgtttaacttgaatttgttgctgaagaacattgtctcaaacaaagtacatatcaatttcaatgtgctttgttcgagcatgtaaaacagggttagcggccagcaaaattgtactttgattgtcacaccacacatatggataggcaggaatgcgaatttgaaattcttccagcagtgattgaatccatacaacttcagcaacaacactggccaggcttcgaaactctacttctatggatgatcgagagatggtaacttgtttttgagatttctaggctatgagattacctccaaaatacacacagtagcctgtggtggattatcatccaagtcagatgcccaatcggcatcacaaaacatatccaagacaaaatctggatctggtttaatttaaaggccaagtcaagagtgtcagcaatgtatctcaagattctttttactgtagtccagtgtgagagcaaaggtgtttgcatgtattgacatactttgttaacacaataggagagttcaggtctggtaatggtggcatattggagagcccctacaatagacctgcagaaagtggtgtcaggagctggttcactaccatagttggacaacttcaaaccattgttcattagagttgattgtgtgttgacatttcgcataccagctttggttaggagattttagagatattttgttttgggagagaggaattccaactatagttctagtaacttgtatacctagaaagtagtcaaccaagccaagat

SEQ ID NO: 25320 - DNA, 1753 bp, Cannabis sativa
ttcaatgaagtaagaatgaacaaatggtatttcattgctgcatacataaagtataaacttaacatttatatgcatagtaatacatgaaaggtaataatagtctcttagaggtcttactacagtttttttgatcactaacctcttgtgagtgatagaggacttactactatgatttatgtatttattacataatataaattttgatgagattaagttaagacataagttcatacggaccaagttatctcgttcattatctattcattaggcatcatagccattacgaatgcttttcatattaaattaaacataggtttgattcccaagctctaaactacctgaaaataaaccatctatatatgcagtaccaaattttgtgacaatgatacattttagcccctaaagcaatgctctttcttatattttcattataaatttatttaaaattaaattctaatcaaatttattgtgcatttattgaataatactgactactaaagagtttacttccaagtagcattcattcattaaagcatctatatgcaatacaaaatttttcggcaaatgctatattttagccctatagcaatgctctttcttatatttgctttaggaatttatttaaaattcaataattatcaaatttactgtgcatttaatgaacactctgtcaaataaacatttagctttttcactcgcattgggatggtcttacaaaaaaagaaaacttgttaatgtaactaattataaagacataccagaaccagtagctttaactattgcagagcttattaaaggaactttggaacacattgcagcaatcacctgcaaaacaattttggtagtcacatgtaaatctcccccaatagagtggctatcagaagtccaaagcaacaagtgtaagtcacaagaaaacagctatagcattttttatagtaattagtatttacaatacagcacacacagactatgtttggagtataaaacctgcttgatctaaggaagaaaagagggagtctatgaacttgtggacagggatttaaaagtagctaaaactgatttgaaatctgtagttatcctttccccccaaaaaattttacggctaaagaatctccaaacatactcttagtcattgtttgccactgttggtaggaaagtaaaaaaagtaaattacataggaaaagaagatagaaaagtgcattcctcccttgtagtgttagatatgggagagtaaagggcaattcttctccccttgtttgatagcaaagcaaagtggaaagaagagtgttaataaattaccaaatccactatttgtttggacaatgttctcctaaagtcattctaatttatagagtttaaaaattggataaacctaccatttctgcccatatcaaacacactcttaagaccctatttatggattgaaattgattgtgcacaaatttcagttacttactgacggaggagttgcatccaatgaagaaaaatgagactttgggatgataagagaatgcctgcaaagaccagaaacaacaacatagaaacttatatcagcaaactaaacaatcaaaaagacattatctacttttgacatgtatatgtatgctatgttagcatggaaaagtagcaaataaagaaaattgtaactgtcatgataccttacccacgactcagcggattcgaatccaatatacacaaacacgcatcatcttcataaagctgtaggtaccaaattcagcaaataataaaacat

SEQ ID NO: 25321 - DNA, 3431 bp, Cannabis sativa
  modified_base (138)..(146): a, c, t, g, unknown or other
catagcttttcctaaacaatttcgatcaactaacatttaaactaaacattggtcctcaagttcaaatgatgcctccataggttacctaacaacttcctttccactaaagtagacacacaccactccaaggatcaatannnnnnnnncaagcttgtaatgataggctagggtgaaggtagggtaaggaaaattagtttcggttcgaaccaccctaaacacattgatctttataggacctatgcaatgcacaataaatttttccctaaagaaaacccacacacaaaatacaactcttgccactagttttaattctttgctaatatgtatatatatatattttttactagcaccccaaacttctttttgaatttgttctttttttttagagatttgtttcttttttttttgttttttttcttcaaaagggggtgcaatttctaagtacaaactttttttttttgaataataaactatataatataaatagaaatagcatagactagctagacagcaagagaacaataaaagtgagaaacactccccccaaacttaaagaacaacattgtcctcaatgtttagaaaaagagaaaaagaaaaatagaaaatactcacccaattgacactcactcactacgctccccacaactcccaaatatgcaataaaaattagtatcttataaagaccaatgcatcctggggagaggtgaaaaggagaatttatctctagctaggctatgtagtggctaagaaaggaaaatgttaatatcaagctcaaagggggaagactagggataaactattcataaagggtaggcttgaaggttcaaacggtccaaacacggcctatatcatttccttggtgtggggatgcctaggattttgcctcaagggaaaaattgctaagtaattctagaggcttaaactttcacaagggtttagctcgaactaattagtgatactaaccatttagtcaagatatgagcacaatcgaaagagacacactttcaacaacgaagacaaaccaacatgctaacttaaagtaggcagcttaaaacttaaaaagaaagacattcagtttcaagtaactaggtttaaacacaaaatcgtcatcgagcaccctaggcaacactaacaaagatagaatacacccttaacacaaaacaaaaatacaaacaacgacaaccacaacagataaacaagaacacaaaccgaaaagacaagtgaaatataaatactaaagctgaaagaaagaacactccctctgtctaactctcaggatcatcatccgaagagctagaatcatcctgagcttcgagatcagtccatcgagcaaacacttcttgtgggaacactgggaagtcaactattggccttggcgcaatttgcttcaaagatttagctaatacaatatcacgcgcctgaacatagcaaaagtaagtaagttgtttctcctcaaggtgcgctaagcgattcatgatttgttcccgctgagtatgaggaggactagtgggagccggttggttgctggatggctggtcacggttcagagcagcagtcgagggcgtgcaatgagtggaaacacgctgaatcgaaaccaaatcaatgctgatccgccctcttagaattttttcatcacccccaataggagcattactcgctaggcaaatctaagtgataagagctgggaaaaatagcttgccgcccttttgcttaaagtacttccaaatttcctcataaatgatctttcccacattcattttcttgcccaccaggatacaatacaataagaaaagacgtgtctgactcagtgtggtgtcatgggtcgtgggcatcaaagagcacttcataaaagcaagccaaacacaatcttcgggctataaagccgagtgtaacaaagtgcggtggctggaaggagagacagaccattcagaacccgggtgagcaacagtacgaagcacgacatcacatgggatagaggctggattaatcctcaaaatagcaaactcatcctatagcggagctgtcaacctatatatgtcgttaatcacatcaggagaaaaggggacactccgacccctcacccaaacgacatcaggattctttggatcaagtgtagcataaaatgcaggggcaatagaggccacaacaggcttgggaattgcacataatttctcccactggtgctccgcaatcaaatttgtaatataggcaggtaaagcctccggggcagggagaaaaccaagtttggccaactggttgcgggtttgcaatatctcaaaccgctcttaatgagggacgggattggctttagctttaggatgagtggtggggttaggtttaggtggtgggactgtggaagtggtgcgcttaggctttggttgggccttggaggtaaagggagttgttttggtggatggagctttgggtttaggtgctgagaccgaacgggtacgagtacggggtggtgagtgtgtagattcgggaataattggtattaaagtgggggaaggaaaggcaagggttggtggtattgtggtgattggttgttgcagttgaggagtgggcaaggttttggctgaaagctttatgcttacgagatttagttttgccggctgccatggctcaatatcgcaacaagaggctcaaaatcctgtgacaggaggtaaaaatatctgctatacaacctcaccaatatccccaattagaacaaaaatcaatgagctacactgagttcagcaattcaccacaattaggtgacaatgacaacaacccaaatgttgaatatccagcaatgatagctttcaaaatgtttaaaacagaaatctaccccgacattatcacaaaccaaatcttgagtagaaatctcaccacaaatagccaatgacagctccaattaataacaatgatcaacatagcatagcacacactagaataattttcagacttagaatttatcttagcaagctcattatatcgcaagaaaatttctcaaaacttacaaaaatttcgacgagcgacgaccctgaaaattacttgacagagccgcatagagattaatggaccacctacggaatatcattggcgtgcgagattgggtcttggaggtggcaaatgatagggaaaagaaagagggggaggttgtcgtctcggcggttgagttgttgttgctgagatggagaaagatgaatgtggatttcaggttggagggatgagagaatggtgaggagcggattctagagaaaattgagaaagggggtcgaaatggttggggggtaagttgggtctggtgatggtgaaggtgagatggtaatggagaaggaggcgatggggggatctgatagggatttggggctatgttcggctggagaagggggtagtcgggcctggtatttcgagtggtggctatggtgaatgaaggtgtgatggggggg

SEQ ID NO: 25322 - DNA, 4855 bp, Cannabis sativa
cttaatgtggtaacaaaattaagtgttttcttttctactgaagctgtgttaccattcatgttcgcggccttgattcaaagaccggcgccactttgcacggtaatcttcacttagtagatcttgcaggaagcgaaagagtagatcgatcagaagtaactggagatagacttaaggaagcacaacacataaataaatcattatcagctcttggagatgttatttttgctttggcacaaaaaagttctcatgttccatatagaaatagcaagctcactcaagttcttcaaagctcattaggtattttatttcacttaaaatttttcttgagttgcataatacttttgcttatgattgttttttgaatgataggaggacaagcaaaaacactcatgtttgtgcagcttaatccagatgtgacttcatattccgaaactatgagtactttaaaattcgccgaaagggtgtctggagttgagctcggcgctgcaagaagtaacaaagaaggaagagatgtgagggagttagttgagcaggttccacttttatgtttctattatttttggtaccattacaatatttgcttcttagaactaactaaatcgatattaaattacattaataattacaatatatcaaccctagttaagtcgtattaggcaccataataatattttgatgaataagaatgagaataggaatatgaattagaattagaataaaaaggagtaaattttcttctattttgaaatagaataatcattctactaaccgaggagaaaattcgttccattagaataacacttcaaattgtaaccaaacaacattcagtttcattacctctaaccaaacacaaccttaaacataaattgatgttttcaaatttcgaaagaaagttgtaaatagaaacaacatcattgattgattatgaactcgattttgtttgtcttctataggtagcttctttgaggaacacaattgctaaaaaagatgaagagattgagaggcttcaattgctcaaagttcatccaggaacaggctcactactaaagtacacttctccatctttaaatagagaatccgaaaagaatgggaataatgtccccaaaaaaagcattcgaaactcttcaagtggaatatccttaggaggactaactgagaaaacaacttcttctgatcatgacaactcgtcggattatagtgattctcaacactcgatggagcatgatgagagacctcaaagcgtgtctgtagatgagcacaatcgcgatcatgatcatggtgatgatcatgatcacgaagatcatcatggtgattatgatgagagattaagtgacacttctgataatggtacttctattggagcagacactgatggctcagctgaaaatatggtttttgctcaaatcgccaagtcaaatagctcggaaaggtaacaaatttaagacttttaagtataatttattttttgtttcaatatgatactgtaatatacggttgaaatactaaatttgtaaaaacattttaatgtttgtaatttttaatggtacaaagagtaattttattattatttttgtgtggactcgagatatttttgctatgaaaagtttgttcgtaagtgataagtaaccttttgtatgtgcgtgtaggcttggaagaatttctcgaccaactcaaaaatcggagaacgccaagccaacttcaccattgtcaaagggctccctaaaaatttcaacaagtatgttaacaacactataatctatataacaacatataactatatctaaatcaagttttgaaaatacacataggttgtttatgtaggtcctaaatatcataacttaaactctaaatcatcaaaaaataaacatttttcttaatattttctgtagcaaattgattattattattagaaaaattcaaggtcgaaacaaaatataaaaaaacacgtgttggccctttaagattaagagaatagcttgttaaagcgataccatattcttaatgggatgagagtcgaggtacattaccgatgacccaattaaaggaggatgagatataaattttctattactggttcttgaaattatctaaaacaaataggaaaacgatcaataccacgtgatctattttttatttagaaatatttatatatttatataaaatatgaatataaatcatattcatgctctaaaaataaaatttttgtttctcaggtttgaaaaagacttctagtgttaatacaactccaactaagtctagaaccagacaatggcagtaacattactaacagttaagcaatttattatcttatttttttttttatttatattaattttttttggttttctaaaccaaattatgcatatatagttttcttctattttttgtttatttagatgtattaaaccaattattcttggtttgttgtaatttttttatttatttatttatttttgttctgtaacattaatagaattttaaatacataacaatgtaatatctctattagtgataacaatgtaatttgtgacacataatattgaccaaaaagctctttaaaattctatttttctatttaatcttgtaaagtctttcaatttcaacatatgcaattttttcaaaataaaaataatagaaaaaatcaatatgatcactttctggtttcttgtgtcgtgactttattcactaatataatgttggtatttttgactatatataaaattaataattatgcacaaaatcatgagaaatattttaaataaaagtcatacatttctatttattaaaaaaataaaaaataaataaagagagaaagatggagaactattgacaacaatttagttatgttgttgttttttatttgatattattttggttatttaaactaaaatttgactcattttaaggaaaaataaaataaaatttgactagtttacacactttaaagtttaagttgttattcttattttacatgaaaatattttatatagtaaaaacagacttatagtatatttttaaaaaattacgaataatttgtggtataaaattaaaatatttatttttattttcataaagaaaatagtattttatttggacaatattaaatcatatttttattattttaaatttcttaaaaaactatattttctagtggtactagctagctacttcaaactaatgttcagacttggttgaaagttatgttttgttttgaagaagaaaaattccaagtttggtatgctaaattgggttgacaaattgcataaagaccaccaagtggatgaaatggtaagaattggtagtggtgaacagttattgagatgttaatgtcacaacctctgtccaactcaccatatcctaacaagatagctttgccacatcatcagctgacctgtccatgtcaccatttcattcccttccactcgtttttttaaatcattgttgttaggtattagtggtgcttaacactttctgtaagtggcacttcacgattggttagcgatattcacttaaagttattttctcaagttatatgagatctgatacttaattacactaataacagtatgatatcgaggagggtgttaggcaccagtgatatcttctactaattctttttcttttaaaagaattgctaaaatgcattattggtgcctatctcccgtctcgatatcttttagcactacaggtatgacactgaagagggtattaggtaccaatggtgccttttagcaattctatttcttttaaaagaattgttaaaatgcactactagtgtctagcatattcctcggtgccatatcgctattgatatacttaaatattaggttttatataacttgaaaaaataatttttaaaaactatcgctaactaatcataaagtatcacttatataaggtgcccaatatcaatgctcttctttttaatacctttcaaccactaactcatatgaaaatttgttaattgctatgaggcattatggtgaggtggtaccttaaaaatggttagcaattttttataaattttttaaaataaaataaataaaattcgatattaaattatactaatagtgatattatattttacaatagtacgatgggtatcctttatcatggagtggagaagctcatgtgagttctcttagtccatcttcaatggcctaacaaaaactcaaatttgatgaaattttatcagtgaaatgcttggtatgctatttatatagatgtctacagtgtcccaatattatgtacactaccacaaatgttttttttaatcaaataaacactttatcataaaactaatgataatataatatatttataattaaaacttttgaatagtattaacgaatgtatttttagagcaaattttaatattgtagttagaatataaaagaaaaagtactaaaattgtactattttagtgtttatttaacacttaatttaagttttactattgaaattgcttctagtattggatattgctaccctattgctccacttatacaaatgtacaaatctagggaagcacatttttctcatagggatgggaccgtgcaaggatcgttcctaacggggctggttgggacgagaatgatattctctaccttgatagggattcgatttatattttaataatattttatactttatatttatatttttttagtgtataaattttcaaattgagttttttattataattagtatatcgaacaataaataatgtgtaatattttaatttttatataatttgatatttttatacattaaattttttaatataaattttatttttacattaagtgattctctgcctcgttctcgtcccatccctacaaagtacaaaatgaga

SEQ ID NO: 25323 - DNA, 3975 bp, Cannabis sativa
agttcgaggggaatttctaacggccaaaaaagttcaggaggcacgatttagtacatgtcaaagttcggagggaaaaattactaattagccaaaaattaacttcttttttttaagaaaaaaaaattaaaaaaaaaagtatttttggatgcattagagccttataaggaatccatgaagaaattttggaacttggacaattcccacatgacaaatccaatcaagaagtgaaaaatgtaaattatggtagaaaaaaacaaaacattattaagtaaatatatacaatgaattattattgtaatatttgtattttataggggatatataacttaaattatagtacaatgtaccttgcggaaaatgtcatgtatgcttaaaaattggaataaaatttgtcatatatataatacgtatgaagtacatgcatataatcactggttaagaataattagttaagtcttaactatatatatatattctaaaaaggaataattatgaataagaaaaacttaggtagtcttttaattaatgagatattcctttctatttccttctactttaggaggttatccgataagatgttttcacatggacatgataccttttttcagtcatttccatccttatgattctttcttatcttattctctttaatatttcctttattacccaaatccataagaaggagaatttttatttatgttctattgtttccctccttaagatgcaatcaaagatcttaagataatgattatttgttcctgttgtcccaatgctataaggaagtaataattggaaattagttctacagcagactatatattaatatgtagttataaattaaatcatttgagaagggaaatttaaggtattatggatcctaattatatttattcccttatgaaaatataaggaaacaataataataaaagaaaaaactcacctacatacaataaatgccccatcaccactacccaaacaattttttttttttttttgggaatgattaaaagaccaataaaaacataaacctttggaaacatgtgttcatagattttaaacacgtgtaaaaacttttttagttttgtttgcatttttttctcactacaaaaaatcttacttttaatcacaacaaaacttatgactaaaagtaaaaaaattatgactaattataaattctcatttctatattgtgactaaaaagtccgtaactaaaaatattagtcacaaaaattataatttgttgttactaaatgtgttttatgtcacaatacttgttgtgactaaaactaaattagtgacaatttgtatctaagtactatgtttagtcacaagtaacttttttgttgtgactaaaagtcacatttagtcacaaattttttttgttgtgagtaaaaaattattactaaaaataacttttttgtaatgtcttttcaaatcttaaaatttgaaaatgatgtttaaagatagtgtagctatatggtcctataaaaatttaattttaagagaaaaacatgtttgattacatttaaataatattttaacgagaaatattaaaaggcatcagtgttgtctagtatctttctacatgtcaatattgttattggtacaattaagtatcgggtctcatataactttcagaaagtatcgctaatcaatcgcaaaataacacgtatagaaggtcctaagtaccacagatgtccaataacaatgttcttttaacaacgatgctatgaaaacttaatttttttttttggcaaaaagcatgcctaatgatgctttaatacttaatgttttcacaaataatatatactcaatagtagtttagcaaatgatgttacaatttcattttttacccaagaaaaaaaacgatggcaattaattaattattgcttaacgatagtgttattaattaattgttgcttaacgatagtatgttatgaacacaattcacttacaacatggaaacttgactttttacacaaaatataatggtagtacatcgatgtttaacaacagtgtcgtgaaaaattgattcaccaaaataaatcattaatgggagtttgaatgtgtgacttttttccattgcaaattgcaaattttggttaaataagtgatgcttaagaatggtcttgcaatgctgctatatacgaaaacttaattttaagcaaaaaaaaataataataatgttcaaacgatgtttaaacaatagttcatgaatacttgatttttgggagaaaaaaaaaagcaaattaagctttagcgatgatgtattagttgcgaaagattgatagagaaaaagatgtaaaatagagagagaaagagtgaatgttctgttattcattaccaaaacatgtacaaactaagaacttacatatagctctaaatacaaagaagaaatttgttatacaaattgttacatcagtataactaatttctatataacaaactaactgaagttaatactccccctcaagataaatggtatatgtctaccaatctaatcttgtctttaagaactttgaactgattaagaaaaagagctttcatcataatattagctagttgttctttagtagaaacatgtaagtcttgatcaaactctcttaaactttttcccttatcgtgacaatcaatcttgatgtatttcgttttctcataaaatacggggttagctgcaatatgttgagcagccttgttgtcacaatacatatattaatgtaggtcctttgtgctctatttttaattctttgagcaatgacaacaaccaaatcagctcacttgcagtgtttgccattactcgatattcagcttcagctaaagatctcgacattgtatgttgcattttacttttccaagagatgataaaatctccaagaaatatacagaatcatgttgtagaccttctagtgtctacatatgttgcccagtcagcatccgtgaatgctcttagctgcattttagatgctgcagacagtaatataccctgccctagacttgattttatgtattgcaggattctttgagcagcaatgaggtgcctggatcttaaagtggttaggaactgacttaacttgttgactgaatatgatatttaggccttgtaatgactaagtactgcaatttcccaatgatttcctatcgagtgtaggatctgccaaactatcttattcatcttgagacagctttaggttaggttccattggtgtactaacatccaagtgaaaaggtatgtaactaaaaaaattataaaattttatcgtaagcgatcgtagcaccatcgattttcatcatttttcgcaccgatcttgcctcaaaaactatgcttccaccactaggccattatattgttaaacagggatttataattattttttgtccaaaaatcaaacataacatcatcgttaaagtatcgttaaacatcattaaatatcgttaaaataacaaacatttatttttgtattaatttgatatatataattttgaaagagagcattaattacaatacttgagtgtagaaatgaattaaaaattaatcagccataatttaacatttgtatgggaatttatcaaatgttatagtggggtttttctctgtcatttattttatttttaattttgggatgaaaaagaagagcaaggccattgtggtagtctcgtggttgagatgaatagaatgatggctaacaagacatataacatggaagactcattttgcaatctatatataaatacatccatcttttgggggaaaattcccaactttgctttgtgaagacgaaagaatttctctctctctttttttttttttttttcttttatgggtttggaattgtgtatatttatttacagaaccaaatgaaatgatacccttttgggtcccactcttacacaagacagctttagtccaccttccacccataatcccatactttctattttctaatttctatgccaattaaaaaaaaaaaaaaaaaa

SEQ ID NO: 25324 - DNA, 2917 bp, Cannabis sativa
tggcctattgcttaagtaagtattcttcgtgcttttggatggctctgttaatctttataacattggattgtagtttctaaagtatgaaattagttaagaagaatgtcaaagaaaaccaagatcgtttgggggatttacagagttttgacaaaaatgtagtggcatttatcacaattttcaaacatcttagatgtggtagtgaccattttaaacatgtattgctgcaataaacaatgtagaaaacactcattatagagcccaaattcatttttattgaattttccgggactaagagagtaagttgaatgagtattgccaacaaatggttgaaatctgtagcttacattgaattaagaaaaatatttggtgctctttcttctctttatgttcaagaaaaagctatagcccccttttctttagatcttatcttgtttcctggggtgtgtggcagtgtgggtgaaaccttaatactagaccacttctatccagatagccttatttatttgattattgatttctgacctttttctgaagctaagttagtcactttaattagttatttaactcatcaagtcgagatatcatccaatgctgggatgtgcaaatcttgtcaattgaattaataaaaatctttcctccaaataatgagagacagtgcaatcttgtctttcaaatcatacaaactacttcctttgcctatttgttccgtaaatattttgcatctatatactcttggtactcctttactagcattacattatacaagttgtaagctttagcagaatgacatatagttggtctatatgcatctgatgtgatacgcttgaaatttttgcatggactgtgactctgtaggaaagatctagtatatgactaagctattttcttatgagttgattagatctcttctgttctttttgtcacactctaatggtattactgaaaaattatatttttcttgcatatgttaggcataaggctataagtcagttataattgttgattaatatgttttctcttttcagtgtatgggaatttgccttctcaaagtcagttagcaaattgggaatttgctatttctcagcattcagccctaccacaaggagtattggtgtgattctttttctttatactaaaattctttctactacagtatttgacacttattattatcatggcatggaagcatggaaacagtttcatttccaaaagtttatgttggctgcacggtttcatgcattaattttgtttcagcaagactatactttatggtctgattttattctctgttctttatttatttatatgtaggatatcatacatgcaatgcctcatgatgcacatcctatgggtgtggttgttagtgcaatgagtgctctttcggtctttcaccctgatgccaaccctgcccttaaagtaagttggataatataattttctattagatcttgtgcaatacaagtatcttgtagcatttccaatacatggtacattgaataattctctcagcttttttgtatagaaaattgattttttctgtcatcataatcatatatgctatgtggatgtagggccaagatctttatcagtcgaaacaagtcagagacaaacaaatagcacgtattattgggaaggttatcttttaattcttttctttcttttagctctgagccttgtcaaagtggttttatcagtttctagcatttgcagctagcttctctatgctcagcaaatatatttttggaatcatcaataaaatacaagttgcatctttatttccaggcaccaacaattgcagcagctgcttatttgaggctggcaggaagacctccagttctaccttctagcactctctcttactcggagaatttcttatacatgctagattcattgtatgtctatagaaacaattttctttgtctttgtaggatttttttttttattggacacaggtgtttctttctaaaatggcatacttgtttgatatatatggtcttaagtaaatctttttaagaaaatttatgagagataatataaatgtatatatcagttcttcattgtgaaatttatccattttgggaaagatgaaatctggggtctgatttaccttgattttcttttaaaaaaatttgcagaggcaataggtcttataaacccaatccgcgactagctagagttctagacattctctttatactgcatgcagagcatgaaatgaattgctccacagcggctgcccggcatcttgcatcaaggtaagcaacttcgcaccaatgaaataaatataatgattataattttcttatttaataaatatcttcatttgccttgtattctcagtggtgttgatgtttacactgctctttctggtgctgttggagcactgtatggccctcttcatggtggcgcaaatgaggtacgcatagcctcgataaattagtagtctattgtacataacagaataaggcttgtgctttctcacattaccatggtatattagatttagtttgcccctaaaggtacaataatttttttgtttgtttgtctgatttttgataggctgtgcttaagatgctaaatgagattggatctgttgagaacataccggagttcatcgagggtgtgaagaacaggtatgttgcacttattcagttgtttgttttcctgattgataaacctttttttttttatttaatttaaatcttatgaaatgaaaatatgttcgaattcttttcatctctattctgacaattcttcattttcaggaagcgaaagatgtcaggttttgggcatcgtgtgtacaaaaactatgatcccagagcgaaggttattaaaaaactggcagaggaagtattttcaattgttggtcgtgatcccctcatcgaggtagttccacaataccccactcttatattca

SEQ ID NO: 25325 - DNA, 2703 bp, Cannabis sativa
atatatgatctaagtctaaactacaattattatgtgtatgatctctaatatatgacgaaattttacatgcataatttttatcttgacttgttagtatgacttctattaatgtggttgatagaaagcttataatattagagaaattcgtgttattgatatctcatttagggatgcacattttctctatgtgtacatctatgtgaacaaggtgtacacatgacacaattttattggtcaaccttaaaaattatttaagaaattaaacaaaaaataatttaaaattaaaaaaattgtaaataaaaaaaagcatttttatttttattcatttcagttttttttccattcaaaaaaaaatttgaaaaaaatataatttttttcttttttttcttctttttctttcttttcttcaactattctaccctaattcccaaactgttttaccctctctcttcaaccttcttctcactctttcttcgacaaccgattatcgaaacgaaccacaaaatcaaaatcttcgtcccacaaaacctctatcatcgcccctctctctcgtttttcggtggagatgcactcacggagaagttgtcagtggtgctggagatgcacttcagcgatgcgtttgggccaagaaatcgagatctacgcccccaaaactgaggtcctcccaaaactcatcccttttattttccctccctctctttctctgtgtttctcgctctctctttctctcaatctctctctttgtattttttttatgcaggttggaagaggacgacgatggggttcgtggctcgaaagggatgggaataggttaatgggttcgtggttcgacagggaggtctaggtttgtgggtttgttgtttgatgatgggaacaatattcttggttcgatggggatggacgagttcgtgggtttgttgcatgcgcttatggtgggtgatggtgggttgtggagggtggtggtgggtaatggtggtgatggtatatgtggaagagaaaagaaaatagaaaaaaaaaattgaagaagaagacagcgaagaagaaaaataaaagaatttttttttttgaaaaatatgtatattttaatgtacaattttttattttaaattattttttttaatattttaattttttaaatatatttttacgcggagtaataaaattgtgccatatgtacaccttgtccacatagatgtacacatggactgtctaacatgacacttaacacctaaaatgcaaactgtaaattgctaacagttttctaatttttttaccgctaaaatttaagttttgggggttatgccgcaatttacccttcattttttaacactcaaccacataatctgatttttgggaggcagaaatcctctaaactaaacttttgttgggctttttactattcagttcactactacaaatctaggctttagaggcagtttttaaggctttttagcatcagtttttgcaaaatttatagtcggcgctgatccaggcaacgctaaagggtcaatcataaccaagactaaatctatttatgtcccatctgcagactcgtctccaaaacattcttcaaaaggttccaaaaagaaaattcctccaaaagcccctatctcaaatgtcgacccatcgactattcaatattttgttgatgcctccaaagtgtctatttaccaatgttggtttggaagtcgtgagttatggtttgaaaaactagttgttttggatgactttcctgaacttcatgcatttttaaaaattaggaaatgggttcacactgtctttaagttgcctgcacctcttctcattttaattcgtgaattttatgcaaatctagataggactgttattcatgagggtcatccagggtgtgtaagtgcattttttaggggtactcgtattccttttggatcttctactattgcatgcatcttaaaagttgagtcggtcaaaaatccaacctatgggaaacagtttaatccagatcaaactatgatgggtagagtgctaactggcagggatgactatctttaggaaaagtaggaaattttagctactcatttaaccccattctatagggttcttcatcaggttactttgtacaattggtttcctaactcccttttgtcctcagtcactcttgatatcgaaaagtttttgtatgctgtgggaactcaagtatccattgatctgccctctctaatttttgaaaggattctcgaagcctcagaaaccactggcactcgaaacaaactcctatttccaagtctcatccaacaagtgctgatggctgctcatcctcctcttacaacccatgattatcaagttcccaatcatgttctcagtaagagttttttattaggttttcacagatagcccacttcgactactccttatgcttcaaagatgaacaaaggcaagtcccctctgttcaaatggttatcaaacatacctcgagctggcaggttcaaatgttttcagaattcaaattatttgtcaaaagatataaaaaggatcaaaagcatcaccttgtatttcaggcctctatgtacaaaatggatcgcatcatcaagtccactattctacaaaatcactatggagaacctttaactcaatccattgatatatctcttccacattttcataaagattcgtttggtgcatcctcagatgggtcttgtattggattattttaccaggatctta

SEQ ID NO: 25326 - DNA, 2468 bp, Cannabis sativa
gtgtttctcatttgatcaaaaagagaacttatacaaaatttaaaatgtataaaaaaaaaatgataaaaatgttattaaattttttctctgcttatattggaatagttttttttttttttttctattttaaaatagaatagtcatactaccgaaatgatagaaaaattattctgatattttaaattacaaatttacaatcgaacaaaaaaaaaatagaataaaaactatttcattaccactaacaaaataccactttattttatgtttaatttaagattattttaggaatttgctaaataaaagaaatgtcaaaagagactagtgtagtctaatattattatgaattgttatattattagtgtaattttatatcgtttcacatatttaaatttagtaattattttgaacaactggtaactatggtgtgttatatattgatggtgattaataacaagagaaaacaagaaaataatataaagttggaaaaagttgtacaagttagtaaaatgtcactcaataacaagtatcaatgggttaaagatccaacttttgttttgttttaggggtaaataaaaaaaagatcttacctaacaaaagagttagtaaaaataagaaaacaccatattgattgagtagtaagatgaaataattgaggaggatagttatcaaaagcactatctaccagattgactaatttgtagccatgaatgattacatattcacttacttttcccccacatttggcattgacttgataaatccagaaactgttaccaatggaaggtcattttcaatgttctgaattttgatgtaaacttacaattgttgtctaaatgcattatgcactgagccataaaaaaagaaagaaagaaagatcttacagtctgaaatagacatctcactaggcctggtttttattctaagtatagttttggaaggtggtctttggtgtttacttactcctgttcatcatcatatatagttatcttccaaaaatgaacaactataattgtaattcagatgcgtggattttatgttaccttatcatttcacttttttaccatacatatgtttttgattgtacctctgtaaaatttcaccctttttttttaattattattaaaaacttgaaaaaccagtaacgaaataatgatggacacaatcatttcaattgttccgcatgattaagaaaatcaacaagtagagatcctttgttcccagtccatttctagccgtacacttttgaataacatattttccctttttatttaattttctctgcttttcaccttaactaaagcattttctctttgagtacttaaccgttggagagatcaaccaaatgtggggtggttatggtttattattattattattattaaggcataataagtacaaaagccaaagttggcaaatatggggtctaattaaaacaagtttaaaattagaatagctaaaaatacacttagttggatggtatataaccatgtatttttgaccattctattcaatgagcattgatcatttatttaaaaaaagaaccaatttatattatagcaaattaattatccacttccctgcttacaaaataaacacacaaaattaaacaagggtaaaaaaaaaactcagaaaacacactgataatatgataacatatagatatagatatagtgataacacataatagaagcttgtgatataaatacaagcactaattgatgatgaataattttgttgaattttcactgaacattagtagtagtggaagtagtagtagtagtaatattgggctttgattcacgaaggtttgcattagtgtcaatacttttggttctttggaggcttggtgctctatgaagcctgcacctgaacgaccctgcatgagttgttggggaacataggcaattgttctttgtcacacttgcctgccttgtaagccctgaccctgaacccgacccggatccggacccgggtccagatccacccatgatcatttctgtttctgatggaatctcaaccttcatctccatcttgttagtgaattgtccactgaaatccatgattgatttagtcttcgtatgcacctgcacatattaataatttaagataattgagtagtgtttggaaggaaggaaaataaacaaataaagaaaattaaacagagtatatatatgtagagaagtttgacctgaaatcccaagtagaaattggcaagagaaaaagggggtttggattttagtttctttgatgagaagaagaagaagaaatattgagagaattaaagaaatggttgtggatatttgagtattattgagatgaacaaaagtaataagaagaagaaaactttattatgggcattcattcaatattatcttatctctcttctttttttttttttcttttccttctttatttctcactcactcacgggagtgatcactgatcatgatgatgatcctttgatatat

SEQ ID NO: 25327 - DNA, 2307 bp, Cannabis sativa
caaatattaatgttcgagtaaaatggcataagagactaagagatataccaagtccaacaatagagagacatctagtttattactactatttctaccctctacccaacaacctcgactgcttgacagtcttaatccttatatgaggtttaatttttacacttgattttaatattaacatcactaaccatagttaattatattatatgtttgtacaaagaaacctaacttagaagatactataatgggtagattagtttaacaaaatggaggctcatttttctaatgaatgtgattatagaattgatgactctttctcaaattcaaacacctcccaattgtatcaaagaaaaaattaaattatgctagaacattgtgtgacctcttcaaaacctaccaagacaatgaaatgaggcactgaaaagaagaggaaaaagaagagtgagctttgatttggacaactgatcattattattgttcaaattcaaagcatgttatccttgctaataataatcattaaaatgtaatatgacattagctgaagaaaaaagatgtgtccctttttatgagatcttcatcttaatcaataaaacatgatatttttttaatctgttatctaattataaaagacacatgggattttacttttgtaataaaagaaaaaataaattcaaaaattacttcaacaactataagtgacttttagtgtttcaacaagtatatattatattataaaagaatccaagggaaaaacttgctttatttttggacgagaaatgttaaagggcatcactggtgcctagcaccctcttacgacctacgtgtaaatatcgctattggtgcaattaaatatcgagtcccatatagtttaatataataacttttatggagtatcgctaaccaaacgtaagacaacacgcttagaaggtgctaggcatcactggtgcccaatagcaatgttctttttggatccattttgttgattggaacttgggatggttatgaatagagaagttagttcattatatgtaaactcccatcccaagatatctatctagtagcctggaccaatttcagaggaccaagaactaggaaaaacaaataacaaatagtttattatgataactaagttggagttgaatttttaagtatttttgtatgatgaaaataagaaaaatggtttaatttctcaagacagcgttattatctagataacccaaatggaggaagagaagagaattgcgtaacggttgggggacattatgatgtttataaatactaataataaacatcattgaatgaaggtccaagaagatgcactcactcatatcagagagtgacactgacacccttttcttcaataggttttaaaaatacaagaagaatatggagttggcccaaatatattttacacttgtaatctatattaattttttccacatcaaaattgaaatttggcttgatcaaagttactatacaataatattgagagtttatttttcgagcttgctcagcaatgcttccattggtggtagttcctgtacaatttgttgccagtctggcattccctgttaacaagtgataaattttattactggatacaattttatcagtttttttgttcttcagaaaagaaaaatcactatttaacactagagaacccaaatttgaaactagggtcttctgaggctctagattaactcaaaccttaaacaactaaagatgaaagagagctgttctgaatgtaaactttctaagttcaaagttttgcctcaaattggtttgttaatgtcttgttcttcctataatttcatacacctctaaaggtggtcttccaagttctacattagctctggagaaagtttaacaacatgaatttaaaaatgagaaagaaagtgtgttggattaagtggacttactttccctgatcttcgtactcgaccatctagccgcaatataacgtagacatcctcaccaggagttactccttcagatttctgctgatcctttatccacctaaacagcaaggttacggaaaaggttgcagtgactaaggcatagaagacatcatccgggtgaaagaagtaaaataatgcattcggtacgtagtttcatatgttagatacacaataaaaaaaaaaaagaaacactatatatgatgtttaggagtgaaaacaagattaactgcaaatttttcagagcagtggatgtaccaacaaacgttttccatcacatatgtgaacagaattaaaatatgtatgcactaactgtaaagagggaatatagagtagcaactgacctttcccattc

SEQ ID NO: 25328 - DNA, 2319 bp, Cannabis sativa
tatatatatatgattctatgtacttttagatatataaataaataaaaataatatttttcgtaaataatggtcctattattaaatttaagagtcttgtaaggaaaaaaaaatagtaaaatatatacatacatatccataaatcgatattgtggaaactgtatttaaaattaacagaatatttatagaattttaagtgatacataaaataaaatgtgaagaatatataattttttacctcaaaatagaggaaacacatcactttggtctcctgatggtttaagtaattatacaaaaaaaaaaacaactaaatatgatttatatatacataaaacttgtattgaaaaggaagactcatgaataatgaatatatatatagttatatatactacacaacaaaaaaatgtttcaatagaaaataattgataaattcatgaaaatatttattaaaaaaacgatgaataacattgaacatatacatttaagagtgaagagtaaattgaatgaaaaataaccttataaatgatagtctgtctactgtttttggtgcagcagatgaaaacatttcacaaaggagaagtgattgagtcacaggttatcgattcaactgcgtcagacaattcttatcatatgtaaatattcggaggttgttcatattctattgccaacaatatctttctctctctcatgtaacattttactaaaaaatacataaattataaatatcatatatatatataatacatttttatacatacaaaatgtcttatatctaaactgtcaaatcaaatataataaaaaatatgataagaacgtcaaatggagtgtaagagtcgtgaattaattgttaaatttatttatgaattaattgtgaaattaatttttacaataagagaaatcattacacatgtaaatggaagatcaaagagaataaagtatggttatcagttataatataaggtaggatcatcagttataatatattaatgatcataattattatttatacaagcatatatataaataagtttttaacttgtgagttacacgcacttacacatgagctcttgattatcatcacatctatatagatagattttatttaaaaatttaaaatgatatacaaaaaaaaaaaaataaatgaaaagacacatgcattattacttttatttaattacttttttaatagcttgtcattaatgtaattagtattaaatagaaaaaatatttaaaaaagtctaaaaattagaaaaagagaaaaaaaaaatagaataaattaatagatttggaataactttagaatgtgacatttatcctatatttataaaatttatatttgtaggttactaatattttttcaaaaaataatatatagatactatgaaaactttcagtgtgcattctttaaagttgaccataacaactcaaattatgtatctattaaacaaaatgtaaattataagtggctcaaaataacttataataaacacataataaatatataaatctaagaaaaaaaaattgaattattgacaccttcatggcttcatgtataaatttttgatcattaaatagtgaaaaaagggataaatgatatataaaaatattaaaattattttgccataagaaatgaaaaaagtaaaattgataaataaattctaccactatatgaactcaataaaaaaatttattaattattaactactacaattattatatttaaattaatattattttttagctaattagtaactgttataatattaaataaattaaaatattatattgtaaaaaaaaactatagaaaattaataacatatattgttatgattgatattatatagattcagttacaaaattaattaattactaatattaatagaaatgcttgaagttatatattttaaaaattataataatgtatctatagagaaaataaattagtgtatttttaaattaccacaatttaaaccatgttctattaaagttaaaacaatatatatatataaaaaaaatcatattatataaatttattgttaattttattttattattagtaactgctatgataaaaattagtattaatttatttatttattattttttaaggaacaataatttatttctaataaatataaatatagacaatacatttaccaaagttatcaaatatatattgtaattatatgaataaattattagttggtggtgataaaaataaaagtgtaaaataaatgtgaattgatataatcacacttaatagtataaaagatatcaacagtgttaagatcagttatattttttttttaacaaaaaagtatt

SEQ ID NO: 25329 - DNA, 2609 bp, Cannabis sativa
aaacctcatggaaaatgttagagaaagaataaacttttcacccatcatcacatttaagacttctaatgtaatttccttttttcctagaagaagctttgctatggaagtatctagtgtttttgtctccagcttgaagccaatggactttggatctttgcttccagaaaacttcttgtttataaagaaggccatctaattgagattggagcctagaaacttccctaatgctatcattagaaagaggcagattggaattaatctcattgatggacttttcaagggcattaatcctataagagaggctattggatgttgagttccactcttgaatagctttgatgcaagattgttgtttcgagaggaattgatcatgatagttagcactagaaacaggcttagcctggatccaagctcctttaacactctcaaaaaaggatgcatcagtgagcagttttcaaacataaatattttgacccgaggcacatgcatactctcatcatcaaggaaaattctaagaactctatgatcagagccatagaagccaaggtgataaagggtagcattaggatggagacattgccagcaattgctagcaactccccaatctaaccactcagataaggagccatgtctccaagtaaaggcattaccaatagggtgcaaaggagtaagagagaacttatggacaaagttctgaaaatgtaccatagcataaggaggaggaggactattgcaagatatatcattaaaagagagatagtcattaaagtcttcaaaaataagccaagggagagagggagcattatcataaatcctatcaagcagagtccaagtatgaatcttatcattaatatagggagagtcgtagaaacaagaaagatgagcagttatattatcattaaaatttacaatacaatcaatatggttagaggagaaatttaaaatatttacattaacatcagagttccaaaataacaaaagacctcctcttaaacccttcctaggcacttcaaaaaataatcaaaagaaagccttaacctaagattatcaccatggccagcagcaagtttagactccatcacaaaaagaaaactaggcctatgcttcttgacacaaagggagaggttacagaatgctcgagaactccccaaacctccagcattccagcacaaaatacttatttttctcggcggggttgctcaacaacccccgcctgttcaagagtggagttgatagcagaagaaacctcagtaattgtaggaccagccctagccctcttgagaatgttcgtaagagaatccccaataacaacaacagactgaggagtaaaagcagctctcttggagccagcaataactttacccttagatttctcagagatccgttgaacatggtcaacatagggaacgaaattactattctccttgtcaatagttactgcaatagaagaaacagtagaagctggcatatcacagaggacactagcaggaacttcaccacaatagccagaagcattgaagcttagattaggagcattctgcctttcaacaggtgggataagactttgattattaccaatggaaccaacatcagcaaggctattaatgggtgcagaaatagaggacccaacaccattgtcctcagtagtgagaaattgaatatcgacattagctaaggattgattaatatgaaggtgaggaaggccaagctcatcataagggatggagttagtaagatcaaatggatttcttttgaagttggattggcaagggctttcagtggaattttataagggagaggaggagggaaagcatggtcatcacacttttaaagataagtgatacatttggttaatgtatgatcaaacatgccacagtggaagcaaatattgggaaggttttcatatttaaagttaagccatttttcacggtgggtgtttttgaaatcaacaaggatacccctggtaatgggtttggacacatctattaggacacagactctaagaaagaaactcgaaacctagaagatggtagttttatccacttctaagaagtcaccaacctcatcccctattattttggaaagtttgaaagatttcatatcgaatgggattgaatgaacttgaatcaaaaagggagaataatgaagttggttgggcaggagggtgtcaaggccttgggggttagcacatgtaaccacgctatggtcaaagtgccacaagtgtccctcaaggacccttcgaatgtccccttcataagcaaactccaccataaacatcccagactcatactcagagaaaatagggggtgcacgagtgatccaggcatttttcatggcgtcttaaaccattcaggtttaatggttcgtggggttaagacacggaagacaaggcaaaaggatctttttggttggttatccccccatcatccgcaataagatcatggacaattgcttcttttttagtaaggttgagaatttgggaaatattaagggcaagggaatccataagagtgactaagtattgacaacaactattaacgcagatttttgttaactaaatttgaacctaatcgtgacaatctcacacagaaaaaataaaagttataaaa

SEQ ID NO: 25330 - DNA, 7598 bp, Cannabis sativa
  modified_base (7561)..(7572): a, c, t, g, unknown or other
gtaattagggttaaaaaataataatgtaccctgacactcatctaatgtaccacgaaatacatttcgtgaaagtacatcgcgggacaaaatcgtgtccctatatatatacacatactacaaaaaatcttacaactcattataaattatcatttctgtgttgtgattaaaaagtatgtagctaaaaatattagtcacaaaaattacaatattattatgactaaatatatttttagttacaatacgtgactaaaattaaattagtgacaacttgtaattaaatattatgttttagtcacaaataactttttgttgtgactaaaattcatatttagtcaaaaaaaaaattatattatgactttaaaattctcactaaaaataactattttttatagtaacacacatctacactaatttctatttatgaaatattgctaagagtaatgttgttagacacatttgtaaatagtcagttatatttcgaaattttaatgtagttattaaattaaattatatataaaatttaatatttaatcataaagtaataataatatcatttttaaatggtgtgttaagtattattgatgcattttaatattatttttctattgctaattatttagaagacgcgtcactttatagtagtactagagattaatttattagagtatagggttgtatatagcgcagaattaagatttttttttttttgttaaaaattagtgtcttatacggtgttaaattgatttaagtttgacttgttaattaatttttttatttattcaaaaattaaatctttaattgagtcaattagcatatttaatataaattaagttagttgttttgttaaaattaaatttatttaacacggtataaaacaatatttttgataggtgaaaaatattttacacttgaaaagttaattatatcaattttagtttaataatattatgcactaaaatgatgaaaaattctcacaaaattaaataaatagtagaacaaaattaaataaatttaatatcagtaactgtaattttatttatataaatatttttcataatcaataaacttctctaaaataaaatttgccaatctcctaacaatatatataagtataacacctcgaactaaaaaaaatataacacaaatatttctcttcatatataaatatatatatttatagggaggcctatatatatatatagggcaattaatagctttgtacatgtaataacatatattgatgatgaacaaaagtacaaaaaccctaaacctagaaatcctaattctcacaatcatccttttttaattcttacaataatatataaaaataaaaggctcgaaatccacaacaacaatacttaagcatagtattgaggacacgtggcgaagtgggattatttcatatgacactcttaactatgccaaagctgcatgcatgatgatacatcgtttctcaggcttccacgtaattaattagatacatcatatattctgaaccaacctctatctagggtttcctcatcatcctctaaaacatatataatatatataatatataagatataataataataatataattaataatgatcattctggtgtggttcattttatttggaatgcattaccttccccaatgcttcgaaaaaagtatccaataaataaaagtttatttggtattttgtttttcaaattttaatatgtattaaattatgatgaataactattaagattattaaaaaaaattaaactattaaattatttaatttaaaattttttatttaattttaataagtaaagttttaacgtagataaaaattcaaaaaatatgatttaatatatattaaagttttaagtacataattaatagatattaaaataatttgaagagtataatttaatacataaacaatcactaaattagtaaattgaatgaaatttaatacaaaattttaaatctaattaataattttaataatttttttaaaaaaaatttacaactaagaatatataatttaatacatattaaattatataaaaaaaaaattctaattagctataaataaatatgtataactgcatgcactatatagtgaactttatgcctatataaattaggttttacagtagtacaattgaataattattttgaaattaatgtataatatataaatttctagaaagctatatatatatagctcctattgttcaaacccgaagacgtacccctttttctataatattaattaattataattattagctatagtgatatgatcatgaggtttgtgtttaataattaaagaatataagctgatgatcatgatcatgattagctttatttatatataattatagtttatgctctattaaaattaataattaatattacaaaattccactataggctgaacgtctgtattccaatggcatttgttttccacaattgtcaattataggctaatatctttctttttgccttccctttaaccttattcacacattaacattattaataataattataattaacttctaattacacactagttaatttttaatacatatatatatgcatttggagcatgctataaaaaatgaaaattgcgcaatatgtaaatgataaagtgcctaatagttaaattaatacttatcccttatttttacatattttaatttaatattaattattataaaaaattattaataatctatataaaatactagtacctcgtaatgatactctttatcataaaataattttatagatcctaatacaaacaatgccatctcgggagtagatttatggaatgttcgcaccacgctcactataaaaaaaatttactttagtcacaacataatttataactaaaaataaaaaatatgattaattataaatcacaatttttatgttctcactaaaatattcgtagttaagtcacaaatataccatttattatgactaaatgtgtttttacagtcacaatatttaatatttattgtgacaaaaatttatattgtgactaaataatctcgttccctataattattaaataaaatggttaaaagggctaaatatacatccaatcattcagacatccatacatactaaaggctcatgaccgaatgagattgatcgatcgagaatgctacaatcctgatcaatcctattctgatacgtgactcgagatatagaatgaatcgagatgaaaaccaattttaaaatttaacatttatatattatgaaactttgtttgaataatcaatatacctagaaaactattcattcaacattatgaatccggaacaaaatgtagatgaatgaaagtatgaaacgaattgaaccctattagctttatttattatgaaaaagtagtgaaggtttagttggaaggtagaaaggaggaggagtagtagtattatagtggaaaatgcaaaatggaatttagcaaagaagaagtatatgacaagtgtgctttgatgtggggtcaataagaggtgttatagcatggtgtggaatgggctttgtgggccggaacagccttacaagtcccaatcccaatgcttggagggttgtgtgggggcccaagatggtgagtgagataggtgacgttatcacaccccaaattccaatttggctaatccaactccacgtgggcacactggtcatatgtcctactcagctcactcccctgccacgtaatcactattttataacccaaaaaataaatcaaaatcaaaaaataactctatgggcttttcaaatttcctgtgggcccaatagaatcagatgaggatggcatgtcattctcaatgctatactcttttaactctaattcctccataatcccatgaaacaaactactatttctattattatcaattaaatcagtacttccctctaaaaaaaaatacctagtgttgaactaagtccacacagtatagagtggtaataaattcacactctttattaactcttttttgtctctccataaataatggaacaatcttaatttaattaacttagtacacaaaaatgttacatgttatttcctcaaaaatattgatcacaaaacactaacttaattatctccccaccccataatggttcccaagaaaagaataaatccattatttaatgaaaagtataaatatattatagttaaaagatctaaataataattaaataattttaatttaatttaattaactctctctctaagcgcattaactctctcacatgtgccaaacccctataaaaggaccatcatcacaacccttcctgttcattcaaaaaccaaactcaaaaatcacaaaaatcacaaaaatctcaaaaatcaaaaatttttcaatctcattcattctctttcccaattgaaaaatcaaacctttacactaaaatcccacttacacaaactcaaatagttgacccaaatggagaatttatttcgtcttgttgataaccaagatttcttcaacaatcgccggaatattctaatcaacggtccgatcatcatcggagccggaccttcgggtttagccacggcggcgtgtttaaaagaacaaggtgtaccctttgttgtactagaaagagccgattgtatagcttcattatggcaaagaagaacatacgataggctcaaacttcatcttccaaaacaattttgtcaattaccaaaaagacctttcccggaggaatttcccgaatacccatcaaagaaacaattcattcattaccttgaagattacgctaaccactttggaatcaaaccccagttcaatgaatgtgttcaatcagctaggtacgatgagacaagtggattttggcgcgtgaaaacaaccacaacaagtagtgagagtggtcggtcggaagttgagtacatttgccggtggttagttgttgccaccggagaaaatgcagagtgtgttgtaccggaaattaacggtctttctgacttttccggtgaagttgaacacgcttgtgagtataaatccggtgaaaaatataaaggcaagaaagttttggtcgttgggtgtggaaattccggcatggaactttctcttgatctctgtaatcacaatgcattgccatcaatggtggttagaagctcggtcggtaagtaagtaaaaaaaaaaaaaaatcaatatttttgtaaaaagatggaatctttgatttgggtttttagtgttctaatcaaatttacaatcttttttctcaggttcatatattaccaagagaaatttttggaaaatcaacgttcgagcttgctgtgttgttaatggcttggttaccactttggttagttgataaactaatgttgttcttgtcatggttagtacttggaaacattgaaaaatatggtcttaaaagaccaacaacaggaccattaacactcaaaaacacagaaggaaagacaccagttttggatattggaacattggacaaaatcaaatcaggtgatattacagttgtcgctggaatcaagagatttactagtaaccaagttgaacttgttgatggtgaaattcttgatattgattcagtcattttagcaactggttaccgaagcaatgttccttcttggcttcaggtgagaaaattgttctataaaaaatcaaaactttattactctgtttttttttttttactctgttttgtaaagattgaaactttatactaaattttgtattgggcttttttattttttttcaggaaggtgaatttttttccaaaaatggttttcctaaggctccattcccacatggttggaagggtaatgctggtctttatgcagttgggtttacaaggagagggctttctggtgcttcctcagatgccatgaaaatagctcaagatattggtcaagtttggaaacttgaaaccaaacaacaaaaaaagagaacaactgcttgtcacagacgttgcatttctcagttctaaaaaataaaaaaaatcccaaaaaaaaatgaaaaaaaaaaattaatcataacaacaaattctcactaattgttttagtttgaggtgtataacaataacttaaaacaaatactgtatattacagaagaagaagatgatgatgatgatgatagtgatgatcatactagccctctccaaaggccctaatattttttttttaattatttatttatttttattttcatttttttttaacttagagagtttttttttttcgggcatttttgtaatctgaggatgatgaggctttgtatttttttttttttttttacttatatacagctttttgtaatatatacttttaagaaaagtaatgatatgatatcaatgtttaatcatttatttctctcaatttttttaattttttgaagatgacatgtgtaaataacataaatatggcattaatgatttgattggtgatttttaattattgaagaaaaataaaaggttgagaatcaaaggatgtttattgagaaatgctaggcaacatcaaccatcacaaggttgagaatcaaagagtgtttatagagcttgtttggatggatatttgcttctatagttagtttttcaaacgttattaacttggcttttgctaaattagtttttctaaaattaaaaggtgagattatctcacttggttaaatgatcactagctaaatattaaaatattattattattattattattattattattcgtgtaattcaatataaaattttatttatttatttacttaattttgttaaataaataactttagaaaacaaactgtagtaattacaaaaaatagtactactctaaactacaaaaaatcgcactaacttctcaggaattatattaaaaagtattggaatccaaatcaaaataatttaaaaagacatttaaacccttatataagacattatttttgatagtgttagaaattattttttcatttatatattacacaatatctcgaacttaggacttccaacacacacgcacctagtgtcggccttgggtataggcgggctaggtccgcgcctagggcccactcattttaggggtccaaataaaaaaatatacatatattttttaatatttttaaaaataccatttatttttatagtaaaggcccaacaatttttttttacctatagcccatttcaactcagggtcggccctgcacgcaccctcctatggccacttgagctagtctcaaattatagtgttagacattaaatgcttaataatttttactaagagagtgaaccatcacaataaaataacatcttacgaatgattaattattttttatataaattattagatctgatgcttaattatacatataatatctgataataatattagataccactgttacatgttacacattttttctaatatcaatttttcttatttttataaaataacaccaaacaaaatgcatatttaattactaaaattttatgcttgaatcataggttaattagactttttgctcctgaactttgacatgtaccaaatcatatcccctgaacttttaaaaccatttaaaatgcctcctgaactattgggattgttggatttaaggacttttnnnnnnnnnnnntcaattttactatttcaatgattgtt

SEQ ID NO: 25331 - DNA, 2695 bp, Cannabis sativa
  modified_base (33)..(38): a, c, t, g, unknown or other
tttttcagaaataaattttttaaaaacaaaaannnnnnttttattttgtgattaaaaaattggaaaaaacaaaagtgttatcaaacgacactttataacaaaatactaaaaaaataaagaggagtgttagggaaattttcttttgcactctcttttacactctctttttatttgggtgacatgcgtaccttctaattttgtttaaaaatagttataattatgcccttatttagtttttactaataataattaaaatgagatacatagtagtaaatattatttagtaaaacaaaatgagaaattaataaaatagtcaaaaaaaataaaataaaataaacaagtgaatgagataacatattttaattatgagcattgctattaggcatcagtggtacttagcacattcttaacatgtcacgttgcgattagttagtgatactttctaaaagttattatattaaattatatgggatccgatacttagttggaccaatagcgatactgacacataggaatatactaggcactactggtactctttagtatttctctttaattatcaatgaaaagtaaaaagagtataattgtaactatacttaaatatactttaaaaaattatacatgtcactcaattaaaaagaaagtgtaaaaaaaagtacaaaagaaaatttccctcacactctttaaatttgaaaagtaaaatttttaattaaatttttttaaaaattactttcttaaattatacgtggtataataggaagaaaaatgcaagatacaagtattgttaaaagtaattttggtacacaaatatgtgacagaaacctatgctatgcatgttgttattcaaaacaaaaaagacctatgcatgaaatgagacaggacacgtggatgaaacgtgtaagagagatacaaggactttttagtaaataaacacccgaaaatttagtctcttcacactttttctctttcatttatttatttatttattaataatgatttagataaatattgaatgaagtagaagaaaaatataatatatatgtttatgttgtgaggaagacctgcttatacgctcttccttcttctatatatagcccaaaacgacctcgttttggtccactacacaaaagagtttcagcttttcttctctttgcctctcaccaccaccatcaccatcaccatccatgcttcaatgctggatctctttcactctccttcttcttcttagatctgctcaacacccacattagcttcttccactctcattttctttctattcaggtatgattctattctacatgcgtctttatttatcatttttttaaattgtcggtggcttcggtgattttctacatacatctaaccattgagtatggtttttgaacttagtctaagttcaaaaacagtataaatttgggaactttagaaagtagtctaatgggataaatgaatctcttgctttgttttgttttttcgaggtttttgattcaagattttatttttaatttctgggtaatgaaagcttcatattgcttttgggtaattcaactgttttctttgtgcattttgacatgtctttgattgagagaggtgagatgttcttttgaattgaattcattgattaattgtgttttttgtttatgttttatctattaattgattggtttctatgttctgctgaattttgctgttgttttcagtttggttttgtgtggtttcataactaaaataatgatcacaaagagctgagaacaactattattttacagtacataatcattacataccaaaacacatttaatattgaacaattattatttatttttaagtttagatttgatgagagaagatttatttatttgttgtcttaaattctataaatgactttccatttctactctactctaggcttgtcaatggggctcaaggcaacccatcccaccccgtttgtttaattaattattttattagcaaaattatgctatttaacataattttaaagttaaaatattattatctaccctttcactctgtatacataatatgtagattgtttctgtacattcattgccaaaacattcacaggtcactaagtacctggctttcagttacatagtttatatatatatttatataaaaaggtgaacccttatatttaaatttcattttttgtattatgtcatcagttcaggagttttctgttcagttgtttcaagtttaagtttctgattttaaaagtggtttggtttaggaaggaactagtttgactgtttgaggtagattttgattagacaagttaggtagttttttatagatcatgagaatattttaaagtaggaattaattcaattatatatgtatatgttttttttgggtgggaaaacttctataacattccttttttgggggagaacataattggtaaaatgaccatatgggttaattcaaaagggaaaggaagaatcttccacaataattaggtagtaagtagggatgtattttgccttttataatacaccttgtttgactatgtttttagtttccctaaaagaagtgaaaattgaatggtagagatgttgttattgtttgagatagtctctaaaactttttattacaaattacaatcagaagatttatgccttgcatatgagcatatgtcacatatgatttgtggggaaatactagttagggggtt

SEQ ID NO: 25332 - DNA, 1695 bp, Cannabis sativa
tgaatgtcatttcgagaaacggtagaaccagaactcgaaaaatctaatttgtattgttgcaattgtaaacatgaaacaccaaaggaccaccacttttctcatgaggatggagaatctcatttaaatcacctctcccaaccacggactgaagaaaccataaaccaaccgctccattaaacaccaaaattgataccgcaagtatagcatctggtttcctatataaactcgtatattgccaccaaaggttcccatgggaccgaatgtgaccacgagaatagcctttcaacaccacctccacatttcccatccaaaacaaacatagacccccactgtgtcccacctttttaaccacaagcttccaaacaaaacccaaccgaacacacatgagttcaagggccgaatgagtaacctaattctcagacaagaacacaatattgggtgaaaactctttaacatgtcaatcaagaatttagaacgtccagcaattcctgaaatcttgaatgttctatgctaaacaactcataatgatcattcttctttagagaatttttatttttatggtttagttaaggcataagttgtggtcagaggcatagcctagtggttttatatttttccttacaaagagaatatcttaagttcgaatctctcttttcctaatataaaaataaaaaaaaaattaaggcacaaatcggcaaacatatatatgtatataattatgttttttttttttaattttatttcaaaaagttatattttatttttttaaatgagaaaaataatttagaacaattaattattttaagaaaataactaattttagaggttacgcgataataaacgcgtaattgattacttttaattttttttttccatatttatttttttgatttttttgtataaaataattttttgaaaaaaaagaacttatttttatataaaaccccataaaatatgatttctattttttttttcaatgacaatttttcaaaattaaaattttccaacaaaagtttttgaatttcctctcaaacacgtagtacgataatgtatgaaactggacggttggagcatagcactatggcaatttgggaagcatgagaagaaaaaaagtgcagtttaattaaaagagattttttaaatttgaaagagagtagtggtgtggtgtggtgtggaaagtaaataaaaacaaatttcctactagatcgacctgcttctatcacattcacatatatcttggggttgcacctactcacccaactctagaaaagttatcctctctcatgtatatatatacaaataaatagagataattttagctaataatttggagctttgtttggctgtactgcctagctagctaagtgggagccaagtcatatatatacagaaaaggtggttcagactgactgggtcactactaccaatctctttcacatttgtcaatgattatgatttcgtattacccaattccagataatcatcatccaattcagaagattttttttgaaattatcaaataactactcgttgttaattattaaataacatatatttattttttaattttaaacagtctcttataatctagggccggcaaggcagtgaccttttcagcaatttggtttaatttaaattttgatattcaaatattttttattataaataaaccatttccataaataaagacaaaaa

SEQ ID NO: 25333 - DNA, 1777 bp, Cannabis sativa
agattctatttatacatatctttcctaattccatccaaatttataagctacaaaaatagttgtgtattgctttttgagtcttaagattagttgagaaaaaggatgaggtgatagttgatacctacttttccaacagtgtcataaccaatgaagaagggcattactaaagttataataaatccgtaacataacctaaagcaaatatatgtatattgtctgttcgagttgctagaacaaacttttctttacatcatttcaatcaaatacatttctgagaatggcttagaggattaaaacagccaagctcaattctcaaacttgttttgtcaccattcatacagattaaactgaaattttcaacagatgagtgttgaccaaaacctcatacaatgagtaagaaatgacacaggttatcttttttgtggaggcttcttaagtccagattcaacctctctaatgttgttaacaacaagtcctattttagttgatagtgtttctgtctgctcatcgatatccttcaaaaatgtaagcagtagcccgcgatataattcacatagatgatcttgatgcttaagttccattgtgagatcctcaatccttctatctactgaatcctgcaagtgtaaattgtaaacaaattagtttcaagaggggtcataaccaattcactcaatcctccataatctaaacttgaaagctcgattttgtgtgaggcctatactttatgtgacagatattaatgaatctttattcatgatcttctaccaaagctaaaattcaatctccaactaaaagaatatggcattatcagtaggagaaccaggttttgaaagcataaaattcgagaagaaagctagttttttatcagacaaaatagagagaaaagaaacaaaagaaaacaaaaaacattttacttgtacattggcagtaaattaaacagtgcttttttatgcaaagaaagaaagataaccattgtacttgtacatcttccaaattgaaatatcgaatcactaatccataatgttattcatataacacagtaactcttggcctctacttaaagcatagtagttctattgacacagaaccaaatgacaaacataagctaaacaagtagtcgtatttctccaaatgattttctagctggattgaatagcagtaacagcagctaacaaacatgatcaccactctataaactaactaataaagaagacgtaaaaattacacataaataagctagttgtttctgaaatgagattaacttacaataggtcgtctatcaggaacaataagcggatgagtatggtccttctcaaagcttgtgacaacccattttccagacttagtagctttcacccgtatcattgctttgcaaccttctcttgacttcgccctcggtcgatgttttcgaacatggccaactttatctgcagttttggcagaaaaaccttgcttattgcacgatagttggcgagaaataatgctcttatcaaccactgatcgacggcacgtgccaatacgcacaataaatcctacacgtctcgaatattcatcataaaactttttggcagcctcttcagattcaaactccataccaatacaaggttctaaagctgaaccttcttcgtgggcattcaaaatcctttcagcttgaggttcaattgttacagtttcctcatcaaaattcactatcacaaaagaaaaataccatttatcataagcgacaacgccttccccatgcatattcaaattatacacacaactataaacaagaagt

SEQ ID NO: 25334 - DNA, 4589 bp, Cannabis sativa
cgagtggaaaagagaggcagccgcagccagcgagacttaaggaaacgctacacaaaaccaacctaattctggagtgagaaggccacaaggtagacctcagggttcgagaaccaggatgtaggagatgaattaggaatatccctagaatacctaggaggagcaacatggggaactagcgatgttcctgaacacaaacaacccaacaattaagctcctcattgaggggtacctcaatgacccgagggatttacaaattaggggaatgaaaacaatgacatgccagaatcttctcgtagggacgagaacaaggcagcccagaactagggaacaagagatccctcgtaataacgagagcaatcttgggatacaacctaggacaagtgggttgatgctgaggcacccccagtgtccttctcaaactgaaagggaggaggcgtacacatattatagcggaggatgtgtacctaacccttcttgaaagagaaggcctatgtaggacgaggcaagctctagatcgggacattcaggatcttgaggagatagtcgattagaaaggcgtatgcgagggggagatagacctctccgtattgatgattgagagagtaggagtaatacgaggagctatcaatctgagagttactcggatacaaggtctgtaagcaaccataaatgaagacagctagattttcgtgaacatcttaatcaaagacaacctgatttacgcgagcgttaaaattaaaatgcacctaatttacccccaacaagtcaatgctaatctaaagcaagaggataaaatccaattgcgaatcattgagttggaagataaattcaggaggtacaaaaatggggaatatgggaaacttcctggttatgactcggacgaagaacccgagcctttctacccaaatatcatgaacttttaatttcacttaggatttaaaaaccttcacttctcgccttacgatgggactacggacccagttgcgaatacgagttagcaaagtcacgaataacttatgctatattttattccccacctcattgagtggggcagcgagtagttggatcaataagtttacccatgagtcaattacttcttgggaaaaattacttaaggatttcaagaaatagtttcaggcaacaagagataggcagcctgaagcaccctcccttactaacatgaagcaactaccaggcgagtcgcttaagcctacctaagtcgtttcaatactgctgctgttaaatttagaaacttgaatgatagtattcaacttactgcacttcaagcagggattacaactgatctctcaacaattggaggggagctgtgggatgatttacaaggtctcacggtgaggaacatcaatgggttaaatgaaagagctcaagtgttcgtacggaaagaggaagcgaggaacgagatgaaattgttaaagacttgctcaggaaataaacccagcagtatctcagcaagtaccatcttaacaaaggctgacaatccaggtggctctaacaggaagagaaaagatgactctagggaatcaaccaaagataagaaaaaatagaagaagcacgataagtacatgtcaatttttactatttataccgagtttaatgaatcccgagaaaacattttcctcacacatgagcacaaggttgcaatttgcaagcctgagcccatgagacatgcgagacacaaatgggacaaaacaaaattctgtagatttcacaaggacatatggcatacaacggaagagtgtcgtcagttgaaaaacgagatagagagccttatctctcgcgattatttccaacaatatgtaagacgacagggtaatggacaaaactagcaaaatctgcccaataacctaggcaaccaaagattacaatgtcatcctatagaagttgatgacattttggtcatctcaagagggctgcatcttgctggagaaagcagtaatgcccaaaaaacatatgtcaaggaaataagaaatgaacagtcagtttttgctccgaaatcatctaagaaagtcaagactgaagaacctccaatcgcatttttggaggaagacagaaagcacgtgaggtatcaacacgtcaaccctctcatcattacaattcagctcaccaacaaaagaataaaaagggtgttggtggataatgggagctcagtgaatatcctgtacaaggatacactgaagaaaatggaattgcaaaatgtcaagttaaaaccttagatggtgaatttgtgcggatttaccagagataatgtctccagttaaggatttattgaactctgattaactgtaggcaagccacctatatccataacattaatgcaggattttctagttgttgacctaccatcggcctataacatactgttgggtcgtcctgcactaattggactaggggtagttagttcaatcaaatacctgtctttaaaattttagacaccggcaggtgtaggtatagtgcgaggtgaccaactactagctcttgaatgctatcgtatagtacaacaaaatagaaaagtcggccatcagttaatggtagtcatatcagaggaaggcgagaaataggacgaggatctagatcctcaaatttaagaggaaaagaatcagttgaaactaatcgaggaattggaggaagtttttttagatccaaaaaattccactaagtgtgtatttattgggaaaaatccggatgaaaaactaaaatatcaactaataaattttctgaaggcaaacaaggatcaatttgcatgtagccattcagatatgataggcatcgaacctaaagttattttctaccacttgaatatcgaccgtaattacccagctaagagagaaaaaaggcgacccttggattctgaaaggcaaggggcactcaaggaagaagcggacaagttactgactaatgactttatacgcgaggcattctacccctcatggatatctaattctgttcttgtcccaaaaccaaatggtacttggagcacttgtatggactttttagactttaacaaagcatgtccaaaggattgctttccactaccaaggatcgaccagttggtggatgcaactgctagatacgagctaatgatattcatggatgcatattctggatataacaagatcaagatgcatgtccctaatcaagagcatacaagttttgtaaccaacaagggacattattgttataaagtcatgccttttggtttgaaaaatgttggggcaacgtatcaacgactagtaaatgaaatgtttgaaaagtaaataggaagaaacatggaagtctatgtcgatgatatgttggtgaagttggcaaagagtgaagatcatacaaaagatctagcggagtgctttgaaatactcaaaaaatacaacatcaaactcaacccaaagaagtgttcctttatagtctcctcgggaaatttatgggattcataaataacgccaggggcattgaagcgaatcctaaaaaaattaaggctttgatagaaatgccatcgttcgtaaagctggaggaagtttaggccttaacaggaagaatgtcagctctaaacagattcatctagaaatcaaccaacaagtgcttacaattcttcaatgtgttgcgaggcaacaaaaagtttgaatggacagacgagtgcgaggaaaccttcagaaacataaagaaacatctatcaacgcctcctgttttcgctaaactagtaactggagagactttactcctctacttggttgtctcggagaatgcaattagtgcaacattagtgcgagaagagggaaggcacaaacaaccagtttactatgttagtaaaaggttactaggggcagaatcgaaatatccccctcttgaaaaacttgccctatgcctaatccatgcatctcgcaaagtaaggccttacatccaagaacatcccataaatgtgttaaccgatcaaccactaagacaagttttgtcaaaattaaaggcttctggaaggttgataaaatagtctattgaactggggaagtttgacataacctatctaccaagaatatccatcaagagccaggctttggaaaatttcctaatagaaggaatagttcaagatgaaaatccacttgtctagcgagatacagagacttggaagttatatgtggatggagcatctaatgaaaatggctcgggtgtaggggttatactaatctcgcgagataacttaaagtttcactacgccctaagattccaatttgacacctcaaactatgagccgagtatgaagctttgatagctgggttgaaatagctgaagttttaaatgtcaagaaccttatgttttatagtgactcacaattaattgtgaatcaagttctaggcgaatacctagcgaagggtttaaaatggaaaaatatttggagaaggttcgaaagaacttggaaaagtttgattactttaaaattgagcaaatcgcgagagcacataactcgaatgtcaatgccttggtgaaactagcctcgcaaaacaaacttgataacttaaatttggtactggtggaagtgttaagcgagccaagtgttggattatattttaccaggatctaga

SEQ ID NO: 25335 - DNA, 2572 bp, Cannabis sativa
ctgtggctccagctcaagtcccaaaagaactcgagccaaggcagccattacagctaagaccagctcaaggaagaagtatatgtgaaagcagtaaagaatccacatgacctttggatggatgtagtcaatgtagtcatagacctttataaccaaagccaataaaactgcttttatggcataatttagaagagaaactcggcctttatcaggcgttttgacagaagggttttccttgttatggccatttacataagattttgatggtgtttggcattctctgtattcggattcttctggttttttcaatggaggtttgttctgttgaatcttgatcggaagacaagcaagggccacaaaaatcccaagagaatgatgatgatcagatgatgccaaagggcccttatcgaaagcgaaaagtaagagcttgaaattggcaagccaagcaatgaaaaatgcagtcaaaccagtaaaagtcacagaagaaagattgagaggaagatagagaaagagacatactattgggagtaacaaaaccagtctttgaagaccctttgatacaattttacttgttgtgtagcaataacacaaggatatgaaaactgttagccatactttgattaagttgctaagctcttcttccatttgctctctttcttctttcttgatttttagatctaatttccaagatttgacttttgcctttatatcaaattttattctttttgacagctatccaagatgatatttttttcaaaaaagatgaaaacatgttttggattgtatattaactttttctaacacaagatgtggttctatttttttttcagcaaaaaaataaaataaaatcaattatatttatttggtatttctgttgtgattactctaataaagttcctttatttgaattttccccccttgttttccaaataccaagtcagcaacggttggtgtgtattaagggtgcacatagggtggattttatcgagtttcgggtttttgagttcgggtatatagaattagtaacccgaacccacccatttgtgtgaccggatttttgggtgcaggtgggtcgggttcggtttgatttgagtttggtgggttttgaccgggttcgggttggggttcgggttgggctgactttttttttttgaaaaatatcatttttatacattttcttataaaaaatagaataataaaaaaagaagtcatattagaagaagaaaataaaaatgatatatcattatttagaattagtttttcttttgtttatgtttagatttttaaaaaatgtatcaaaaaaattaataaaaaatatatttgggtttcgggtggatttgggtgtaatctcgtttttttgggatttggattagtgaaactcaaacccgaccggtgatgaactgggtataacttgaactcagtttgctaaaattgtaatccaatttttttggatttcgggtcgggtaggtttcgagttttgagtgtaaatgtacacccctgagtatttattgttcaacactatattgatgtaacacgttgtaaatggttcacagtttcttatattattttttgcaccaataacagtatatcatttcttataaggtgcccaaagcatttttcatttatttatgttgaattacaagtacaaccaattagatgtcattacaaccacaaagccatgaaagattaggtttcaatgatcactatatgctggtctcctactttaaaagctcataaataaaccaaacatttgatgcagtaataaaaaaatcttattattttttctcttagcatttgttttagaaaataaagttgaagaaaaagaattttaggccttctggtagatttgtcatattattcactaacagtggatatcagttaatttagtcgggttataatatattttaaataactcaatataaatattggattataaaaattgaattgtaacccacccaattaaaacttaaaaaatttaactcacctaataattttaacaatttattcacgttaatctactcattgtcataacttttttttatgaatcagttgagatattatatattcctccaaactataaattttacaaacaacaacaccaatttgcccttaagcaaaaatagaaaaacaagtacaattgatctatacattctttatctatagaagtgtttcttttagaagtaatccatgtaagtctatttttgacattatactttatacattgaacaattgattctacataatgttttgagttattcaaataatagtcgtttcgactacaccaaatcagatatgatatactaaagcagccagcgccaataaaagtgtttgttttttaatcttgctgactttggttcttttaatccattactaccttaaatattcttttttcacactacctttgtatattagagcagatttgtatattagtaaacaaaatattcttaaataatattaatttagaaagctagaacttatcaaatctaagggtgactcaaattggattcactagtatgcagtggcggacccagaatttaaagtgagggggcgtaaataaatttaaaaagaaaattta

SEQ ID NO: 25336 - DNA, 2230 bp, Cannabis sativa
  modified_base (1415)..(1432): a, c, t, g, unknown or other
ttatgaataatttttcaggatttaaggttacaaatgctgggtgttgtggagtaggaagaaataatggtcaaattacatgtttacccctacaaacaccatgtcaaaacagagatgagtacttattttgggatgcatttcacccaactgaggctggaaatgttgttgttggaagaagatcttactctgctcaacgtgcttctgatgcttacccaattgatattaaaaccctagctcaactctaatcatcaaatatatatacatatctcatgattatatatatatatatatcatgatatgtgatgaatgagttctagtactactataccatactactactactactactaattaatacataaatttatgttttgttgtgatatctagctcaaatttgttgcaattatatatataaatttggctttaaatattacaagggtatagtggtaattttgtttgcagttggttttgttgtatcttatgtcaattatttagaatccttcatatccaaaagttggtttgtgggaaaaaaacaaatatttttatatattataataatgtgttcatgaatttgaattattgttaattttctcttttcaataataataataataataataatattgatatttttgtaatagaaatatatatgtggtttatttttgtaatagaaagatatatgtggttgttattaagttaaaatatagctatgtaccatttcagtctcatcagtactgattttatatttgaatgagttgtgtttttgttttattttgtgtctttttgtgtgtgttttttaatacttttagagaaaaaaataggactttttttttatatactttaaaataatatttttttttgtatttttatagaaatctacatatagcaaccaataaaataatttaaatcgtaactaaaattaacatagcaatctaaagatttaaactgtaaatttaaaaagaaaaagttaaaaataatatataaggtaatttttaaaaaaaaattgaggttaaattctaccatattcaaaatttacgcactaaaatagttttgagtattgtttttcactttaacaattttgaatgaatttggaataatttactttatatgtaagaagttattagtagtttatattttataataattattaaattaaaatttgtaatatttaatatatataattatacaatattatgatattttgtgatagcgctaaaatacttgtacatttctcatagttaaaataataataaaaaggtaggagatttaagtatatatttaaaagtaacttacaatatagatacttaaatttaatttttgattgtagagatggatactcaagttacatttttagaattttcgtaagtatcttaccgttaaatcattattcacatattattttttttattggtatattnnnnnnnnnnnnnnnnnnaaaaataaaaatttaataatctggaccaatcagtagggactgccacgtaaccattgattgaacacttaacggttaagtacctacagaaattttaaaaatataatttaggtattactatcgtcgaaaattaaattttgatatttatttgtaaccgaaaattaaatttagatatttataccgtaaataacactatattaattaaatttaagtttatataaatatgtttaattgattaaacaaatttagataataagaactttttaaaaaatagattagataagtagattttcttgtttagaagaatatatatatatatatttatatatatgagataatcatatgtattataaactaatgaataattagatttatttactttacaattatttcaattcaaaatggccgcgactcgaaatctgtacgagagttagtgggtttgggtttgctttaaatgatcagtttgattgtgttcatgttgactcgtctaacttgtttaataaatgggttgtgtttggattgacacggctaacacgaaactgactcgttaatgacctatttaaagttattttagtaatttataacaggtcataaatagattataaacgtgatgaatatttcataaacgtattattaattgatgtatttaaacaaaatatacttataagtgaattacacggattgtacgtcatgttcgaatcaagcatatactatcatatatatataagtttcaatacaacacgaattcaattctaacccgtgtacacgaaatatcagccctactataaattatgggtacca

SEQ ID NO: 25337 - DNA, 2639 bp, Cannabis sativa
tgcagcgtacccttggtcgggtctctagggcttgcacactcattattgtcgctacttgtacctccttgttctctgtcttcaaaaggcgtggtggtacactcttctcttgcaagccttgtcctttgattcttttcgaatgtcattcttgtcgttatgcattcgtagtctcccttatcctcgcagctctttcacaaaacacactccccccatgcataccgtggctcgcatgtgagccccccacatccttgcattgtgagaagccctcgtctccacccctatggctcatgtaagcccctcctatgggctcgcatgcgagtcctcatcttctcttaccatgccaatcatcattacctcgactcaccccatgactcacactccctcttctcccatattcgcgggtggcacatctccaccccaagggcttgcatgtgacccccccatgggctcatccacgagccttcgcaccacgctcaaacatttgatcactaagggactagacatctaatagcatgggtgctccatcgcgggtcaaacagatgctccaccacttgcataaaggtttcatgactcacccaaatgcccctagctcatccaacagcccatgggctcacacaacatcccatgggctcgcaaaatagccatggggtcgcacaacagctcatgggcttgcacaatagccatgggctcgcataccaagttgtcacaattctgtagtcttagtattttcgccataactctcttgatatatatcaaaagtggatgattcaagatgtattggaaagataaggaagagacctttgaatctcatgcttattgaaagatccaattctgaacatatcactatgaaaatcttccaaaaattgtaactagtaagcttatcttactaactttactcatgagttattacggggctgaccttcgagttgcatggatataccccgagacttccaagtatggatatccgagataatgatccttcggccatatgcatgcacccggtcattctgtgaccgactcttacaattgatatccctcaacttcttggactgatcgttgactaatctcaaaaatcaactctgttggggttaacactactaaacagcctctaagtcatgcaggcatactttggcttggcaaagaaaatttggacccttacttgtcaatgccataagaagatagccgggattaaagaccacctgttcgatcacataatccatgataaaaaggcaacaatgccaaataggggtgcacagaatacgggccgagccgaccaaaccggccaacccaacccattttttgtgttaaaggattatgtaaaatatgggccgtacttcattgctttgaaatatgatgggccgtttatatatggtttggttatgtgttttgaaaatttaagtctacacaacccaacccagcgcgttctcttatattacttctgtgtatatattatatatatataattaacttttattttatatgctgaattaatgagtcaaatagtcaatcacgaattactgggcaaaagaaaaattatagaaacaatttttatttattaacaatatcatatctactcatcaattatcattgactttagatattacaatttgagagacaatttgaaaagtactatttataaaatacatttatttgtattaatttattaaagaaattttataattatacatattgtactgatataattaaccctaaagtataagactatatatgagtataaaattatacagtagtgatattgtgatactaacatcacaacagctttatcaacactcaaaaatccaaaccacaaaatcaatctataacatgtattagtattctactactacaaagttttgtgagaattaatcactaccacaactattttattatttcttagcactatttacatatttacatatttttttattaaatatttacatattcttttatgtacaggttgatgatctattttctctgaagttaatgctagttagagttttgacaccgacgttcgacaatacgacagtgatggtatgtaatatatgtatgctttatatatattgatactcagaatttaatgtatatataaatataaataaatatatttgtgtgtatgtatcattttatgtttgtagtacctcgataatcgataaatgtgtatacttatatttttatatgcacaaatatgtttatatatacttttataatactgtatatgaatactattatttatatataactattatttgctttatgtatatatatatatatattatattttactaaattaaatggttttattgtggaaaattaatatatatctataaacctttataaaaaggagaatagttctttgggcttttcataggctatttacaaaaataacccttcttaattatttatttagctataacttaaacaacacttgttaactattcaatgacaagtgtggtaaggtgttacatacgtgggcttttcataacccatattaattatttatttacttataatttttaatgagataacgcctgtcacacctgtcaactattcaatgacaggtgtggtaagttaagttgcatgtgtgttttttttttttttttgttgaattgaaagaactcagttgaagatccttttgatatcag

SEQ ID NO: 25338 - DNA, 911 bp, Cannabis sativa
gtctcaaagttgaaagcattgaaggttttcttcagaaaattcaatagagatcactactctgatattcaggcagcagagagaaaggctaagcaagatttagacgacattcaacggctccttcacaaaaatctacttgatgtcaatctgcaaaacaggagcaagaagcaagagatttatatgtgaaaatccagaaagattactgctctttcttatagcagaaatctaggataagttggctaaaggaaggggatgaaaactcagctctttttcactcaagcgtccaagaaagaaggatctgtaatagcattttgtcaatctgtgatactgcaggaagaagaatggaggaacctagtgagattacaaatgctttcttaatgttttatcagaaactgttggtatatcaaattgaaaatagaagagttgtagccaccaaattaatcacacaaggtgcttgtgtaacagaacaacacactcagattttgatggctccttataccttggatgaagtcaaagaagctgtcttcagtattcctacaacaaaggctccagggccaaacggttacaatagttcattttatcaagacaactgggaattgatcaaaaatgatatcttcgaagcagtcacttcctttttacatacaagccagttgctcaaggaattaaactcaacaatcattacacttgtgcccaaaagcaaatgcccaaatattgtaagtgactatagacctatagcttgttgcaatgtattatacaaagtagctactaaaatgatttgtagtcgattgaagctgattcttccacatattgtagctcaaaaccaaggtggtcaaataaaagggcactatatttctcacaacattatgatttgtcaagatttaatcaaacattatgggaggaagaatgcaaaggct

SEQ ID NO: 25339 - DNA, 1367 bp, Cannabis sativa
atctgcagtactgttcaaaggtggctttccacagcccccggtgcaccaacaacacactggtaccaattacgttgtgttctttctcagcctctttatgtcatggctggacaagaaattaccggacaactccgaatggttgcccataatgctcaaagttacacattatatttgacgttgtcaggtagttttttcttcataaccaaagctaacttctctgttgtttgcttttctttcatctagtgttgtggtttactgacaatctatgctctaacccaacagccaaaatgtggggccccggtgccgatcaaggaggagtaattcaaacctcatcttgcaaacttgatctgaaagaaccttactacagaatgtctcaaccacaagcttacacattggctcaagatcagcaaccgcatcagcttatacaaacacaggtattgaacttaaacaatttgattgattcttattcatagttttcactgaactcaaatctcatggtttattcactgtaggatatacctattcagtcacaggaattagatgacactgatttaatggtacaaccatctccagcgtcagttgcacagcttaacacattgaatgtttaagaagttttactttttcttcttcaagttttagagatattcgatgaattgtatggccatgttggcatttatgtttgtaacatagacctgttttttttcttcttttgttcctattatttatctagtgctgagattcattggtctctaccttacccgttgttgttccggtatgtttagatcatttttgagtggttgtgcaacatatcttacacatcctctatacaacactattttgatttaactagcccctcaataaagttacattgctgatgaagtttttttcttttttttttttggcaaagttgggaacttcattgaaaccaaaagaaggctaccacagaggggtagctctccaacattaaagataccagtagacttaaaagaatgcgatcacttagtgattgatcaacattaagagtatctctactcattaaatttagtgttacactattatcaaatttagtgtcaaaaagtattacaactttaattacaatactaaaaattatattaaaaaaaacatttcacattaatattatattaattaattaaaatcatcacaatgcacccctctaaataaaagagtgaggtgtaactgcttgaattttattttcggcgtgtgaaatatttttgattttttaaaattttatagaatgtcttaaataattataatgtacacgattatgaaaaaaaataaactaaaagtctcttgaatgtcgaaataagtaggagtacatcacatacattatttttggcgtgttaattttt

SEQ ID NO: 25340 - DNA, 2163 bp, Cannabis sativa
agaaggaagagaaaactatgcaagctgaaatcaactgaagaagtacacgaacggccgatgcgcataccgacgggcaaattagttgaacaagttgatgaaaggaggactcgtattcaatcaaagttagggtctttggaagaagctgtacaaagaaatactaaagatatgccaaccagaaaaaggtcatgccgtagaatggttaaaaggaaggactgttctaaagacgaaacaccaatagctcccataggctcctctgctgttggtactaggaagtctcttagaaaatcatctgtaaataaaataccaaaatctcctcctacagcctctactgaaaaaaagtccagaaaacataatgaggcctccactattacaccagcagccaaaccccctagagaagaagcaccaatagctcccataggctcctctgcggttgttactaggaagtctcttagaaaatcgtttgtagataaaatatcaccacctcctcctgtagttcctactgagaaagtgtcaagaaaacccaacaaggcctcaactagtccaatattagttagaccagctgccaagccttctacaggagaaacatcaagagctcccataggctcgtcagcggtttatactaggaagtctattagaaaatcatctgtagataaaataccaacacctcctcctatagttcctactcaaaaggtgtccagaaaatccaatggggcctcaagtagtccaatattagttacaccggaagccaagactaagggagttctcaaaagaatgagaagagagagactttcagaagcaagcccttcaaagaaacaggggtcaaacacaccaccacttgaatctcctgagaaatcacaaaaagcccctaaaaaggcaaatcctaaccctgcaatatcaaaaagaaaatcacatcgatcacagtcattggaagtagagaatcttgaaaacataacaataggtgatgatgacttggtggtgggcaaagaagaacctaaagaagttgtgacccatattaaagaatctacataaaggaatacaagaggaccaactaaattgaagattttagcaatagacattgacaatcgtttcgaagtgaagtttaattcacggggtcaaccaattggtgaagcatcagtatctttgtcttcattcttaggaccattggtaagagaatttgtaccagtaaccatatgtgattggagaaaggttgctaaagaattgaaagatattttatggaactatgttacggtatgtaatttgatattgtttgtaatttattttttgaccacgaacttgattaagtttacttatgcagtattagcattgcatattttcattttaaccaagcaagatataagatcagcgaaaattggcaaaaacgttatataatgagaagtatggcagatctttggagagcttcaaaatcaagattggttgctaaacttcaagaggcaccaaatgaagaagtgagattaactttgcgacctaagaacatcaagtctgaagatgaatggaagacttttgttagggagaaaaccagttctgaattttgggtaattaatgctaattttactttcatttttttttatttatgattaacaacagtttatacttccacatttttttttggtttatatcatcatatgattaatcatttattgctataggctaaaactgaaaaaatcagagagagacagaagaatcaagttcttcacacttgtagtcgtaaaggatatgcacgattgattgatgaattggtacaatcaattttattctccaattatttttcattaaatatgttagttccattctggtttatattcttttcacccttgatagacaaacgatagtgcaagcaaagaagttccttcaagggttgatgtttggacgaaggcacataagaagaaaaatggagaacctgtaaattcagatgctgttaaaactttcgtaattgtcctttttatttggattttaaatttccataggtataaattaacttgcacctttattttatttaggagtttgtggaagaacatagaaaagatacaactgtgtcttcttcgactacaaatgtcaatgaggatattctttcaaaggtgcttggtcccgaaaagagcagttgtgtgagagcttatggaagaagagttgctcaaacaaagttaa

SEQ ID NO: 25341 - DNA, 2710 bp, Cannabis sativa
  modified_base (26)..(34): a, c, t, g, unknown or other
acaatctcaatagttcagggggaatnnnnnnnnnccaaaaaagttcagggagcacgatttagtacatgtcaaagttcgggaggaagaattactaattagcctgttttatttatcaaaatatcttatacacacattacatgcattaataatgtcatttgtttagattgtaattcaaccaattttctctctcttttctaattattttctattttattttcaatttcaatttttcattcacgattgctgaaaaagtttctccccgcgatcaaaacctcattttcatttcaaagaactcctcccttccatcatctccaacttccattttagcgattgcccacgtttttttcttttcttttttcttctataaactgctatatagatgattgtcactcggtcttcatcttcaccatctccattgttgaaaaacctgaaaaaatgagtcttaaatctttgtccaacaaagctaaaggaaaataccccattattaaagatgatgattctaatttcgctccacctgtaacgaaacgtgatcgtccccctcgtaagaaggaatccaagagtaatgaggctgaaaaaagttctttccctgaaatcaagaaggggaagaagcaagcatatgaaattcttaaggtttcaatttggttttattttcattttgccctaacttagaaatattatattgttctgagttgtgtttattcattcgattttattttagggttcatattttttagttgttttgatgttttattagtgatattattactgtctagaatatttattagatttaggttgttttttggttttcggaacaagagggtcactattctagatcttggttccgatgttaaagctccactaagagtagtgaagactgaagattgctagtcttcctggccaagacaacgaataagttttgtttgtgttgttgtatttttattgttaatgtgttgtgttatagttattttaactattgtgtttactattttattacacggtggttgtggtacctttatttttgcatttgccgagttcttcatacatggaaaagatgttccactgggttttgatattgaagcttatcgcacgaggcttgtcgtgcttttgtttgcatatggttaaaggaaaaatgatgaaaatattgatagtgaggagataagcctaagaagtctacaaaagatgttaaagggaagaataagggtctagtgctagggaactgattaatgaagcctattgaactttattgttcttttttattgtttgttgtgtatatattaaatgttaagacttggttattgatgttatggttctattactgttttttttagtttaagtagtggatatttgattgtatctctttttgagacaatgctttattttggatcttaatgtttatgttttcttgcaagtttcttgttcatgtcgatatatgaaatgttttggctcaattgtggaaaaattgttattcaagatgtcttattattatacttaggaaagtagttggataattcaattgaatctttttaaacctgtgtgctatgtgtaaaatcttatatacaactattattcaaaggttgggcaattgttgaattctcagcttgctagtcagcgtgacactaaaagttttatgaacttctaattaacgtgtcacatatattagatttggcaaacaactttaacacaaatattttgcaacttttaaaaaatcaatatcgtaatagcaatgtattaaagaatttaaataaatatcctctcactatatacaattttcattcaacggttgtgcaactattgaatattcaacagttgctctttgttcttgttgttttctagttgctctaccatttcttctgccaccagttttgcatagttaatgaagtcaaacattattttcccatcttccaacactattctttccatgttttattgttgtgtagttgattttctgttggtggtgcatttccaatcattattgttgttgtatttctttgtgtaactaatgagctgctcattttaaagaatgatggattattggttgttgttgtgttattgaccacgttcacacacaataaataccttgtgaagtcggattctttcagttttagttgtatgtagaagaataggcttggattctcatttatcctcaacggttggtatccttctttcacttgatatttcattttcagttgagagtttttggttgcatttcagcacctgttttaacttgtgtactagttcttcatatttgcaatctattgagataaattggccactagctttataacttacataattcattccttgatcaaacatcccattataaaatatgagaaatagaattgtgtcattttcctagcaattgaaaattcaagcatggtaagtcaactatgaataaactgtctgaaaactgtaatgcaacaattatatttgttgttaggcatctaatataaaaccttaaaataattaataacacccctatgtgatacaaacacacttaccataatcgattggtatgcttagtcaactgggactcatatcatccctctcttttcttggaggaattattctggctctgagacttgttgttccttttttcttgggaattactcactcccatcctggaaaatttacgatgataccatcaatcttgctggtgacgaggatgattgggttctcccagaacacatcaagaatatgaaagttggggtac

SEQ ID NO: 25342 - DNA, 1766 bp, Cannabis sativa
tccagacaaagaaggaaatttaatatcatatttgttgtgggttccctactcttagttgagtagttgataatatcaatatcaaatgttacaaatatgatgaccatgttacaaaatatagactaaactcactcttgggggcttcacaatccttctgcttccatatagaactggtggttgaatatgaagacttagtttccggaactattagtgtatcctgttccacaatttgcagcaacatcttcaacaatggaaggagccaaaaaaatcttgtgcaattgagatgtctagcttcctagctcatatataacaataatatgttatcatcaatatttcttctggttaaaaaaaaattaatatctcataaatatacctgttgatagaatccacttcatcaactgcctgaataatgctggtgacttcctcaatcacaactccattctcatggcttctggctacagatattgaatcctgataatataggaacacacaataatgttttcgttttaaatcagcaaaaaataatattttcgttttgctatagttattatatatgaaatttaaatttttataaatgagatgaaaagaaaaaaaaaagggggacaagaaattttttaaagtctacccaaaaactaaaaggtacaaattcctaagagccaaaaagaaaagcatccgtaaaaatcttttatccaccaaaatcaacaagctcagaataatactttttttggggttaagaaacactattaagaaaaatgaatcctgacatatttctatggcattaatttaatttcaacattgcttgatatactaccccgtcaaatataaagctaaaaaaatgcaaaattgaaggataaagagtatatagctcacactcaatgagaaacggcatcaaaacaagaaaaaatgaacaattagctcaaattaattaaacacctgatctgtacttagtttggcgccattactttgttgcaaccacccatcaatgataagcttgaaagcttcatcacgaaagagaaatgacccgagaaatactgtcaattaaagaattatgcaaaccatcaaacctgacactaaaatgaaagagcatgacaaatagaggctgtatcagggccaatacaaaaattaacataaaagcactacctttatgcttccaacaaaaatttctattgcattagggaagataatgtctttgatctttgtacacttgtcacttcattgaatgggatcaatttctgaagcacgacccacaagattcccaataattgaaaaccaagtttataacgtattgcatgtatagagataaacaatgacagtaaaaatgccaaaccattataaggtaccaacaaagtcaatacataaagcactttaaaagagtttacgtggctgttggcaatgcaaaagctatatacttaggcagggcagcaaatgtagaaaacctttttctatgcagttatactatctggggttctctgtgcaaacatagtactaaatctgcttgacgagattattggagtcctcagaatttataatatcttcattgccagcagttaagtcagctaggcttgcagagttcttcacccatccaaaagatatcatgtgctccaatacctctgcagctttatccatatgtccagccctttggagaccagaagctatcatgctacatgcagaaagacttagactaagccctgcttctccaatttcattaaggaagttcagtgcttgtaaaaactcttctgcttcacagagggtttgtattagagcatgac

SEQ ID NO: 25343 - DNA, 2269 bp, Cannabis sativa
tttttttttttttaatataatatatttttcaaagagtttttataagaacaatacaaaaataagaacattacataaaaatatggttaattattcctgaacttttttagtcattaaaaatagttcaagatacatgatttggtacatgtaacgttcgagaaaaaaaatcttaattagcctaaaaatatttaaacaacttaaaaaatatatataaataaccataaattaataaaagtattaaataaaaatacataatatacattttttttttaaataaaatcataaaagtatttaaactttatataatttatattttttttttattatttttgtgtatttgtaatataactatttttaaaattcaataggagggtagttgacaactctttttctacgtgaaagcttccttatttactttggatctgcataaaattgaccattatacatctctttcattttctctttgaaagaaaagtaacaaacaaatgggacatgttaattattatctatttatttgttgaaaaagaaagccatgccattcttgacatcacatttgagttaggccttctccaacagagccccatatttgcttgcagatgctgttacttttgcccttcaattgaagcacaatctgtgccccatatatatgtggtcattgtcgtgtagatacagtacataatataatgaattcgtgtattattatccataatgtgataatagaagatcaacgtgacattgatacatcaaattttagaatgagttaaagtgtcaagttcaaaagttgagagggtgggtgatgataatgttcaatttcaagaattttttgttcgacataaaaaaattaagagtaaatgataaatgagatttatactaacttattaagatagtttagaacacattttagtttctcttatgtcaatttggttctgttttatgctttttttttaaaaaaaaacatatttattgatgctcaaaattagctcaataacaatttggtattataaaataaaattctttacattaggttcaatctaatcgaagtacaaattctctgccagtttacacaattctctctcaatttctacaatgtttctggttcgcctgtttcctacgctcggaatgatcttgaggatgtattctgataaattttcaactagcctgatgtgagtaagaatctgtccccctttttgaatgatggggtcccctatttatacgcgtgaatgactgttagtctttcactgtataatgttttgattggtccacgtgaattagcttgtctttgtttcctcgcgcgctttttctccttattcctatttactaaaatcctcaagctctggttctttaatttcttcaagctttgttccgtcttatttttttttggctgagttttgcttttttcgagctgttttctccttttagtgaaacaatgcgcttagcaatcctgccatattataatatcaattctgatttgttactaatgaaggagttacctttttaaccccaagatcttttttattagctacaattaccgctcggttctacaatttttaagctcgtgactatttcaatttgagctctgatgtcatgaaatcgattacccaaaataattcccacgtgtcattaataaggcataattgatttaatagagtaatcatttcgaatttttgagaaactgtcactgccttttttgtttatccttatattttcattttattcttaatttaaattcaactatttattcaacgaaaataataaaaaagttcaagtaacttctttaatattttcttttctttgagtctctagcctaatttttccctcagatttctattctttgctttggcgattctattgctctcaacttttcccttcttctttttcttttatttgcattttgcagtaatgacttcgagaaagagaggtcctctcttgtggttgatcctaaatatttgtccgagtatgaattagcttttaatgacatttgtacccgataccttgttctagaagggtgactttttgcatgttatcgaatgatgaattggacaagagcttggaagagcttcaaatggttaatggcgagactttaatgagcaggaagcacatgggatggaactcttgtgattccttattgtcaactctgattcctatattgtaacctttagagagattcttcagaacccatttctatagtgatctgattagtattatctcttagtatcaatactgttgtgtccgacaacaacctcagcaagcaatcaaccaataccagcaaaac

SEQ ID NO: 25344 - DNA, 1312 bp, Cannabis sativa
cgctcttccgatcttagggcataaaacccaacataaactttaatctctaaataataaataaacataaaaaagaaataaactacttagtacaataaatgacttggtaaaaaaaaaaaaaaatgttaaacaacctacattaacaaaaaataaacaaaaaagtatcataacatgtataatattcactagaaaactatacatagatctctaagaaaataaataaaaaaaataatatacaaacaacttagtacaccaaacaactctgtaaaaatataaatatatatatatatatataaatgttcaactagattaacaaaaatcaaacaaaatatatatgattcagtataaacaaacaaaagatactaaccttcaattttttggcaacacaatagggacttcatcacattctaaattaaaattatcatcatcttcaacaacactctttaacttcttagagcaccgatcattaggagaagcctcagatacaccactcctattagaaatgcatgccttcttatttttctaatccttatcagaatcaacaaccttcacaccagatccagtcacttttttcgaagcaatctcctctattttttctagttttttctttgaaccagagacctccggtgatggagacaattaactccttgtatgcaccatatacgaactaaaaatgcacactcagagaaaattctagaagagcatttcaaactctaaaaatttgctgaacaattaaaatgagaaaaaaataaaactaaaataagaatataaacaaaaaataaaagaaaatggaagtgatggactgatagcataatagaaaaatgaaatcgtgtttaacactcaaaccactctcaaaataattaccgtgtacacgtgtcaaaaagaattaaaaaaaaatcgctatttttaccgaattaaattagattcagtatatatgaaaataaattttaaaaaagatctcacagcatagttttctcttgaaaattttccttgtctttattaaactattttaaaattacttttatttatttcaaacaaaaaataaatatattaattttttttttcttttgaaaatggaatcatattaaacatttcggaagtcaaattaaaataatttttttatatataattttttttaaaggaaaaaaaaaacccacactggacacattattttattatggtttttttttatcacaattatttttattaatttgtatttttttttttagatattaatttgtattttacaatcatttaaaataaaattttaagagaacttgccatatatttgtttttttttttttttttttttttt

SEQ ID NO: 25345 - DNA, 2513 bp, Cannabis sativa
agcctcttcttccgtacctaaatatcatgaaaatcaaataagaagtatataagtattctaactacttactttctttgcaaaaaaaaaagtaaaaataaaaatactaactacttactaaatgttcctaagtaaagatctttgttcccagcaactcttccaatccttgcttgccatcttccatgttgatgatgtctgatgatacaaggaaaaccaatatatatttatttatattgagctatatatatctacgtgtgctacattgtaatcattgctgtaattcattttactgattagtatataccttgtaactccacgatacattgatgcacctcttgaaaaaccactgctctttctgaaaattaaaatttcaacaaaatcggaaataaaatggtgagaatcaaactattgttacaattaattaatcaacttgcgctaataaacaaatctgtactaccttctaatagaggccacaaattcttgtcttgtcatgttcttcatatcctccaactccttttcgtagttactaatctgcaaaatcatgtttaaaaagaatgaaattaaatcgatctattatcaattagataattagttagtaaaaattagtaaatgtatctcattaattacgggaaagtttgtagtagtggatgttccccagtacttgagtgcagccatatcgtaagccctagctgctttctcttctttatcatacccgcctattaatttaaatacgaaaagaaagtatcaaaaaatatatatactaagtgaaaaattaaacacagttaatggaagagatttattgtaatttacatacccagataaacttgaagagacaatgaagacaggccgagagcggaaaaagaatacaatattgacaaaaacaaatagtcagaaaaatattcatgatcttttaacaatgaaaaacaaggggtagaagaaaatatgaaaaccctaaaataacaaaattaataaggagcttttacatctattatatcaataacttttatagaattatacatatatagtttaccttgtcttcctttccttgattgcccttcccttctacaactattatcccaaagatgagcttcataccttccagtccatctatgcctgcgtttttcacaaaataaattattgagaaaaactatttatgccattatataattgtacaaaacaaacaaaagggtttcattctgcagtaataatttatagtaaagccctaatactcacctagtaacaccacgataaattgaagttctttgaccgaaagtatctaaggtccttctaggcgcagcagcagcggctgcagctgcaggttccacagcagtagaggtggtattattagtactgacattatcagtgctactggtttcacaaacacttgaacctttgctgccacttcccatcgacagtgtcagtgactgaaggttgcttggattttcttgaaagtcataggtagagctagacccatgaatattatccaaattaacactttgctgcattaagtctgctgggaccatgctgttacttgcaaaaaggtagtcagaatcactggcctggtgatgaatttcgttgaagggcatgagatgatctgtttggttttcagatttgctaacaccaagaaaatcagccaccttgggcacttgatcattgctactgctactcccgtggctattcatcagattccactctgtacatgtatataaataaattaatacccacacaaatatatgtagttgagaaaagttacattagtacaaaatgtgtacctgaagcttggttttgaaaagggttgtccatgttatcattgactaaccctagagtgaattgatgtgatggtagggaagcatgagtaggagatagaggaaaagaaagccagttgtttgtattcattgaccccatcgatctttttttttctttccttttctttcttgcactgcacaattaataatagtgatcagaaacaaatcttcgataatacacagaacttttcattacattaaaatatctattataccttaatcatgaacaaaagaaagaaatactaatgtaacagttaccttctgtattcagttgcaaattataaagcttattatttttgcagaaaggaaagaatgtatttgagagaagtgaaagtagaaagaggagtgtgaaaagagaaaacattgagaaagggacaaaggtatttatatattgtatataataaatatcagtgtgtgagagaaagagagggatacacatcataagctagctgttgttttgtaacccattttgcagaggtcaatctataggattgtctggctctatccaccgcaataataacaataataatagatattattatctttttctttgtgctaaactaatcaatggacacgagtgccttaataaaataagaatataatatataatacaaactgaagccatagtttctgtcttaatttgtactatgacaaacccacaattccaactaagaaaatccaaacaagacctctctctctctctctctcgct

SEQ ID NO: 25346 - DNA, 2243 bp, Cannabis sativa
atggatcaatcaggtacacatactcaattatcatatactactattgtgttctatgttatatacaaatagatcttgggttaattgttaatttatctaacaatagaaagaaatatgagggataaaaaaagaaagagaaagtagtttatcccaggccatcattgaaaccgattgcctattggttgtgcaagctttgagaagtaacattcatacaaattctttgtttggtgaaataataagtgattgtaagagtttacttactcaagttagaaatgtttcatttatttttgttaaacggtcagctaatgtagtcgctcatgaatttgctagagcatctatattacatcctgatcgtattttcagtatgggggatgtcccaactgatttgcttccatgtgtggtagctgaatttgaaggttaaataaagttgaatttcctttcaaaaaaaaaaaaaaaatatacacaagatttcccggaataggaaaaatgaccttttctctttaaaggaaaaaaaacataaatataataaaggaaaattctacaatgcactctttgtgtatcgatgcatccttatttattttgatatctaaaaaattacttagtctaatttttttttttatggtcgtatacattataatttaagacatctgacaaaattttgagaaattttttcaaatttctcacgtcgaaaacagtgtttaaagagtctgttctacgcgtgacttttttttattctatacgcgtgtgaaatagacggtttaaacattgatttttatattgtaaattattttaaatttctcataattttgcagtatgtattaaataactataacgtacacaaccatgaaaaaaattagactaaaaaattctgataaatactgaaaaaattaggagttgtatcagtacacccatcttgatggagtgtattaattgtagaagcaccttataataaatattaaattagcattgattaatgatagcctaatatcatcttttaactcgtcttttatagaaattgttgattggactttttgttttattaaataataatttagaccttttatttttttaaatagtacaaaatagactatgaatttaatttttatcaaattaaaacttaataataacgtgactgacatgaaagttttatgacgataatagttatatatatacttttacacctcttccgattagattgttttagattgtttatattaaaatattgacaaaaattaaatttaagatttattttatattattttaaaaaatacagagtgtgaattataacttaataaaataaaagattcaatcaataattttggaaaataatatacttctacaatacattccattaaaatgggtgtactggtacaacccctaactgtttcagtatctataagaattttttagtctaaatattttcatagtcgtgtatgttgtagttatttaagacattctgtaaaattttgagaaattcggaatactttataatatagaaatcaatgtttaaaccgtctatttcacatgcgtataaaataaaaaagtcacgcgtgcaacagacactttgaacactgtttttgacgtgttaaatttttcgaatttctcaaaattttgccaaatatcttaaataactataatgtatacgacaaaaaaaaaactaaactaagtatttttttagataccgaaataaataaaagtgcatcgatacatcaattttaaggagatgtattgtagaatttaccccatctttataacaaaaatattaaattattgataaaaaagaatatgtgtatattaaattagtgtttttttatatgttgaaaccagaattagtaaagtaatgaaataattcacatgttagccgttgagtttttatggtgataccagccacatggccttgagaaacagcataaagaagaagaacaattaagtaataatcccaaaaactcaagggtattttcgtattttcacaagccttgactttttcgaaagtaccctaccgcacaacacattaaaatattcccttctcttaaataccccaatgttctcacaccatttcatttcttcactactcaaattcctactctttctcactttccgtcactttctcgagaaaatttcaaaaaaaaaaaaaaagaaaagcaaaatgtgtccggccataggaagatgcaacaagattcgtcacattgttaggatccggcaaatgttgcagcagtggcgaagaaaggctcggatcgccgccgcac

SEQ ID NO: 25347 - DNA, 2765 bp, Cannabis sativa
aattaaggtctcttcatgatgagattcgagaaatatattaaaaaaataatggtcaaatgtaagtgttaactaatattattattattattagtttttttattcgttattttgaaatcaaaaaaaaagaaaaaaaaatagttttatgaaacaagagtttaataatttaaataaaattagtataccgttataacttcattttgaaatgtatggttaggtggggtgacaattcgtatatatgtatggtgttagtgagcattaatttcgagcacaacacatatataaatttaaacctaacttatttattaatcgtgttgaaaattaaaacttaaactaactcatttataaataagttgatcttaccctataatagagtttcaaatttttggtaacttatacatccattaatatgtttataactagtttaataagtttacaaaatttttacattttatttagtattatttttatgccttattaaactaacttaaggatattagcggcaaaacgactcaaattttacgttttgtaacacttaaccgcataaacttattttttaacggcaaaactattactgaaccccatcctcttttactctttataatttcatttaaaaatttaagttaagtaccacagtggattgctcacgtttatacaagtgaacccgtggtaaatttttagtggttcacataatattaattattaaaacaattataataaatgattcaaaaattataaaaatttaaaaattaaaaatatactaaatttatttaaaataaatcattaattattttcatggaaaaaagaaaaagaaagaaaaataaaatacaataatttttaaataattttttaaactattttttttataatattttaataattaatattatgtgtgaatcactaaaaatttgctacgtgtgtacatgtgaataattcattgtagcacttaacttaagtttttagacggaagtataaatagtaaaatgggatgggagttcaataagttttacattcaaaaaataagtttatgtggttaaatattacaaaatataaaattaaagtaattttaccgccaatattcttaatataatctatatacaataaattattataataaatataatattggttggtgtgtattttaaataaatctcctatcgttttttatttaggcatatcaacccgaaaaatgacttgtttaacaaataagttgtgttcacttgaaaataattcaaaattatgagtgtttgcggtgcgggtggtgcggtttttaactattttttctaaccaacccatacatacagtttttttaatttcccaaaccgcacccgcaccgcgacaataaaaaaccgcaaaaaccgcactgcaaaaaatagtgcggtgcggtgcgatttatgtggtttgaactatcactaaataattaaactatcacaaatatgacaaaactcgagcaacacttgtcaaaaatagcataaggcttgaaaatatatatatataaaaaaaaaaaatcaagtttcaacaatacaataattagtgggcttgagttggccttcacatatttgacctaaataaatataaaaattagtatttttataatatgcggtgcaatgcggttttgaaccgcacattaataattcaaaactgtaaacctcaccgcaccacgcgatttaggaagaattcaaaccgcgaacgcaccgtaaagaattttaaattacatttttttgctgtgcggtatggtgtggacagtttgagcggtttgatgaacacccctaattcaaactcatttaaagtaaattcaaacacgtttatatggtgtcttatatacctattttgccaccctaaatattctcaaattataataatttatggtccatacattttaccctatgtaattaaatttcagtcaatattattaattggtgtctgacatctttcagaaacgtacacaatataaaaattgaacaatgaagaaatttaaccaaaatcatttagacacacacgtttttattttttaacatatgaaaatatttattaatgtgatatgtgatgatgtaggtctcacatatgcaaacacatttttgaaaaatgaagtactttcacaaactttgaagttggttcttgaacataaaaaaatatagaaaattatatagattttatatataaaaaaaaaataagaagatctagattttttattataattttttaatcaatatttgtgtctaaaaatacatatcgatttttttttttttttacaacagtattccttataattacaataaatttttgtaaaatttcaaatagtttacaatattaaaaataaattttaaattttttgaatacgcatgcatgatagattaaaatatcaagaattttattttaatactgtaaattattcgaaaatttttaataatttacaaaaataatattgtaattataacaaatattaaaaaaaaatatttccatttgtaattaccacacttcaaaattcaaatttatatatatgtgaaataagttggttgtacccaattttttaataaaaaaacaataaataagactaacttattttatcacaccgacataatctacaactttttagggttatttattatatataatagaaagaaaaggaatgatctcagccgttcattttaatttcaaaatatctataaatagaaagaaaactttcctctaataatccatgcatgcataatatacagtatactactaaatattatctcatactcatatcatattctccaaaaacccaa

SEQ ID NO: 25348 - DNA, 3624 bp, Cannabis sativa
tctgaacttgagagaattgtcttaacagtataaaggtgaaaaaagtgaaaataattattgaacttaaatacaaacaaagtttcagcagaaatttagaccaagaggagctttacatcacaattatattttcttttggtggtcaattttctttgccaagacaactaaatgtaactttgttaacaatcagggtccgtcttaaagcacgagactatctctgtgcttaagacctactcattttaagagcctaaatataaaaataatatctttaaaaagtatatatattttttttaataatttttaaatatattatttatttttataataaaagcttaacaatttttttttacccataacctatttgaattcaggcccagctctaataacattttttatcaacttgtttacatatatataattaagagtgtaagatgtatcttcaaacacacaaaagattattcttgttaatccaaatgtaatagaatagacttttgatattgttccaagcttcccaatcgagatcttccaatcctcaaaaataataggccaggtaataaactcatactatagaccatatgaagcatagcaactgagaaagggcagagaaagtataaatgctcatccacaacaaaaagtacaaacagaacatgtaagagtagtggtaggaaaaacataagaaataagttgagaaatatacctcatatgtaaattatgaaggtgacatattcagttatagatactgatcatgtaaacattataaaataaagtctaatttaattattaattataataattaaaaagcaattgtcaagataataacattaattatataaatatattatatacaccactatacaattagatatagaaatttaattcgtgagcgggtaatacatacctaatttggtgggttattgaaaaatttggaatgggattagagcgatactattcatctcacatctgaccttaatatataattcatataatttaatttttaaatattcattcctataatcatattaaaatcattagttagatattaattatatattaatttttttcacttttggatttcaatatcttatataaattagatggaatatttactttaattttataaaataaaaaattcaaattataacttttataaaattaatggtctaaaataataacttttttcatctttaaaccagtggattgagaattggaatacattccccgctcattaccatatataatctcattattaatgtatagaaaagagaagaaagaaaatgatgaaaattaaattcaaaacaaatctgaatatttaacaaagataaacacaaattatagtattaagttattaaacaaccccacctaattaaacatgataaatttacgtataaaagatactctcactctaatatatcatagagaatataaaaataaaaattaaaacaagtaataaaataagtactcatgtaatattttttcgtaaatctaacacattttaaattaataaaaaattgctaacctagcttgtttactgctcagtaccttaaagtacctaatattaatgctgaaaataaaactctctataatgaacgagaaagcaaatgcataaagaatatcaataatactcaaaaacaaaaaccgatcaccatcaattgttatatagaacaagcgctcatactaccttttttcagggtctaaaaactatttttttttttatatatatatatatttcgcaatttgatctctctccctcgatcttgtaattaattatttcatgaaaattacatacaaaaataatattaaaaggcatcacagcgcctagcctccttattaagtgtcacaccaaatattagtaattaaatatcaaatctcatatattatcggtgttatgaaaagtgtgggcaccagttgctaatataaatattgataataagagctgatctcccacattataacccaaaaagagatctttaaatttataataacggatttttctaaaaagaaaaaaaaaaccccaaaagagatacatatacattaacatttatatataattactcaaccgtatatattctcttaaaaaccatttcaacattcaacaatggctttgcatcaaaaaaaaaaaaacattcaacaataatggcgatctatatttatctaagcaccaggagcagcatccttagctttactctgtaaataaccaccatactctctagcataatccttcacatggctagcagtatcataaatcctgctacgcgcataatccacccggtccgaaccgggcggatggagtccccggaagtacttataaacccatgcagccacggcaaccgccgccacaccgaacccgcaaaacgacaagaaggcggcggtgatagctatgagaaagcagccaatgggaacccatatgggaatggttaagatgatcaagggtgagaatagaatgagagcgaggattgtgactgtgactgttgctccggttaggaagaggaaaattgagccggaaactatgagggtgaggatgcccaggagctgggttgagtttggggcgtggatttggagtttacggagtaatgatgatggggttgttgttgtttggttttggcgatcttccatggtgagagagagagagagagagagagagagttgtgtgttgtggatgattatgaggtgtatgtatgtatgggtttgaagagaatgattttagagtggtacgtggagaggagtggagtttgggatgacatgcatacaaacacgtggaaatttcataagagaatttgttgcatgccattaaggctcccacacttgactttttctcgagaagatacgaggagaaggactcattatattaatggagaaatgttttaaggtatacatttaatgtttttttttttttttttttactgttcagatccgatttaattatatgttggaggttagattttactatctgatctaattcaattaatttcagtcatctaatcgatctaacatctattagatagttggattggatcagttcaatccattaaatgtatttcatatatatttattaatttaatttaagtttatttaatattttagacataatattttttagatcgggattagattcatttaacattttagcttcagtatgtattggattggattggattagatacattcaatttaaaaaaagagtaaaattttaatgataatttttatatatatatatctaattactcatccaaactaaattatgaaaatactaattaattcgatgagatgtattagatttttagacattcattcaacatttgatctgatttaattgaatatttaaaaatccgatcacaattaaatatcctatatttattagtcttcattagattagataatttatgcacaccctaactatatgcgtctactagttatatgatatgtttttttaaaaaaaattattgaaaaaaagttaattttagttaaaaagttatgatgtgagattatagtagataatttttagggttgttagatgtaataaattttatgtgaatcgacagagaataaaaaaaatattttaaaagaatatatatattttaacgattataaatattgagattgtaacatcctaactaacataggcgtatt

SEQ ID NO: 25349 - DNA, 1813 bp, Cannabis sativa
tccaatgcccaacccatatcaccagcaatcccactaccccaaatacaacactagtaatccacatctgatcaatttgtgtataatgctctaacacaagtaattcctcctccaaattataggaggatgatcaaagaaaataagaaatgtataggaaattataactgattaaatttttgttttacattattatatagcctaagaaaaccgttcaattattaaccatatcgtaacttaaatataaacggacataacttaatttgtaagagataagaacaatataacaaaatgtatattaattattgttgtatataactgatttattcttttgatttaataacaaaatattacattttccataattcactcacgaacttaaatgactttagtaaattaaataacttaattagccaatttattgatacaaggtttaactactaacaaattcggcaatcaatgtgaagatcacaccaatattaactattaaggtggaaattaactggggggtccaagattgagaaaatcaagcatttttggcaccattttaagtaaataagagagtgaaaatggagaaattgttatataatggctataagaaaattcatgttaattataatctcttattataagtttttattcaattttcacgcttgaaattatatgttaaaaatttttttattatttttttttaataatagtatatattatgtatagttataatatcatctttgtaaatttttaaaaattacgaataatttacagtattaaaaacagaattagtaatattttaatttaccatgcgtgaaaaaacttcaaacctaattttgacattgatcaaaaattttcaaaaacttacaaaaataatgtacgagtataatgaacaccattatgaaaaattttgatatataatttttggatacagaaattataataagagtttaacagtaacatcaattcactaaaataaacaccgacgtattaaaagaaatatttatttttattttaattatttcaaatgtaatttttgagaccctcctatctccatacacacggacgtcctacatgctaactagtgctgagaaaagaagtccaaaattggtgtatctttgctttacttcttagagaatttaatgtgaacgccttttccaaatcctaaaatgggatttcgatatatacttcctcctttaatttttgtccacctacacaagtttattaaagaaaaaataacattactaaaataaacatattaaatctgttttaaccctttgtgtaactcaagaagaaaaaaaaaatctattaaaaagcaagaaagaattaccaaagggaaaaaattgcacctaaatttagtgagcaagacatgaaaaaaagttgccatgaacaccctactatactctgctcctgcacattgtctcgttcctcctccaaaaggcatgaaattcttagatataatttcggaatcgagttcctgatttcccacaaattgtatcacaaaattacatgattagcttcttttagttttcactagtcaaaggctgcaatcaagttttatttgagaaatttaaacaatattattgaaacaaaaccttccaacgccatggattaaactcaagtggattttggaatgtgttgggactcaactgctgagcagaggtgaccagcataatggtccacccagctggaatagtaaatcctataaaaccaatgtgatcccattaatctttattataaattaaacactactacaaagctaatacatatttacattattacatgaagaaaaaaaaaggcatatcatgatcaaccaaaccttttactg

SEQ ID NO: 25350 - DNA, 3042 bp, Cannabis sativa
  modified_base (3001)..(3012): a, c, t, g, unknown or other
tatacgtgtctcacacgtagctttttgctagtatatatatatatataattatatatcaaacctttaatttaagagacattatatagcaaccactcagttaataactaattaactaatcgaacagcattgactatatatatagcgtcacacacgaagagtattttggaatctatatcatgacataattaaagtttatagtataaagcttaataatggtgttatacactggtttagctattaacttaatccaataaaattcctgcacctctctcactatagctagctagagaatcaacacaatatatatcaagccaaataacattaatcaaaagaattagcactaattgggaatgtttaaaagccatgacgttgtcacattacatctttattgcttttaatttgtagtgatttatgcaagcaacttcgatggttccattgatttttgtttaattatatactaaaaaagagaatgaccatatatactttatgcaactttcctccatcctatatcttagggcacatctttagattggttactatacatatattaatatacatatatgtttctttacattacatatacaattatttttggacctttgacttatattagaaattcgtttctaaacattggcacattgtaatgctcgattaattaatgtatgaagccaatatagtaaaaggaaataatctatcacaaaattacaacaatttaattagtgtgacttacatatatgggaaaattataactaatgtacaaaataaaaataattaaaattaaatctcaaaaccattaaaaatatcaagattaatgaaatcacaactcaagaaacagagaaataacatagatgaatacagcaattaaaaccatatacaaaataaaacaagaaaacaataaaatcaacaccaagatatatatctactacagttttgaaatacaaccgtacgtaacatctttattgattgagcaagaacaatgatacattacagtcgagatcgattttctatttggattctctcaaagtactgtttatctctcacactcttatccaaaaatcttcttcgtcttccgaagattcttcatacaaattccaaaacctaatctctctcttctttgtacctctctctctacctctcaatctttctctacgtagaagtcacttatcaaaaccaccaattgcaaaagatgagaatggtgatatttatagatcagggatatggatcttaaagtcagcggttgcatcaatttaagttgttaagtcagttacgacttaacaaagtcctcgtaatagtacctccacgtcaacttaggaaagagcttttccagatgagaggcacgcttcctagatgaacttcccaggcagacggagcgtgtcccttgaagtacgttctgaataggtacaaggccatctggagcagaatatccagaacatccttccgggatggaacgactagcctttcggaactcctttctagagaagtctagctttctaaaagactccattcagagtggacacgctagacttatagaacttctttttaggcgacatctagctttccatgagaaaacttttagagtggacaagctagacttccgaaactcctttccgaacgacatttaactttccactactcttttcggagaccttttcatttggagaaactattccacggattccacctagttcctttaaattaaaagtgatggcaatgaagaaaaaatgcatccataatggttggtgttccaagtatcttagtatgttaatttttgagattgatcaagtccaagcaatgcttgaacttgttgactgttaagaccttagtcctaacatcatcatgattattttttgacctaaccttttctaattcaactagcccttcttctatcttttctctaatccaatatagttttatatctatgtgtttgctcttttaatgataaactgggttcttacaaagatggatggatgactggctatcagagtacacaatcactcctccttttagttgttttaattcgtataaaattcctcaaagccataaattttccttaaaagtttctatggtagccataaattctgtttccgtggtggaaagagaaaccacggactgtaactggactttctagcatatacagttttgatttgtcatgagcatgtaggatatggttgatcttctagtatctctattagaaaatcagcatccacgaaccctttcaattccagtttgtcttttgctttttcaaaggccagaccataatcccatgtgcccttcaagtatcttaataaccatttgaggaccttccaatgttcaatgcctagattagacatgcactgacttaggatgtttagagcatgagctataactagtctagtgctcaccattatatatattaggtatcctaaaaccactacatagggtacattcttcatctctttcaactatttagcattggttggacactattcttttgacaggacaaactgtcctcccaagggtacgtatgtactctttgcatcttccatgttgaacttctaaataactttcttgatgtatctagattgctttaagctcagtgttccttctttcttgtttcttgaaacatcaataccaacgatctttcaccttgagaatctatttgcactccacaatcttcttgttctccgatttcggtacaactacccaattcttgtttttttggagagaatccaattccttatccatggtctggagacttgtttcaacataaaacttacctctttgtagcttcaggactcttcaattttagtcttttctaccactgctagtgcaaacaatatcaagtctgcttctataaaccttgctagaggatgaatctctctctcttgtctctatcctgggtcaaatgataaccttccagacctacctgtctgaatctttttgcaacatatgtttgttctacgttattgtaacgtttctgcttcaagcctccattgtgtccttacacccacagaatgaatgnnnnnnnnnnnngagtacgccactctggctgctacctggatt

SEQ ID NO: 25351 - DNA, 2230 bp, Cannabis sativa
  modified_base (2182)..(2201): a, c, t, g, unknown or other
ttttaaaatctcataataagtgtaattttctctttcgttataggaagaagtaatatgtccatctctttttgacaccaaaatatagagctaaaacatttggctggttgggatgtgtcaaaagttgactactagtgtaaaatattttgtcaataccttagtataactaaaaattagtaattggagtgaggtttgtgacatatagttgccatcaaacacaaatatattgctgcaaattagcatatctgtgtagatagttgtcgataagaatgccataaatataaggtttctgatagttgtccaattagcatcatttatagagtgtatacatattttgatccctgttttatttaaatacacgtttgatattctgtattttcaataatacttatttggtactttatattttaaaagcatacatatttggtactttaaatttaaaattttttgataaaattttatcaatacaatcaaactgtcttcaattttataaattttggattcaaatttaattatttaattacatataactgagaactgtttggtaaaactaataaaactatattaattaaattttattttagggtaccaaatatgtacaattttaaaattaaaggtaccaaataaatattattgaaaatagaaggtaccaaatgtgttttcaaagaaaagactatgtactaaatgactatactcccatatttatattggaaaatcaagactattatgtaacgtcaactcaagcacaatatttaatctacaatctataaaacatatatccacatgccttaaaaaaaagaaaaagttggggcataataaatacttaagttaactctcagttgtagatagaagtttaatatttgacggtaataatacttaagttatatttctggaacttctggaagtacatgtccattaagtttcaagtcattatacaaattttattttttattggtataattaaactactttttaaataaaaaatgaccagcaatactcacttatctttcgggaatatatttatacatttattcataatcatggtttaaataaaaataaatcaaatttattggaaaatgtagattatgacaataaatctaatttactaattgtaaaacgtttaatttctcaaatgtatcaatagaatcatttgattatttctgctaataattcagatcaaaatctaatttttacttacaataatttttttctcaaatgatattatagagatttgcagtcgttgtggaaattctatttttcctacgattaatatcttctttaaaaggaaaagaattagtaaaacattataatttacaatcaattaaatttaatgactttgaacaattaaagattggcatgtggtcattgactttatacttaatggccaagtacttatggaagttccaaaaatataacttatgtattattaccgtcaaacattaaacttaagtatttatgctacaaattactcaaataaaataataataaaaaaaaaagctactatactatatgatccttcgagagatttggagatttattggtattgcactattctccttattttggtagatggcctcgtaaataagagattgttgttactttcaccccttgagagtcactttagtcccctctcagacagctcagcaaaaggttagttagttttgttactaactctactagacatagttatatataaacacaacttcactatcactttcatcaacaaccaacttttccaagagttcaagatacaaatataaagagataataaattaagatcattattgttagtttatgattgttagagtgagttctttaagggatgttaaagagattgtttactcttaaaataacttctctcatgtgagatgaattgtaattgagttagacttttgagttgagatccaatttgtttgtgtgttctcttctctttctcaactttgtccatgaataaatcttttttaattatttgttgattaatttagctactgtcattacattattgttttgttgaatctttgtatgttggttcttgatgaggtttaatccgcaaaaaatggtatcagagctagtgtagctcaatagattaagaattgttcaaggaaaagctcaaagattcaagacttttactagctaaatacgaattggataaattcaatgaagtaaactgttgggttttatgccnnnnnnnnnnnnnnnnnnnntataatcaaatttacttattaatatagat

SEQ ID NO: 25352 - DNA, 2289 bp, Cannabis sativa
catgaccgtcaaccatgaagggtggtcatgaccgtcaaccatgaagggtggtcatgaccgtcaaccatgaagggtgatcacgactgttagaatggaagtcagacgctcacttttacccctagcttgagtaaggtgggcgtttccaaaaaggaaaatgatggactaacaccttcgtaagtagaatgaacaatcattatgtacccacacgccaagttagtctaaggggtagatgaaactaccccaaccatagacataaaggtccactcaaaggtagatggtgacatccacataacactataactactgacaacatacaagggatcttgggggtcacccaagatgacgatggtcgccctcctcaagttgggttttaggggtgtcgcccccaagtatgggcttcatccccaaaggtggtcaacgaccgtgtcacacccttaggagacccttgtcgtcagtgactatttcaaattttcaaatcctatgaaaggctcaaagacagttgtcaacccacaaaaatagcaaaatattatcaaaaaatcagacttcaactgtaatattctggaaagtactattgtatttaataaaacatattttattaaatatgtacttattccggtaatgacgtaattatgatcttacttaggttaattagtgtaaatttattaaacgattaaataaattgtaatttattaattacggagaatatattggattatgagggtatcgcagatacgatttttgaagtaaaatgttttcgggctcggcagcagtggaaactcgacggggtagtgagaaatctcatagcaattaagttgtgttgtattggaattatgttaggttaggttaaatgttcaggagtggttgacatcgggaaaactagtaaatgaccattatacccctaggttatgttatagcttaggtttctaaagaggggtagattagtcattttgctagattaggtgttttgtcttatttgattttgggctgatttttattattattaaagtttaaattttttaaaaaaaaaataaagggaagtttatgtgggatttaggaggataatgatcaaacttaggaataacttggtgtagctcttcctcttccatcttttttgaccttagaaggaaccaagaaggcagcttgctcatcttaatttagactagaatctagctaagaaactaccctagttgctgtccttattggttgaggtaagttcttgatgctttcttctttgattttcttaagttaggattagttttgggttagggtattaggaatttggggttgaaatgatatgttgaggtaggattatgtttataggtgtgttttagagtttgggtgagtttagattaagtggtttagtggctgcttactttaatttgacttagaagatgatttttgagtttaatttcatttcactatgcaatttggagtttatgaaagaattgttttaaattaatgcttgagatacattgtatttatggttttgaagtgtgctgggctgtttgaacaagtcgttggtggtttggttgggttttgatgcaaaaactcgagtttttcttttctagaaactcagaaatcatttaaccggtttcaccagcattatgaaaccggtcaactggttttgccagcaggggaaaactctagtattagcctcaaaattggttttgatttggggtgtctctcaaagcttatattagggtattttagtgatatttaaattgttctaaaccagtaggaagtttgatgctcggtttcggagattagggtttggtttcaaagattggataagttatttatcaagtttttattgtcgtgacataggacccgggatcatcgagcgtaattccactcaggtcggcccgtacacctgattcatagattgaggtaagaaaagtgttatacatcacttagggttaagtgattaacaattgtatggttgtagtctcgattatgatcgagagcctgaataatgtgtgctaagcctcggttatgatcaagggatggaaacggtcaatactgttatgagtaattactcctgaaactgtggataggtttcttacttatcgtttgctttatcgggcaatgatagtgacatatacaaatcggggttaacgagtggtaagggtactttataaagtaccaagcttgtgtttacgatattgtgtgaatgtttaagcatgttgatatgaaattaaataaatgacagttatattgattattaatttattcacttttcttgctgagtctttgtgagtcacgggtgctaaatggtgcaggtaaagggaa

SEQ ID NO: 25353 - DNA, 3040 bp, Cannabis sativa
ttatattttacttttataaattattgttttatatgtcctagaataatatcgatgttttatatgctatgtttaatttaaatttatatagattaataatagttatgttttaaatttttttttttgacaaattattattaagtgttatttttttattaatatattttaattaattattaaaataaaaaaattaattaaaagttgtaattatttaaatgtaaatttaatatatttaatatttatgcggcatattattttttaatattttaacttattttttagacagtaaatagattttttttttttttttgaaatggacattgagatagattgacacataagaaattatgtttgggaaaataaaagaaattataataatgtattttgagtaggatattatatttaataaccactaaagttttaattaaatagttagggattagaattaagatagagaggaatgataatgtgacagctgtgagttggagttttgtatgacggtggtgatgatagtgaatagaagaccaactataaaatattatttatgagtggaatacggttggaaatgaggtccattttcacaaaattattattaacatcttatgttttaaaataattgtgtacttaataattaattaggtagctaagatagtaattacaagtgaggggaattatactattttaaaatataatatatatttaaatgtcaaattactagtaattgtatatgtattttatttttggtgtttagtaaataaattagtaattacataatttaataatattaagtatttaaaaatagtgttgtgggtgatttaatcggtcaggaatgatatggtttggcactagcaaagaaagagtgcgttggatgttgagtttactgattttagttttggttaatgggttaaagcttaaggtagagaaaatattcttctgttgcgtccgctagcggcaggtgacgaaaaagagttttggacgaaaccagtttcaggcatcaaaataaacatcgatgtgactatatttgaagaagaaaggaagtttgtattggctttatcgtttgggacatggctgggaagttggtagtagctcaagctcagtgtaaagtaaggagggtagaattggtgttagctgaagtcttggttgttaaagagactttgagttggctaaaatcgggtaaatattcctcaaccacggtaagaaccgatagcttggtggtggtggagtctatacgaagctctttgtcgataggctctccgtttgggttgattattgaggattgcaaggggttattgcgtttacttcataatgtttctttattttttgttaagtaatctacaaattgagctggacattttgccaaaaactctcgttagttagttgatcgtatgttgacaaagaattgtgatcctttagatttattgtctattcttttgagtgattgcttcgtttaatgaaggtgaatttatttaaaaaaaattatctaaaaaatggtaatattgtataattacacagtataattacactcaattctcatgagatcgtcaacattagagagtacaattgaaactccttaattacctcaaactacatagttacggtgtaattacatgcttgaacaaacacggaaaacctcgtaattattctgaatacactcaactccaattacacaataacttttcaaacgcgccctagatatgaggtggtaattacttatgaaatcacaatatcttgtttgacaaaatagttagtaacactcaattctcacggggtatgagaattgaagtgtaattaaggcctctcaattacctctaattacacagttacgtagtcagataaacatacaaaattgtgtacttacttttaattacacctgattccaattctctctcggctttccaaacgtccttaagttgttgctagtcattcttctgcatgaaactcatttggggagaaacacttaagaatgcaacataaatcctgaataaagtatcaagtagagtattagttaaaactctttgtgaactatgattgtggttagactagtagtctaacataagaattgttactaatatttcgagcagtaatatagtcatatcacgtgtaaggaggctggaaaacgaatcagctcgaatagtgaagaaatgaatatgttcaataatttgtctcaaaaaaaacagatgatagacgtatctaagtctctccttaagccattaaggataaattatgaatactaactaccatttggtaagaccaacgagatgaacaaccaacagaaaataagtccatctcaggatacataaagtaaaggaaaaataaaataagtatagaatatataggagcaagtcgctaaaaatggtagataataaattttttaagagcttgcaacttattgatccatatactcgtgagtatattgaaagactaagagatatgagtaaaatgctattcagctcaagatattcatgaagaacacgagaagataagatctcgcgaagcatgcttagtcagtcctaacatttatggaaagacgcgagaagcattttggatatgatatctcagtaaaaaaaaattgccttcaagataagcacaaaaaatcgtttgtctgtatatgctgcgaggcatagaaacttagtcaacataacaattttgaataaagacaaaatcaattatagcagttatctatttattccatgtcttgtaaatatgaaacatgaaaattttgcatatttcatgaacgattatgaggataagatcaaagagaaataactatcatccccaaatacttataaataggggaagaattcccaaattggaggatgaccaaattaagaatcttaagagaagataaaagaatattgtattattaacactctgtaaactcatcaaatcacaagaataagatagactcgtggtatgatagtcagtaatcccgtgatccgtaaggaaaaatactgggtaagcttgaaatcccacattgcctgggaaatatcaagtgtgatgattttgagattgtgcaggcatgagactacacagttaaagaggg

SEQ ID NO: 25354 - DNA, 2617 bp, Cannabis sativa
gttcaccagagcactcatcttgacgtacgtcctgaccctcatctgatggaccaatcaggtaacctattgtctccggggcctctccgttcactatgactgtttcacccacatctattttggcacactcaggatttttcacaagagttacttgcccaaatgggactcccacagggatctcatcactctcaagatcctcaatcaaacaatctggcaaacaccttttactattctctattgggtcatccatgttttcgatagcatgagaaccccactacatagaagagtctaaaaccttcgactcaaagctctacatggactactaacgaaaactcaatacttgaacttgggcatattttgctccagccaacctaaacaagttaacaaaagataaagaccaatcaacccccatggctaactatcatgcatagatataactcaattcaaaaaacataagtggactccaataatcaattcacaagcaaaaattatctatggtcaattctcactcccacaagcaaaaaatatcgacagtcaattctcactcccacaagcaaaaaatatttacgatcaattctcactccacaagcaaaaaatatttacgaccaattttcactcccacaagcaaaaaatatctacagtcagttctcactcccacaagcaaaaaaacatctatggttaattctcattcccacaagcaaaaaacatccatggtcaattctcactcccacaagcaaaaaatatctacggtcaattctcattcccacaagcaaaaatcatctccagtcaactttacaagtaagatatagctagcattcaatttttaaatatcacctacaattaatttctactagcactcaactcactaaaatacaagctatcaatttaccaaaattatttatgttcaaatacaaggcctacaaataggcccaagagatcattacaaaatcaagttggatcaaaaaatttgaactttttccaagtcaaagaacaattcaaaaatccaacttgggacaaaccttaaaccctcgagcattctagacatcaacacaatgattcaaacaatcaagtggaacctctcaaatgtcaaacctttaataaaatatgtgtaagcatatacacataactaattaagtttgtgtttatttatatatatatatatatataaatatatatatttaatgagcagagatgcaaggaaaatgatattccttcctaaaaatcacttatctagaaaattctctctatatatatactgattgttctcaggaaccaaaacaaaaaaaaaaaaaaaacagagagcaagtttaatctttcgataggaaaaaaaaatgagtcattcttatcacttttaaacaattaaaattctagaacaaagcaagttctagtagaagagagttttttcattaaaagaaaaaggggtaaaaatgaacttacaaggagaaactgcctaagaaaagaaacagcttcgaattagtgcacccagccagcagaccagttgaagaagaacccaatcatcaaaaatggtagacgtaagtttctctaaaccctttgaatatttacgaataaagctatacctgacagaataaaattattcatatctattacaatacaatatatattgatgtaagaatgatttttcatataatatatatacataaaaaggacaaaagtcttacatatcttttcaatagtactatgtcatttcatacttttttggaaaaaaaaaaaatgaataagtaaataaaataattaaatgtgtcagccattataaatagtacgttatataaacaatcttttttttttttttttgaaaactaagtttctatagccttgagtggtattgataattgactgatattaatttgttgaacactcaattttacaatttgattgctatatctataatatattagcttcagtgttatatatatgttggacatttcacacattgactgtaacaaattgatactatatttaacacattgattgctattttttctacagtctttttataagttgagctgctacttccttcatcttcttttattcaaataattgttaatagttatttgattgatacctatgccatgagtcataaattgactccacgtatttatcaatctccttgagctcaacattaagagacaaacaatgaccgttatgagtcctatatattgattgtggcaatcaatatttcatctactttacaaatgaagacctatgtaaataccgcttagcttaaatttggaaattagcatataattagaatttaattatgaaaattagttactaattctaaattattaatttataatgatttattagaattcagaatgcattttatgtgtcatatatagaaatttcataattttgcatgttcaatgtccggcaattttggaacgcggtgtatggcttagttgaatcacatcttagtatttaagtttagtggggcggtatatttagacattgggaatgtcgggaattgtcaggattttagaatttcccaaattaccccttagtgatttttagtgttaaagggcaaaataatttttttagcaagaagtgctttgtcttttgtgggttatattaatctgatttttaaagtttaattaaatgg

SEQ ID NO: 25355 - DNA, 3417 bp, Cannabis sativa
gatgctccatcacttgcatagaggctccacgactcacccaaatgccccaagctcacccaacgactcatgggcttgcacaacatcccatgggcttgcaaaatagccatgggctcgcacaacagcccagaggctcgcacaatagccacgggctcgcatgccaagttgtcataattcatcaactttagtattttggtcacaactctcacgatatatatcgaaattggatgattcaagaggcgttagaaagatgagaaagagacctatgaattgtatgtttatgaaaagatccaattctaaacgcatcactatgaaaatcctctaacaattgtaacttagtaagttgatcttactaactctactcatgagatgttgtggcgttgacctctgagttgcacggatatattctgagacttgcaagcatggattcttgagattaatgagccttaagccatatgcattgattcaatcattctttgtccgactcttacagtcgatgtctttcgaccgccgagactaattgttgactattctcgaaaatcaactctatcaatttttgagattaacattttggtattcatgtgatttcaaataagtacaattaagggtttaattgagttagaacttgaaaataattttatatttttaaaatatagtgcatcctttgacatttaaaatgattattttatttgtttcggtattcatgtgattttaattaagtacaattaagagtttgattggtttagaattagcgaagggaatatatatgaagtcgagagtgaggagaattgtgaaaaattaatttgaggggtaaattataaataactaaatatattttttttcctttttacatatcatatctattttaaataaagtgtgactatgtaacaaaattattggcttaacgaagttttttgattttctacattaactttaacaaaatatctcaattacttaacaaaatattctttattaattttataatattattatctgtatttaaaaataaaaattatgtagatattttatttataaaatttaatttaattatatatatgtatatttaaaaataaaaattatatttatatataatcatatctatatataaaatatacatatatatatatatatatttaaactttaatttcacgacaataatttgtacaactttataaccacactctcttaactacaaatttaaaatattgtatctattactatcattatttttttaaaatatatatttagacataatatataaagtatattttgaaaataattaattctctaatttaattcaaactttgtcaaaatattttctaatataatccttatacatagagagatcaatataaaatatgtataacaataaaattcattcttttattgtatatataaaatatgtatatatatagtcacgtttaaagagcacaccaatgtaactgcaatagctaaaaaaattaaaaatcaaaatctcaaacactttttcaaaaattaaaaaataaaatacattactttattaaagaaaattcaacatacatgtattgcacttaacatcacttaattaaatatatttaaaaaaaaaaattatgcattgcacgtaacatcaacttaatatatataattgtatataattttttagaaggctataactactataatctacaagtagcttcgtcagagaaggtagaggtccaaataagaattatcgagttttaagctaaaaaaatgaaaataacattttttatgttttctaagttttcgaatccaaaaactttctaaatattttcttattttttttttattttgaaattttaaactaatcacaaatttatttttttaaagctcaaaaatataaaatcacactgaaatattcacatttttagaaatattttttacaaacaaaattaaattctttatttttaaaaggtccttttggatatcgaatttagataaaaaaaaaatgtgatataccatatactttttctaatttcttttgtatgtgttttaatattttagtcttgtttctcacttgttatcaaaataaaatagtcttgtttcccacttgggtagctaattctacctattttgtacgacttttgttgtaaaaatgaataaagaagaatagacctttttttcttttttttacttttgtccttttgtcaaaatcattcaaaacttctcccataaaattgactttatttctttataaaataaagtaatttacgttataaatacttaagtttaactttcagttgcaaataaatacttaagtttattttttgacggtaataatacctaagttataattttgaaatttctgtaggtactaactgagagttaaacttaggtatttatgacgcaaattacacttataagataaattttaaacactttcttttttaataagtaaaaaaaaaaattaaatacttttttttttttaattttttttctttatagagaagtatgcctataattatttgagctaaattagtgatatgaagtgatgttttagagttctttttaggaaatatatcttcaatagtactaaaagtttgtgtcactaaatttcatattattttaacatgattaaatgtcattatttttaactacatacttaaattagttaaatttaagtagcaatagctcccaataatcatattactatgagatgacttcataagtagttaattaattatattttgtaatgattattaaattaaatatgtaagatttttttttaattatattaatagtaatataagacatacattttgttaaatattagtgaagctttttagtatttttattcattattataagtaaaaagtgtgtctagtttctaatataaaaataagtgtatctaatttaaatattttaaaataaaaattacctagtttagttatgtagttaaaattaatattattaaataatatgattatttatacttctattcattctataatatgtaattgtatttatatatattattagaaaattctacaatgcacatttaaaaatagtatattaatgtatttctatctgttttggcattaaagagaattttaaaaaatttaaaagaaaaaaaatactctaaaaataaggtttgaacggtatgtagctcgtgtgattttttaattttatacgcgcataaatatttaaatactagtttctaaattttaaattattttaaattcttcaaaattttataaaatattttaaataattataacatacagactataaaaaaaattgaactaaaaaactgaaatagttgagaatgtattaatgtgctttttttttttagttgcattgtagaattaatttttttttatatattttatgataaaaaaaaatcaagaattttgtacctcataatatttatttttggttacatcataacctatgtcataaatagat

SEQ ID NO: 25356 - DNA, 2392 bp, Cannabis sativa
acacaaagtttctcaatctccttgatagtactctgaggaagaatgaaaatgttcatctaatagttacgcaaacccagtaagactgagtgaatcaactgagctttgcctgcaaaaaaaaggtgcctcgtagcctaagtaagtagcctcatctttattttcctgattataggctcacaatcctctttcttccatttggttgttctcaacgggactcccaaataattgagacggaaggaacactcttcaaatctcagaacttccaaaatactatgcttaacctcattagagacttccatgaaataaaccatagatttagagttattagaactaagccccaagactgaaataaaatcattaagagccattttttaatgactaacagcctggaccgagcctttgaaaaacaagatgaggtcaatttgcaaaacaaaggttaatcaacttcataaattcgcaaagtgggtggtatctaaaagacttctgggaagcttctagatttagccttctagtgaagtaatcaatgatgattacaaaaagtaaaagggataatgaatcccctttcctcaatcccttcttacctctgaaactcttttgtagtcttctattaatcataagggaataagaagagccttacagacaaatcatgacccatcaaacaaatctagatggaaaattcagaccattaagcagttcttctaaaaatacctaatcaatcatatcatacgttttactgaggtcaatttttaccgcacatctaggagaaaagcttttcctcccaaaattcttgatcacatcttggaatataagaatgttatgggaaattgatctttgcttaataaacgctccctgattcaagctcacattagaaggatagactttttccgatcttttacacatgagcttagtaatatatttataaatagttgtgcaacaagctataggcttatagccaatagctttgcttggcatgtcaactttagggactagagtaatagatgtctcattaaatttatgaggaatagtacctgtatcaaaaaaaaaaatgtagaatagctctactcactttccctataatttcaagccacaacaccttaaaaaactctgagttataatcgtctggtccagggcttttggaactaaggatgctgaacatggatgattcgatctcctttactgtaaaaagttgaatgaggccaagctgctggttcaaatcaagtgtatttcccatctacaaacattcatagtcaattcgatcagtggctgagctagcagtccccatatagatcttgaaatgatcaagaaaatggttcacaacatcagctaaatatcaaccaattgcccttggtcattaatgaaactaataattctatttttctcccttctattttttaaacatgcatagaaataggttgtattatcatcaccctttttcagccaagtgatcttactcttgtgaatcaagaagcatcttagaagatttgcctgaagacaaaacacagcaacaacgtctccaacccatgaagtcgtgctactgttgtcacggagcaatgcaccccgacccccacatggtggtcagggggtggtgtaatccccaacttcgggccactcacacattgtcctcattaaagatagtttataaacaacatgctatccacattcgggataaactcttgacctcggggtagagtaccccgacccccaagtggtggtctcgcggtaccacccctaacccactatcgacccaacttcagtccaagaaaaagggggcatgcttcaagctcggtgtgtaccccaacccccaaccaccacgaggtgacttcagggcggtgtaccctaacccccatatgatggtcttggggtatcacccccaacctccaatctcggccacagttcaaaaagcttactcggggtgtaccccaactcaccaatgtcggggtaacacccagtgccggggtaatcgtggtcgtatgggagttgcttgggtcacggagtgtgtgtgcgtagctcggggtgtttatgaggtttgggcgatcttagggcatggtaagtcaaaatggtcataccccgaccccccaactcaaggccccatagtgaggccaaagttagtctcggggtgtggggatgcaacacggggtatatattttgagccctagaggaggtatcttggggtgtgggtagggttgaacatcgggggaatttaccaggttttgggtttgcgagttttgaattcatgagttttgggtttaaaaaaacgaaactgaatccagacccgaataggggtcgggttggcgggtttcggtgggcgggttgacccaatcaacttggtcaactctttaaaaaaattaatattttattcaaataattatttcttttatttttttatttattaaat

SEQ ID NO: 25357 - DNA, 1344 bp, Cannabis sativa
atgtttgtcttgtatagggagctatgttattcgccgcataccccttatgagattgggtgttattttgagttagtctggctgaagcagagcagaactgactatttttatttcagccagctaggtcaccaatggatgggcgacactaactgcaaatgcaccatgaatttcagtttgtgccgctcttcaaacattccatccctactttagaaataaggaatagagtgaatcacatcttttcattatcggctaaaaagagaaacaatatttggttgaacagtgtggacaacttctagatgtatggcttatacgctcctgctcctagggttgcgagagagccagctattgatgtggcctgccatggagatgggcaaggccctaacttggatgattaataaataccattgtctcatattttacagagtctgcagaggaaagaaagaggtgtttgtaggcgcctggtctatgggggtcaagtaggtgatgcctcccttcgtatcaagcctagagggccaatttctgatagacctacatgccctgtgcctacatctaggggcaaggacaaggctatagttgtgaggtctgatagcgcttcttctgatgatgatggtatttgattgttcataacaccatacttttattcttgtacaaaatatttttgaatgcgttctgactttgctactttccttttgcagacatctcttccaggctgagaggtcttgtaggtgggctttcggatgagactactagacgagtgagggccaaggtggtcaggacctcgcacagtgcagatactagtggaccatcactgcgtccccctacaccaaggctttgacctacctggtagcctatagtttagcttgtcgaccaaccatggtgtttcttgcatgtggctggcttgccttcttcatctttttgcatgtgacaagtgagttatgcttttagttttcttcatcttcttggcactatataggcttgccagccatggtgcttcttgcatgtgactagctgtccttgggcattcatataggggtctggtcggccttagcagtctaaggagggcactagccggccaaagttgactatttgacactaatgttgtttttctctgttttcaggccctgatgaagttgagctcaactcgtgatgactcaatggttctgtagatgcttttcaggagcatgtgaatgtcttggaggcatcccttgccccaaaagacaaagccaatttcgagttggaggtccttcttttagagaagtagagaatggtctctgggttggagattatgctgagtgtcaggaacagcaagaaaaccaaccaggctgctctcatctttgggttgtaacc

SEQ ID NO: 25358 - DNA, 1911 bp, Cannabis sativa
attttgtagctacagactgagattttataattataaaccaaaaaacgagtaaaaaacaataatgtacgaaaaataaaaaacacacacggttcttacacgtaatatcaaaaattcttgtagattgttactagttcacggtatcgtgcccagaaataagattcattagctatatctaaaaaaaaaaaaaagtttttgacttatggataaatagactcacttttactatatgtcacaagtttgatgtattccatcttgacaaatgaaccttatttcctaacctgagtggatgactctactcttagtaagtcgtacagaaagaattgattctcaagctcacaggcagaagttgtgatatctgagtagagtaagaatatatatccaaccagtttttatcaagcaggtagctcacatgcatcaacgagggaatgtgagttggtaatttcagagatatatcttgtatatctccaagcttgcaagtcacggcataatcgctacattcatgggatggattcgcatcttcagagaagaaaaacaattagtctaagtttcttacttttcttatcgtaattatgggaattaaactagttttttattttatttcttattgatttagggaaactaatttcatgtaattaacccctgtgaataatagactcatctcactattagggacactaattttatagagagagaatactcaagaaagaaatctcaatctaagagtacattactcagagatcactgtaagagctttcgagaggaatcaaggcatccttgttcatcttctcacaagttgatacaacaaaaatagaagtaggctattaccaactataagggatcgaacttctataaatctagtattttttttattttatattttttatattctattatttaattattcttaatcgctttaatttgatttattgtttatttttttttaatacattttagtagtttttcttttgatactatttgctcacttattttacttatagtatcatgtaatatttagttcttataaaatacatacgatgcaaggtaaagatactaattccttcatcattgttcttgtttcatttctccacttctccactcatttgatgaaatatgcaattaaatactatttagtatcataaataattgaggtgtttgtttgtacatcttctaaaaacatattaacattgttaatattttattacttattgatttcttattaatcttagtatatatatcgtaaacaaactaatactatttagtatttaaaatagtatattatttataatttggtatccagaacaatttattaacactaaacaattaaaaaaaaattattcttattggtattatatatgcaattgatactaattagtatctataataacttgttgttagttggtattcaaataatttatattatctatataattgactactagcctaatatttttaattttttcttttaaagaactactagttggtatgcaaatcactaacccaccattaacatgagctaattatgtcctacattgtttactatacatatatatttaacaatatattacactttatgtgtgatagtctctctctcaagtttcgaaagtctgtttatgcgattgactgtttcttgcgtttgggtggttcacgttcccgattgttgagggttcaccggtgaagcttgttgtcgtctgtgtagtcgacggtgtaggttcgtctggcatgtgtgcaagtttctctccaagtttcgtttggttctgcgatcgactggttgttgcgttttttctggtttcttcgtttgtcgactgtttggctgcgtttgtcgcctgttttcgatcgtgactacgttgtgataggtttgttgcgattggattcttctattttttctgttttgtttgtgatttcactggtgga

SEQ ID NO: 25359 - DNA, 4237 bp, Cannabis sativa
ttaattaaggaatgaactccttataattctaacgccataaaaacattaattcgaattaaactaataatagtaaattaataaatgaaaacaaaaatctcaaacggaggacgtcgttgatccgaaccgaacctctctcagacgactgttctccaacccctcacagaagaagacgaagaaaaagagtggtggtgtgtcagatatataaaagagaatcgtaaaataatattaatattaatttcttatacttttttagttaatatcttaaacaatttaaacttaaaaacaaaccaactaaactatttctctttcctaaattttaataaatttcttaaaataaaatcttatacggttaaaatgtaatgccatatgagtttgattgatatttatccaaaaaaaaaatattataagatctctcatattttcaaataataataataataatatctaaaatattttaatatatacagttcatttcaaaaacattatttggtttaatgagttttacgttaataaattaaatattagtttaatattattaattattaattatatttttatattttgtagtatgagtatttatataatttaaatttatagattatttagtatatattgaaaaaagtgatatgatatatattgtaacaaaataatatgtataatatataaatatttttaataagtttaagtttctaattttaagaaaagtattaaatacatcaagtgataagtttaaattttcatttattatagtcatgtttagattttcatattatgttaataaaaatatttgaaattcgggatggaatatactattaagattgaaatttgtgaaagaaaataatagcgactacaaataagatacaatggataatatattaggatgacaacgaatgagatacagtaatgataataatagatacagtacattatgtggaagagtgtttacttaaataataataacactctaatttttttctaaactaccttatttaattatttatttgaaaaaagaaatttaaaattttattatacaatttaataaataaataatagaatacataaattttttaatcttcttaataataataattaataatatgatgaatagacttaaaaaaatttcttaaaatttttatgttttaataaataatgtaattagatagtataatttcactaaaaattattttttaagttactatatttattatattaatatattaatgaatactaatttattattataatactagagagcaattatattgcctaattaattatattatatggacattgtaaaacctactacatgagtcaactttataacaaagacatcatacttataatgttgcaaataaatttatatcaatattttgcagatttaattataacagccactcattattatttttatatagaaattttaaataaaattcatctagttaattatatgaatccttataaggcaattgataaatagcagactttatcgacatcattttcgtttgatgattaatttgcattaattatatggataatgacattggttaatcatatattttcggcggaccatcgatcattttcttagcaaaatctagtaaacatatatatagcttatattttctttttgttttaattattgattgtgaaagcttgattacaaatattattatatttatatatatgatggcaagattaacttgttattgtcatatatatgttcctgtataatggacttaattctcagtagatttaggaggcaatgatgattatgacatcggagaaaatgatccctaatctatttgatgttattgttaactatatatataggtagaatctaataattataaatttcatgtacacaatgctatgcaaagcaaaataactaaatagggtaagcagaaaacgttgtaattagatcttgttgtattataggtttattcatgaacttttgatgatatggatgtttatgctgaaaagtttattaagtcacatatgcatccaacataataaatgtatgaaaatcatagttctaaacttctaatacatcaataattattatgttctacctatattatatatcttattctaaattttctatttacacatattgtagattagatggaaaaaaaaaaggtggtacccgctattatcatcattatcacagaatattcataacataattggcttagcagaaaaggaaagaaaagaaaaagtttttttatttttttcttttctgagaatatgtttcttcaatgagataaaaatgtcaaaataaataaataatgtatgcactacaatttagtaatgccgtgacattaaaaataaaaaaagaaaaagaacatagccaatagaaaatataatcactctagctagaaaaaaatggcaattaaatatgataaaaaaagtacttaaagaaaagataatggcttatattttttaattattatttttaaaaaagttaccggagaaattttgacaacaccaaataacaaaagtattcgaatatataacaaagaaatacacctgcaaaatagcgagtattcatttaaagtaattaatgctcgagaaaataagtaaattacgaaaaattaaagtaataacaaagcaaagttcagtttgcctagtacactattatgctcattatgttgatggatcattccttaatatagaaagaaaatataatgctcatttattttacagaacatattatttaccctgttttacacgtttaatataacaaataacataaatactttaattataaataaattatgtagaacattcattcatttctttctttcctgtcaatcatgacgactgatcgtttacattaattgatggaacacttcgaatgcgcactatcctaccaaccatacgatgccttctccagaccatcagaaatactgattcttctccgcaggcttcccggtgaagacggtgccaaacctccttttggattttgaaatttgggtatgcgctcttttcatttttattgtttgttgcaatcttttgaagcttgccacttaccaaagctcctttgttttatttctggcagaactcgtcccccaaactccagagagtgagaaattaacaaagaaagtggcccagtacatctctttatctgatgaggagttgaaagttgaaggcttggttaccatgaaactactccgcgagcatgaactaattgttggcttttggagcattgatataatgtaagtagcattgatataactactccgccaagcttccaaagagataaaggaacaaattgccgccaagattgctgatataataacgaaagtcgtgaaggaagatgaacgctgggtggtggattgagcacgtcgccatcctaaccccatgatagaggaggaggagattatggagaggttcaccgctacatacctgaatgaaggtgctcttggggctagcatttccgaaagaggtaacagatccttctgtgtgtttttcacccccagtctctaccgaatgtcccaaagggacaaaggggggttcaacaattataagtatagatcgtcttaggtactccatgaagatgtatatcgatatggtagatgagatcattaggagccaaagtaactagagttgtctcaagatacaattagagtggatccatttctaacaatgtgcttctcgaattttagagaatatggaagcttcatgagtcaggaagacataactttatttacaaggaggaaccatataactactcattgaatggttgcacccttgccaaaatctttatttatgtcgaggcatgtctatacttgtttgtttatgttgatagattgttgtcttttgacagtattatggtttttgtgttgtagaaactctcgagtccaaaatgatgaaattagtcatggatgccatcaaatagactgtctcttagatggaggggagaaaagggaaaggtaaatcaaagtctagggccaatagggctcgtaaaccaagacctcttagctctgattcttcttttgacactcaaggaccaactcaggctgtgaagactttggtttctaagacacctagtggggtggaaaagacccaggctaaggtgggggacacttctcggagccaagtggcttctggtagtggggaagcgtaagtagttgaccctcaccagtcagcccctgagaagcctccttttgggtcaataattcatataaaaacccaaaattccccagagaccatgaccgtgtctgacgagagaggggagggt

SEQ ID NO: 25360 - DNA, 5380 bp, Cannabis sativa
  modified_base (137)..(145): a, c, t, g, unknown or other
ataatcatgaacaaatatatgtatttatatatgttctggacttaatagaatttatacatttaacataatcatgaaataaatcatgtgaaccatgcaacataaattttgttttttgatcttatattaattagtaaatnnnnnnnnnttgaaatgggttttatttagggtagacaacccaacaatttctgtttcaacagaaacttcaatactctgatacttcttgctgagacccatatctaggaggtcatctaaattctttctttcaatcaatggggttgcaacccctacctcactaaatatagaatggagacatccaagaatatttctatgttttattatcattaataactagtactctgtccatctcattaatacccaattcaacccattgagtgtatcccattaattcacaagttatgtgctccttcattttttgagtgacccgtaccttttccaagatttctatggtcaatccttatacaagattaactttctgattagacttaaacacattttccatcatcatcatcatatcactacaggcgatctagataatcttctttatcttagcaatataagtgttttcgttatcattcctttataaatctctaagcatgttacttccatttaatatggttcaattcacgcttcttggatttaattctccactatataaacatcacttttatagtattaaatagctcaacccacttaattgtcatcttcaaccctcctaaaatgacgaataggtgtaatcatacccatattgttccacctttagtggtcctcaatcacttataaaacaaaaagattccattctcagatttatttagacagttgcctcaaatggttactcatatcctataacccacttgagcatattgaaagaattttaacttatcaacaaaccatcttactgctttaccaacactctaatctatctacctctttaactaatctaccatgtaatgacgtacatcactttgtgatctaggtgacaatggattactatttccttgatcatttcttagctgtcaagttttccatcgaatctcacaaattcccacttggacatcgtactcgatactttaccaatcattgccttacattgatcatacttcccaaataacaacaatgctagtaagcatttccttacttttcaatcagacgtatagatattctacgctttctcaattagtataaactcatgttatactatcaacaagcttagctcatgcttttctaaacatacttctaacaacattgtatattaattagtcataaaacaagtaagaaaaataatacttactatccatgagtcgtgactgtcttcacagcaaatgtacatatccagccagtcttcaggatctttaaaactgtggctgctctgagaggatgttgtaatgccctaacctctaggaacgccacgtgtgtgtgcttctacaattagtttatgattataaactaacaagtaaacttacggttaaagtaaaaaaatgtgatttaataaaaaaattgctaattaaagtcatggcatcatcacttttacaattagggatctcctttaaaatattacaagatgtgccattagaatataattacaaaatacatgttaaagttcagaacatctaaaaatgccaatcttgacaagttggcaccacttgtcggataagatgatatgtacatttgctagataagatccctgactcatggctgtccaaatatttctacctatgacctgcaccacatagcacccatgagtcacaaaaactcaataagaaaagcagtaatacaacatcacatctccttacacagatatcaacatttaaactcaataagaagggtcaaatgatcacacattacacacataattaaatccaaatgaatacaaatgttcagtcataaataaaatcaatataaaaacattcactaatataaaattacttaataaataatacaatccatacccattacttcataaagtaacttttattattgttgtgtaacaaaataacccttatgcctaaacgggcatcccaatatctctgttgttgtctaataagataactctgatacttatcaccgatatctgaacatcaccatggttgtctaataagacaacattgatacttatttttgatatcccaatatcatcatcgttgtctaataagacaaccgtaaagataacctttttatcattgccttaaaagacaacattttcatcacataatggtaataactgtatcttaatctcaataatagtcgattgacaaatgaaaataattgtatcttcacatgacatgctatgtagtacaaatttaattttcttacctataatccagattcattcatgcgagtcaatccaagtggagaaatgcttgacaatcccgaccatatgtcacaacaatggttaattgataagtgtctattctaaaacactgtctaatactgcataaaaaaatttagggttttctaccgagccttgttgtgaaaacaccccaaaataaaatacatacttagctctaatttatgtatcatactttagagctcttcaaaagcttcaagacaatatatagaacgtctgaaatggacagacaagtggaaatttatggccaaaatacaaaaattagcgcttctcgattattgccaaataaaattctagttggtacaaccctgtaccatttagaattgcagttcacaatagcggggcctcaaaaatttcaatttttttaagtcccaaaactttctccaatcaatcccaaatgctaccaaacttcacacaatagttacttaacatcaaaataacattctccaattaacaaaaatcaaaatcgaatcacaaatcaaaattcaccattaatgaccatgctttgagttctaagagctcaagcttggttctttaaccaaccagttgtaaaacccactaaatagtagccaaacaacctttaaaaacaacctaggataacattctaattcctatccaacccacaacaccccaatcatgaaatctccaacttaaactaaactttccatcgagaaaaacaaagagaactagaagaagattaccttaccattcccaacaatttaactctaactccaggagttagtcatggctaaaagaaaataaatattactctgaaattgttggttcattggtgtttctcctaggctgaaccaagagaaagaaagcaagagagagtgaagtttgatatttttttgattttcttagtttgacaaggtctaacctctatctacacatcaatctaaatttgtctagggtattccattactttctaacttatctattgaaagatagataacataacaaatctctaaccttgcataagaccaaaatgccccttacttacaaaccaaataaactttaaccctaggggtaatttagtcataactaattaccccaaaatatcccgactctctcaaaatcaactaaacttctcgatatcactaatatcacatactaataccattgtgacatttttggctaccaattaggtctccatggttgtcggacctaaaaatatttttattttataaataacatgtctattacccacatattttaataaattctttgcaattaataaattatgtttatttaatcatttatgataaaatttcctaattcccacataattaggttagtaagatcataatcttacccattatactcttaacacacatattactccatattttataaaacttgccctaattaattatagttatatttttgggatattacagtaataaccctaattcaccattccacaaatgaacaatcatataatatatacttatgctatcacgatatactctatgtgcttagtttactgttttacttgaaagccaatgttattataactattcatactatattattattctgtcttgatgggccttgtcacacaggtgctctaatttgtaagcaagggtaaagctgagtcggttcagccacgagtttaagggttttgaagatgaattgtacatgttctggccaagctagactacgagggttaagtccatcaagaagtcatttagaaaatttcatttttctgcttaggttggtctatatgaaataacctataataatttgaaaaataattttatgggatccctgacatgtaattttaaatattttgttttggagcaaagaatgttattattgcaagtcatttatttaatgagtataaatatattttaaccacttggcttatagaccccgattaacgggcttattatgttgtaatcacgatacgtggcattcctttgagtaggaaattataatttggtatcagagtgccaaggtttttaaaattcctaaagaccagttgaacatgtacaatcattgtcaaagacaagcttgactcatggtgcagtaagtgttaagagtaaatacttatcttcttatgtgattaaatatttattgcttcgataataggaagcatataagcatctagaaaattatgttatttaatgaaaaacattattattaattgtaagtagtaactgttctatccaggaaagaaattatatgtgttagttaaggttttgacatgaaatgtgtaagtgtggaattggtgtcacactcgctggaattattgattttaggattatttgaaagaatgaaccctgatatatagactagatcacaaagctagtttgtagaacatgatgttaatctaaccaatccaccaacactgtcagtacctctgcaaaatcctagggatactgcagggacgataatgttaatcctcctgttgaccagcaacaaatgtttactgaaatacgaaccatcatactttttcaagaagaagaattgtgccggataggcaactggttcaagtagctctagtagaataagtgatttctctagtttttgctctagtggtagctaaccctggactagctctgcaaccacatagagattcactcattaaaaggtttgtcaagtttcaacctccgacattcctagctggtaatgatattattaaggtagatcagtggatgagtaccatcacccatatcctagataatatgggattagttggaactgagcgggttaactgtgccgcttttatgtttctagatcatgcccacacctagtgggatttagtaggtcagtcttgagacctcagtaccatgacttgggaagagtttaagaacttattagaagaaattttttacaatatcgccattagtaaaactcatataaaggattttgtgaaactagttcaaggtgataagacagttgctaagtatacgctagagtttgatcgtatgtctaagttttttggtgacttggtaccaatagatttcacccaaaaatagaaatatgttactgggttagatttcacaatta

SEQ ID NO: 25361 - DNA, 1109 bp, Cannabis sativa
tgaaaggaggaaccatcaaagaagcacaaagcttgtgagtgaaatcaacattaacatcaattttggctgtggcaaaattaaacacaaataacacacattactctcaaaataaccaagaacaacaacaataatggcacaattctcaaatgggttttcaaaatattaattatttttttcctttaaaaaataaaaagaactgacctttaccagcatggatgctcttctgagctcccatcccgttacgaggaaaagtgaatcataaaccattaaaaatcaatggaaatcaagggtgagaagtgagaacgaggcaatgagtgaagagcaatgattcagttttaacttttaagagtgtgttttggagttaaagttccccgaagcaaagtgggtttggttgggttgggtgtggttttggagttaagagtaacaagttatgcttagcttccaacgtttgttatcctttgtttgttttgtgtttctttacaatttttcattggatttggattcgattcgccctagccgcacgtggtcatgggatatttggaagctccttccttccttaatcctacatttatgtaattatttgttctaatcaaattttatcagaaccaaatgcgtcaaactcgaccagcaccaacagatttcatctaagggtacatttgctttttgtaagatgcagacttctgaatctaaatgcatatctgaataattaagattctaatattattatttcattaaaatatatcacatataaataaatttgagttactatacttaaatatgaaccaaactaatccacctatgataaaaataaaaactctatctttctttttgatgggttaatccaaatattaaatactatttgttttaatttttatatatttaaatattatattttttaatggattaaatacaaaatattgtaaagagtagttagaaaagtcatgtcttttgatatgttgtgttagtcctctcttttgagtttcgtggttttgttttgtatgtttggtatggcgtcaagtagcagttaggttagtgatcttgaggcacaatatcaagggatagaaatcaaagggacagatgagttcgttttgtcttatgatgttgtcgag

SEQ ID NO: 25362 - DNA, 2812 bp, Cannabis sativa
aaattaacgcaacataaagatgatagtttgtctgactgtgctaaaaatggctatgcaggtagttttatgatctttacaattaatttccttcattgctcatttactattaatcttatgtttgtttcggaaatatatcaattatgttatcttatagcaaattctataatcctttaaagagtttagaatctaagcatgaagtgagaaaagattgtatgctgtgtatcaattgatttcgatacaagttgtcatttgtccacattgtttgattttcttttgggggccacttcgtggggtaagatttgccatttttgttgccccttttcttgggagattctattagatttggattgagtgtcttgcaaattcccattgaatcctaattttggtgtggatatatgtttaaacattttgtcgtcctttagttgggtttcactcatatttgttcagtcattacaaaccatatattcttcttggcattgaatctgagaaaaaatttcgccttcttgcagtgaaaccatacaaaggtgatgccttgctgttcttcagccttcatccagattcaaccaccgatgcaagtagcttgcacggaagctgccctgtcatcgagggtgagaagtggtcagccaccaagtggattcatgttaggtcctttgacaagccaatgaaccgattaagtagcgatggttgtaccgatgaaaatgctagctgccctctatgggccaagacaggtgaatgtgaaaagaaccctatatatatggtgggttctgaggaagctcctggtttttgcaggaagagttgcaacgtttgttcttcctagggagtctaatttacttttccatataacctcataattaccctgaggaggtgttggttttttagagtccaagatattgtatataatataatgtaccattgagccctgtgatgttgtagctgtctaacttaccctgttgtattacatccacatttttgaactgtttagtgttatttttgaacagttatgtctcggatggttaagttattactctcttttttataaaggatcatctatttcatagaagtgttattgttgcaaaatttgttttaggcttaagtgtcattggtgattggccaataattgaaagagggtaaaattggttaaacatgacaacaccattttaaacctacataagtttgtgtgttgttttcagattgatttcttaaatctgaaaatgacactaacctatttatattatacttatttattatagttaatatgtgaacttgtttggtaacaaatcttttttcagttataaacatgttataaccatacacgggatcaactcattttaattttgattttgactcttcgagttaaacatttctttgtaatataagaaaatagacatgaacaaaaatgatcactcttaggccctgtttgagtacatttttagttttttataaagcattttcctgaaaaattctactaaagttgtattttctttttagagccaaaagttaacatttactggtaactcaacaagaaaaaaatatgcttttggaacttaagactcaaaacaattttgtaaaactaagctaattgggactttattctaaataggctaattagaatttttatccttcaattctcacatatatcaaatcatgttttttagatttttaagactgttaaaaatttctcttgaactattgaaattgttagagttaaagacttttatttaattttaataagtctaatatctataaaagttcgggaaacataatttggtacatgtttaaatttgagaggcataatttgataaatatcaaagtctgtagagcataatttagtagacggacaattatcgaattagtaaaattaaatgaaattggacaaaaattcttaaatctaataatgtcaacagtttaaaaaaaaaaaattaacgacaaaaacaaatttaaagaacatgatttggtacatgttaaagttcaagagacaaaaattttaatttgcagatatgacaccttgcttcaaagaaataatgtggaactagaaaggaattcggttctgaaactatgatcggttataatttggaatatgatcattgaacgtgggattgtttgattacatacaagggaggatcaaatgtgattataacgaatttctatttctaagattccttctaaagagctctccaattaaaaaaacctatcctgaatttccatctctcattcaaatcccaattccaattccaccctagaaaatgtgccattacaatttccaacattccaatattagtagagattcctattgaaagctatacaaccatgttcccaagtttagtgttcacttttcagacttcttcttcttttgtgcccattgaggaccataaatagccaagtgagttcggccgaatcgtctatcggttatctgcacttacattttgagttaatttaataaaacttgaatgccttaagaaaatgaagaaaagaaatcacagtgctttaacttaccttaaccaggttgccacatgaatccaacatgtctgttcttagtgcatattcaactacaacaaatgtatcttctccaattaaggctgaatttgaaatttggtccatgagtaccccatagtcaacttgtgtataaggaggggtaatactaatgtagtcaaatggtgcattttcacctaaacaagaagtcatattagtgagagttttcgaaaaagcaaacacggcccaactcaaaattatgttctaagtatttttcattacttgaagtaggcagcagaagagttcaaatcattaaaatgagagagttaaaacattaaagaag

SEQ ID NO: 25363 - DNA, 3422 bp, Cannabis sativa
cttgagatgttattcaacagccaacctaaaatggctgatctagttttccctccagaggacaattgattatagatgttaatatgaagatcttaaaatggtataaggaaagcaagccctaaatcaataaaggaaaatattaccatgaacatgacgattatttgcagttgaggaaagatcatattagaatcatctcagtatactgcaagagtggaacatttgatcagtatatttcaagtatgaacatatgtaaatatctcaaggaaacactgccaaccttctatgctattatgataaatcagtgaataagtcagggtaagggattaagtcaaagcttctacatgttgaaacaaaactatcgatgcccaaaaagagcaagagagttaagacactgcactaaatttgtgactaaaacctggaaaaggtattttaaattaagtttaatttaactgaagttcgtgcaatgcacttttatcaccttaaagaaatacttagcaccattaagtggcattgttctgccttgacctctataatattgtgtaccagaattcaatgcgctctgtttcgttacactatattcttctgtttttctgttgtgccaaaagacatttaaatcccttgtcttacactagtaatattaagagctagattgaatatctgacccctaaatttctgttgaacttaacttacatgcaataattctgaacaaatccttataccacgatgcataacatagaaaataaaatcaatgccagcaataataatatatatacatgcactaacaccactacataagctcacacacacaaccataataaatatatattaatggagagggagagagagagaagaagaacattgacttacttgtacaagtaagaaacgattcccagaattatacataggagaatgatgtcaatacagaaattatgactggatctcacctgaaacaccacacaagttattcagttgaatcatccagtctaatcacatgtcaacaggcattaaattttggtagggattaagtaactatgatcacgtacctgattaagagtttgctttagcctaacattggtattcttaatatcagatgttgccttgtctacctattaaagcggaaaataaaaggcacagaaattatttctctttggggagattacagacagaaatgaatatgtatgtgcatgactaaacaaatcaacttctacctttgtatctatttcatcgactaatggcacttggttgtccagttcctaatcacattcaaacaaatcttttagtctctaaatacttccaaattgaagaaacaaaatacttgtgcaccatgacaaacctcgctcatatcatgggccaaatttttcagtgtatctagtccttctgatataaaatcaagcccttgatcctgcacattcattttcaccaagaaatttcagaactgttaaaatcttagagtagttgcttcctttcccctctatatcttacagatatcaaagaaactaaatgcatcatgaactttacgtgcctgtttcattttccgcatttcgtactcctgtctaaattggctagattcttcactttgttggaaaaactcatcgtcaaagttcccgtctaacataaacaatgaaaagttcttatttagaattaaaaaaggtgcaatcattgtatatttgattttcagaaatccatcgaaaaattatcacctgatgagtcaaacttaatatttttgtgagatccagaagttttccaacccccagtttgtttggcagcatttagtgtcccatcaggtatttcttcaatcctctctggtagtgcaagaactagatcattacgaccttctatatcttctcttgacaaccctttaacctgtacagatattacaataaatttacacttagcaattgtcattattaattaacaggatgtcaaaatgggatgactttgggaacatataaaacttgcagcaattcactatcgagacaaaaaacagaccaacattcaactggagatagcaaagccaatcataatagtctttagtcaataagtcatcccaacactctccatgtcatcttctaagatgaacgtctttaagagatcacttcgaccaaacacagatgtaattaattttagcttttagctgacaagtttttactagatttatgcttgacacacactgatatttgtgccaaatctacgtttttcttagttataaaagccccacacaaaaaagaaccaggtgtcatagaatcatcaaagcaacctttaggacagtaaaacaccatcacctccaagagattatgatgtcaattaaggctcgggaaagcatatagactaaagttgcatggatagaatcaagaaagaagctcctcccaatagggttctagtcaattcaacaatcaaacgctagtagagatacatctgaaaagctataaaatctagtaaaactaacaaacgccatccaggatttccccaactcccaatttaaatgttagttcttccaccacttcatcatgtcaatatttcttgaacaacattttaataaacactaacaagataatttaatcaatatttatagcatttgtgattaaagaaacaaggctgttgtatgtatctttgcagcctcatatcttgacaagtgcatccttcatttttgtccttcctgtctattttttacaatctcatcgttcattttgttattcttgtcctattttggcagtgtcttactgaacattccaatctagttcctcgtaaatttttctacagtaacatatttagttcccataacagtgaattcacgttcatgctcacatcaaaaggaacagtaccaattccaatcatctcacatcaatttttccaacaacaagaaactttcaactttggaaagaaagccaataaaagcataaaaattaagaatatcttatccatttggagtttttcaactatagttttggtttagaagtcaacaaccactagaacgtgtcctgttttcacaaaacccaaatcatataaatcatcggtcgaattgactttcttacgccatgccaaatgagaaacttagttatataatatattttaattgcatcaaacctatcaacatcctaaaatcacaattctcgaaagcataattgacgtaactgatcataatccaaaatcaggaaaaaaaatgatgaacaatttgagtaacttcacctttttctgagccaatttccgaagtttaggaatatcctccatcaaccgagccttcatccgacgaacttcagcattcagtgcagccgcggaagctctattcttctcgaccgaagccacttctgataaaaaaaaaaaaaaaaatcggttccttgaagaatcaaaacaaaattaaggaaaactcaattcgtacgagtaaagcggcatcaatgtcacgttcgaaggcagcatagaggcgagcg

SEQ ID NO: 25364 - DNA, 1423 bp, Cannabis sativa
ttccaaatcttctctttaatgtggctgaacatctcttttttatccctaccagagtaagaaggcagacccaggtacttttcatgacattcacagattggcatagaaagctgttgatgaaaaaacacttaggcagcaagagtggtatttggagaaaaggacgtaaccgacttggccaaattaagttcctgtccagaagctttgtgataggtatccaaaaccctcttaatagccagacaagatctctcattagcttgacagaaaaggaggctgtcatcagcaaaaaacaaatgagtgatcggaggagcatggcgcgtcagcttgaagcccaaaagattgccagagtcctgttcatgttgtaatattctagagaagccttcagagcaaatcaaaaacaagtatggcgataatggacatccttgtcgaagacctcgggatggtgttaaagcacccataacttcaccattaatgagaaaagagaagctattagtagtaaggcagcacatgattaacgaaatccatctttcagcaaatcccattttcctcataacttcttcaatgaacttccaccccaccctatcaaaagccttactcatatcaagcttaaaagaggcgataccattacgaccagctgttttatttttaatagcatgaaccaactcaaatgcaaccaaaacattgtctgtgatcaagtggtttggtaagaaagcactttgagcttcagaaataaccaaagggagggaaagcttgaaccgagagactagcaccttggtgacacgtttagagatcacattacagaggctaattggtcgaaaatcttgcatgcgatgaggtttcttgactttggggatcaaagtaatgattgtcttgttgaggtctgtggggtcggcatgatcatttaggatgctgagaactactttggtaacgagatcatcaacaacagcccaattcttttaataaaacatggctgacatgccatcaatccccagacttttgtcagcccccatagtgtgcaaagcagagtaaacttcatcctttgtgaaaggcttaatgagtgattcattcaagtcttcgccgaccattgttggaatgtaagaaagtgtagtattaagggccgcatcatcaatgttggaggctgtgaaaatttcagcaaaataggcctgaacaacatctgcaatttcatccttggaatgaacttgttgacccgaatcattgagaagaaacttgattttgttgtttgacttccgtgaaggtgctttagcatgaaaaaatttagtattgcaatcaccacaagaaagccaatcaacccttgatcgttgttaccaatatacttcttcttgctcaagtaaatcttcaaggacagattccacactttgcaactcttggagatgttaactggtgcgagcagtagcattgtttaaatcag

SEQ ID NO: 25365 - DNA, 2413 bp, Cannabis sativa
cgtaaaaatgaaaatttcccaattaatatggaatttttatatgaaacaacaaatacataaacaaaaacaacaccaattaaaaaaagaatgaacaacaccaattaccaattagcttaaaagaatctgtaacaacaccaattaccaattagcttaaaagaatctgtaacaacaccaattacacccacaaacaatcaatatcataaacctatcagaaagtggaaaaatatgggttgggtgagcagcagggttatatcgacgtgtgtttatgtgagatatattcactttcttcaagtactcctattgctagactttgcaagactgtaaaggcttggggtcttcactcattaatggggtcttgaaggaggaccttgaaatttatgctctctcgagtagatatggaaatttgtcccgcggagatggatacccgaagaggataatggggtaggagtagtaggggaagccgaagctgatttggagcggggtcaagggtgatactatccacctcatatatgatctaatatataattttcatataattttataaatttttattggtacaatcatattaaaattattgactatacaaagtttattattaatcttggagcggggtcaagggtgatactatccacctcatatatgatctaatatatagttttcatataattatataaatttttattggtacaatcatattaaaattattgactatacaaagtttattattaatctttcttattatcgttataatttttttttaatatagtattctatataccaattttaattttcaataacttattcaatttgttattacttacaaacttaacatattaacatcgatatatgtcgtattgagagtggagatgtcaagctaattgtcattgggttaggctgaggaagtcgatcacatgtttttcacaaagatgagatgctagggcaatcaacaagtcaagttctacattaaaatctaggtttgcacttttttctagcgtaaaactcctgatcattggggattgacgatgtggaaactctcgtgctcgaatcctcaacagaaggtgaatgaaaagtcgacagcgtgatccagattgaagaaggaaacttggctctgagttcagttcttgattttgaagagtgcaaagaaagttctaagcattaaaattttgaaaaccagagaaaagtggtaactggaagttgtaaagggtatttatacccaaaaagcaatccacatgaaagaggatgaagggtccacgatcaaacctccagaaataataagcttcatccaacggttggggagttcaacgatgctcgcgcatcttcacaattagtgctccccaaaatcgaggcacaaatcaatgatgaagatgccattttttaatttttgtactagaaaagtgaatatccgtcaaaataaagtcaaatctagaaagcaactcctcgatggttgtgtccttccaccaccatgcgacgtggatatgccactatcaaagacggaagtcaccttccctgattgattaacacttgtaaagtcatgatattatccctcatcctccaaatgtccacactgaaggtgtgatgcaagcttccatcatacgtagcattctggaagcttgagggtaaatgttatctacgtttttggcagtgaacacatgaaatccaagtctgcatccaaaacccatcaatgggtcccccaaagaagataaaatgggccaaacccatttggacaggtccttccaggaatgtacttcagcttcgtgatcggagaaactttcgccattaacagctcatgtccggaagcaggtctagtaccgtaaggtcggaagggtaagacaacatgttcctgaaagtggtccgatttccctttttattcttgtgcacaaataaagaaataatagtttgctggatcttgatagaagatcgtatcaagctaaataggaaaaattttctaaaacagatatcaagcaattaattcacaattaattgcccacaatcatagaacacaatgttgactaaatccaaccaaatctaatctgcctagtcagcatattctctccttcgtggactagacttcacgagacagcctaagtgtgttattcattgcgaattctccaatagagggaaaatagaaactaaatgtaattctcaaactactataaataccgagtgaatcctataaattaagggttgaattctcttgcaatacttgcttaggcaaacttgagaacttacattcatggtatatcccaaaggctttttaagctaaagaattacttaataacatcgactcgtggactaaggctagttaacgccctaactacgtaaaaactgtttgtgtctttcttattttttctcttttaattgtttatttctctcggtaaacacttgccaagtggatcaaccaaagattgacaat

SEQ ID NO: 25366 - DNA, 4876 bp, Cannabis sativa
atctcatccttatatatatatataaggaataataatttcggaaaattccataaaacataattttaatttagaaaatatatatatacaacaattaatatattatatcaaatactttttataaaatattaatcatatctcaaaataattatagtaattatactaaattgtattgtcatcactttaagaatatatgatcattatatatttaaaaaacattttgtagtattatttatatatataatatatttatatattgattggttgatatgtataggttggtcgattattattgtatataagtcggtgaacgtgtaatttggtgaagaatggttaatagtgttatgattatgatatatataattattatatagtccactagaaatataaattgcacttaattaattaatcttcttagctttaaaaattaaattatttggatacacctataaatatatataacaatgattgttgatgtgaaagggatattatgccgtccattttaagctgtaaaatatatatttatttttatttatttatttatatatatttagctatggctattatatatgcatattaaaaaaaaataaaccagttttgaggtagaaaaaattcgacttattatatatgcaatacaagtctcaaccttatatatataaaagagaatatggtgtacattgtgtaatctttcgtcactataatttaattaatatcttttctaaaaaaaaaataattaatattctgcaaaagaaaaaaaaaatatctgccctaattttaaaaaaaaataataataattaatatgtacgtacaaaaaatcttacaatattctattttgtcgaccggaaatcttatacaaggatttgtagcaagatcacttatttaatgtttaattaatctctctaaaataaaattaattatctcttaaaaatgtttaattaatcatcatgagctagctatatgatttcatttttattttatgtttttgaaaagtaataactaataattgtaattaaactatacatatacgtattataaatattcttgtattagcatagtttgtaataaaaataaaattagaagttcaaataattgaagaattacaaatacctcaaatcatattagttgatatatagtatatatatatattttgtatacaaattaagaataaaatttgtccttaagatttttcagttaagatttattttttaatagaatataatcgtaacaaaatctcacattatttgaaatttggtggaatttcttgattaagtaatactaataatatcacaataaaatttattaatgaaattataaaagacctttaaaaaatacaaaagtgtatcatgtttttctcttaattttgtttttactattgtaacaataataaagcattgttataaatttattggagaaatgtaataaaagaaaataaaaatctttggggaatttttaaagaatttatttatatatatatatgctttatttccaaatttaccatctaaagtttttatttataaaaaaatgtttgtgaagttttaaacttacaaaaaatacaaattttttagcaaaaagtaagaaaaataactaaaaacaataagaaattaacattacaacgattataaatcaacgataaataaactataaaacaactaaaagatagtttgttattttttattgaagatgtacttttttaaattaaaaaattcaaagtgtaaaaataatttttttaaataaaacatatatataattaaaaaaattaatcaatgtaccatcttttaatattatagcactcgataacaaaattaatatttagtaaattaaataacacctaaaaagaatatatattgagaattttctaaagggtgatgttggttgtgcctttctttggggttttttatgatccttttttgtcggtgtatgaaactgttatttagtcatcaccttgtaaaatttgtacgactttattttcgtcttaccttttaggacttattcttccttcttgaatgttccacttttttttttacatatgaattatttttggagagatcacttttatttattgtaatatcatttttaatgttatatatctttaatttcttttggaaatttttgacaaagtataacataactacacctattttatgtaataataataaaaataatataattggaactatacttctacatattaatgaaaaagagagtaagaaaaagggtgtgaatgaaattgatagatgcaaagctttgactaggtattaacatatatagtgttccaaatgtggagggaggtcttatcatttatatttgggtagggtattttgtatataaatatcattatgataattctctttattaaacaaaattattgatgtacatatcccatcatggttgggccacataaatagttgtaatttttttttttttttgagaatataaatagttgtaattaatatatataatgaaaaaaaatgaaaaaaattatatattttagttactaataatatatatttataattataatcaaatataatatttattaataacatatggttcaaaataaaatctcaagaagagcatttttattttttaatattaaaagtttattttttgaatctctaccaataaaatttgtatttgttaccttaataatttaaattattcattttattgttacattttttacattaaattatatttaatactataaaaatacatgtttgttttaatttttaacatgttatataatgtagaaaacaaagtacgtctcttccccctctcttacaaaaaaaaaaaaagtatgtcccttcaacttaaattttaagtccgctactgataattatgtaatattttaactaatatataacattaaaaagagactacaaatattatattttatgtgtgtctacatttttattataggtacgaaaattgaatatttgaaccctaaatttgacgatataattaaattatttatataaaatataaaagaataaaaactatctacttatccaaaacaagaaacacacaaagtggtattgtctcctttttaaatggactacttgaaaactatccacaacatagaaaaattctatgagataccctcataaaaataatacaccatacatctccttatgtttttggtataaataatcataattatacaccatttaaaatatttttagaattatttgaaataattttaataattaattatgtcaaaattaaaatttaaataaattattttacacgtatataaataattatttttaaatcattctcacgcacattaaattattcaaaatttagaaaatatttaatagagcattctaagcactggtgatacctattagaatatctaacaactggaggaaaaatagtattgaggcgcaaaattctctggtaatcgtcatcgatgtaaggagaaagattgcaccatcgaccttcagtctcgttaaggggctaaaccccctcccaatcgccccctctaattaaaaacggttgtgaatttttcttcttgattttttctgctccccaagcaaagagtgaaagaactaaatgggttgtgttaatgtcagaatttaatcttatttgtatctatttagtgacaggtctactagtttcttttatctcatcatttggtattcctaatctatttgcttccaatacttcaacctatctagaaaaatttacggttgtgagaaattaattacaatggttagcaatttttttatgataataattaaattaaaatatataaaatttaacgtttaattatatcaataataatatatggtgtctattttttaaaatgtagaatatagagatagggatgcatacagggcgaggagttggcggagagtgctcctcccatccccatctccattaagaatttcaatttctatccccgcttatctcttttgagagcagagtgagaaagagaatctcttaatataaaaataaattttattataaaaaatttaaatgtataaaaatattaaattacataacaattaaaatttaaaatgtttcacattatttattattcaatatattattatataaaacataacttaaaaaattataaaaataaccctaatatactaaaaatatacaatcatatattataaaatattaagagcaatttgcggcgaaacccccttatattttaatttttatacacttatctctcttatcttttttttggcggcaaaaccttctaaagtttatttttgtttttgcaaatttaacacgcaagttaaatattaccgttaaatatcaattggatgaccactgtatacatctgtatatatgtagcaataaaacttcaaaatcgatacagtagtaatccaattagtatttaacagtaatatctatctgacaccttaaatttacaaaaaaaaaaaaagtaaacctaagagggttttgctataaaaaaaataagggggttaagtgtataaaaattaaaatataagggagttttgccataaattcctcaaatattaattaaaataataagcggcttttcgtcgagacagggagtatcattcacatctccatccaatttaatattttgttcctcattaagatggagaatttcggtaccattagggacgggtcttcgcaggtccatgtaatgggaatgtgcatccctaaccctaaatatagaaagtgagtgagagagataaaaggggcggtggtgcatgtgaagaagtaatgggtggttgatgttagtgaggcggcagaagaaaggtttttggtgcaatgaattgaatatgtcccatgtgcctttttattttgtgggctccccaatctctttttctacatacccttttcaatcatcaactcatcaaaacaaaaaattaactcacgtttaagatca

SEQ ID NO: 25367 - DNA, 1979 bp, Cannabis sativa
acaaaatctttgcaacagtggacttagcagacagagatctgactgaaccactatattcctcttgttctcattattttccagtcttttactaagtatttgtgttcctgatttgaatcctcactgttctaggtcgagtactcgcacttattacatatttactattatcattataatctatttttggtgttgtaaaattccttcaacaacatttggctccgtccgtctgtgggaacgaaatacaatactttgttgatttagaaggaaaatcacaatggctagaaatcagaaaaatggaggtcttaacaacgaattaatcaacattgggatgatgaatgtcccactgccgggaaatagggtacctcccgtggatactatcaatggcggcgtgggacggacacgtaacacctctcaacttattccctgagactgctgctccacatgttggggaagcatccacaccggtggctacgacaggacatttttcgcctattacgcatgcagtagcatccgagggcatcattcaactaaccactgatcagtatactgcaatagaggatcagatacgtgctttgcaggccgaaattgacggacgaaataggacttgacgtcctcctcgagtgcccactaccctctcagataacccctaggtaacaaattctagacgtcgaaataaccgtactcgcagggaacaaaggacagataaagaagggctcgatttgaatcagccgatgtcaagagaccaatccgcgaggaacttcaaccgcgaggcgcaaacagaggaagatccagagcgacgtaatcctcgcagcagaccccaaccacaaaatgaagagaatgatattgattccggctcttcgtcttcgcaaagtcgtactcccagcaggtacaccacctcaggtttggtggaaacagcgcaaggagggctataccaagttcgtaagggcgatcttcatgatcaccttaacactattttgagggtgagttctcagacgccttgtaacgatgaagagcctcgtgatcctcagttgggcgatcagggcatcaataactgcaccaacctgcctaccgcacaagctgcgactaccagagttaatatcccagcgaatatgctgcagtaataacggcacctgcaacgactcatggcaacactggcctagcaaggggtatggatcagggcatgcttttgcaagcattcaagatgatcgagcagcaaagaaagcccatatacaagctgcatgggacttctcctttcaccacggaagtgcgacaagcttgattacctaagggattctgatcattcgagtctctgaagtataaaggtaccactaatcctatagattatttagaaaaatttaatactattatggaagtggaccaggtaccccagcttgcgaagtgtcgccttctcgcggcaaccctggaggataatgctcatgattggttcagccaatttcttgaagcatccatttcaaaatgggagacttttttcgacctctttctcacgcactttcaagccacgatgacctataggccaccctataccactctggctaacattagacaagaggtcgttgagtctttacaagattattttaaacgttttaatgccgaagtaacaaaagtagagaaggcccccgagtcttcgctagtttgtatgttgataacatgtgtcttgccaagaactgatttctggaaggagctgcaggctcgaagacttgaatcgttggtcgagattttcgctatggcagagctgcatcagaggattgaaaattttctagccgaactagagaaagtaaaggataaacacgagtctccagtaccgcgatcacgatcctgcagtcccagaaggaaaagttccagggagaggagccccagaagacgcaatctgcaaagacagcgaagtctgaagttggccaaatcccctccgaagaaggagtcatctcccaagaggaaaagtggtccacgttttgtgaattaca

SEQ ID NO: 25368 - DNA, 4509 bp, Cannabis sativa
  modified_base (26)..(42): a, c, t, g, unknown or other
ttagggtgttaatcaatatacttgtnnnnnnnnnnnnnnnnntggtaaaataatttccaacatacctaagtctagaggtgggctaggttttcggaagacggtggaaatgaaccaagcattccttgccaaatgtggttaggctcttataactgacaatcaatcattgtgatgtaaagttttgagagcaaagtatctgaaagggaagtcgttcttcaaatgctcgtccaagaactctaactcattgttttgaaagaatgttgtgaagactaaggaaattctttccaaaggagcctgtaagctcattacggatggcaaaggtacgaagatttaggaagacccgtgggtaatgcatggttagagctttttcacccatcctttaaacgatagaccagaggggttggaaagagtagcggatctactaacagacaatggtgattgggatgttccaaaacttcagaatctttttcatcgggagaccactattaatattctcaagggtggaaaaccatgaggctgaggtagagacaagtggaattggactaaagaacctaatggtttcttctctacaaagtctgcctaccttctctaggccttaaatcacgctcctcctagcaatgtggcttctgccttgtggaataaactttagaactttaaaatcttagaaagacacaatgtcttgtggtggagtatcctctcaaatgcgttgcctgtctgctccattcttgctaaaagaatctagattcaggaagttttgtgccccttatgtggttaagggaggaaactatagagcacctcttcctctactgcaactttttcttccacctctggcgttcgtccccctggggtgtgatgccagtcgtggactctagggcccagaggtgggattgggttaaattcttatggggactaaaggataaaggggtggatacaactgaattgtttatgtatgtttcgattgcagtggacacgatttggaagacccgcaatgagaagattcacaataactctgtttgtaacattaagcattgtattaactatatttctttgtgttatgcaaattatgtttcttgtttgcttccttcgccgatgacgttcgcttctcctagttggtccccccggataaatggattaagatcaactgtgatgccaaagttggttgtgattcaatgtgcgttgtggcggtggctagagatcacaaggagtcaattttgtgggtggctaccaatcagctcaacttctttgatctgcttattggagaagctgcagcttgtttgttagccctagagtcagcggtcctttggaagcactcttttgtcttggttgagagtgaccccgtaacggttatcaagaccctccaaagttctatatcagtttgaggtattggtaactacataactcaatgcattcagctctcgaaccttttgattggatgtaattttgcgttcatctctaaaaactgtaattttgtggcccacaatattactaagtgggcttttgctactaatgttactggaatagttgattcttcttccatttcggtaaaccttttgtgtaacgaccaagattcctacctcgtttttatttatatattttagtttattaaatattttatttttcttaaaacggctttttagtataaagtactcgaaaaaaaaaaagaaaaaaaaaaaaaagccaaattatatgtcctagataacgacaataaagtgtgaggaaacaagaacgtcgttttataaatgaggcctcaaccagccctgcgctaaaaagaaaagcccttcttcagagcaaacttgaaactgaaaatggcgaacactctcgtaaatagagccgcgaccgatcggaacctaaacaacatcttcaagctttcattgaacttcttcagaagtttcagtactgaatcgcctttacctccttccccaagccctagcgcttcgaagaaacccaaacgcaaaaagaagaaaaatctcttcgaggtggctcagtttctgcccaactggggtcttggctaccacatggccaaaactcactggactggggtctcttacgaaatcactaaaatcaatctctacaaggtatctctttctcttgttcgagttccttttacttaattttaagcctcaattactccttttcccatcatttgttactacagttcttgaaataatctgctagaataaccggttaaaggtcaagaattgcttttcctacacgggttttaagggtttaagaatttagaattagaaggtttagtctttctttatttccctattatgggttttaagggtttaagattaatctgattggtcttgtttcaggatggtagacatggcaaggcatggggaatcgtacataaggacggtacgtatttttgcttgttgtattgagattagttcttgttcttatcgttttatgtaagtttaaccctcacattactagttaagctacatttcattgttaataaaagatgatatttttaggtttaaggatatgttttatacatcatgctgccactcaaaacattcacaatcttcactcctagttaaagaagaaaagatgaaaaagaaaaagagtaaattgattattgtatgggtttctttttaggaatgacgcaactgtgaatttgataacaagttgatgaagtggaagtgtttatgccaacgaaatgggatttttccgtttccactttttagtttcatactttcacgaaaaagaaaaaaaaaaattactgctttcatcccatcccttgaaaagttggagagatgggctagtgattccttaagctttggaagtttttcttatctttgtttaaagtttgaagtattggttcatctgctgttcatatgtagcaactgcaagatacaatgcttagtgttgatttttatgtatacgttgatgaaggtaaatctgtagagagtaagaaatcagaagatatgtatagagatagagaaaaagtaccgacctaactattgttaaaaaaaaaaaaagaaaaagaaaaaaacattgatggactttgttaaatttaagtttcaaatcgtttggaaccacatagaaactgaagaatttttgtgtgaaatagaaacatcatcatgctctaatgatggtgttcatcttacatttttgaaacaataagaactggcactattatacttgatcctatttgactggaaaacttcaatattgagtcattcttatcatcttctattttcaaatacatgatgttaatgaactgaattgtatgcaggcttagcagcggctgatgctcccaagaaaataagtggagtccacaaacggtgttggaagtacattccgaacttaaccaaatcattagggagtgagccaagcctggctaaaccttcagaaactgtttcaaaagataatgcccaagcagcttgatgaaattccattagtgttgtaggtacctttttttggatttgattatttatcttttattagctcagttgccttacacaccattgtagcatcctcgttgtttgaaattagagaattttggcgatgcaaattgttgtcaatggactggtttgaggcaagaatagttttttctatgagatttcttatcttttgccggtcctagtgctgtttgttttagatggcaccaggttctttcagaattcatatccaataacagtgctttagcaccagctttaggcgtcatagctggcttagttctggatgttagttttggatatttctatatcgtttccctgaaaactatttactttacatgtattaatttcatttatacaaacttatatgtggaagtggtttgtttgccatacaatgtttgaaactgatatttctaagagatatggatctaataatgggattccaagcaaattatgtgaggtgattgtgtagcaggaaccgaaggggacccagctggaagtttacaagagaataactcctagaaagtgtaacttaagtaggcctaagttattggaacttagcattgtcaaatcgatcccttctattatcaacaacaagggaaagagaaaaggaaaaaaaacccagagaattgcatagacataatattttgttcgaattaagtctctagtttcttctttctcatttatcaaccgaaattttacccatttttaaaaacagatctagatattgaggtggggactaactttccatgatgtaattatcaagctacatcttttggtgtcaaataccttgtcggttcttcatctcatttaccaagatggaaagccaatattaaaaggaaaaggcaagaccataaaaacggtacttaagaaaagggatataaagaactaaagggtaaagtgaggaaaatgaaaacggtacaggaaaaagggctaaaaaaaatatagggtaaagtgaaatgaaagagatagagatagagaagaaaaggaaatgtggcaatggtaaatagcactagcactagcagcactagaaagaagcaactatcaatcaactcactcattatgccgcatgcctagcctttcactttcccacaatccattctct

SEQ ID NO: 25369 - DNA, 3592 bp, Cannabis sativa
catgatgaggttgtcatgcttagattcatcaaactggaaaatcttgaaaattcttaccctgagagagtttcttaaatgtcatgttgtgaagttccattctgacattgtctagttgttcatttgcagaagtcaatgacatccatgcctcatagcattcttttgccttaagctggcattgtgtggtgagttcttgcaccttcttttcatatttagctgtagactttgtttggattagtttgatctgcaaaccatagactttaaattagtaaattacggcttggcaagctttataactcttcatatcagttttatctaacctgagctgaaggaactactatgtcagcggcacagttgtcacatttgagagattcatgtgtagtgggatgtagatctgcaattaattgaagtgtccttagaaagtaataacatgaggaagatatcttcttcactacatcacaaatcaatacaaaatcaaggaagaaattacaatagaaagatacctgatacagttggtggtgcagttcttatgccaattccactaactgccgggcttccaataaccccttcaaatcttataacaagtgttctgtcttcttttacagagaccctcaagtcaactaattgcaatggcttattggctccagcaacagcaaaaatgtcaaaatctgacaagacctgcagtattcacaccaaaatgaaaattgttcctactttataagtagcaaagacactgtataagcttttcacttaagagcttaccatttcttcctggataaatacattgaacatcctcattccttttggcccatttgtgttaataatttcagtgaaatgaagatcaacataatactctccaggagaaagatcatagaaccgataacagaaatttcccaaacgtgctgactgatatatagacggataatctccagcatcagttatttgctcattggttcgtatgacattccctccctcataataagagtctttcagtaattttaagctagagcctgcttcatgaacaacctcccctccagcattgatgaacatcacatattcagctgtttcccaaatcgttacaattagataaatattgtttgatttccgattactcagtcaagttcatacgtaaaccaattatacacatataactatacaattaatatcccttggataaggttatgaggaacaaagagcaaacttcatcaatttctaaatcttacatttcactaacttaaatgggactactttagggacgtaactaagttcctccgaaatgggactacttgggctcgctgagaaaatatattagaagtgtagattctcgtttcctgaagtttattttcggattcgagtattttccaagaaaaacaaacaagaactacgagaaaacactaacctgtggaagtgggtctcgttaacccggttgatattacccttgcaccagagtcgcaaagcattgaatccaccatagaaaaatcaccctcggccatggaaagatctctcgaatcttgaatcttcggatcgtctttacgggtatcagtagccaaagaaaccaaagaggtcgaagttagggtttctgagtcttgataagaatctctgaattgggtctgttccatgaaatctggactttacgaattaatgcaaaagcgttggtttttttttttctctgagaaagaaaagtagtcgttagtttttgagaagaaaggacaggagagaaatgtttgtactacgaagatgaatcatttgattgctcgttcaaatttgaatttagagagccgttgcctgtccgtaaaattagaccgttaccttcctttttaacccaaaataaagtttcttaaaatgaccttttacttttgaaggtaaaagtaaaaccctcaacaaacttgataagaaaaaaaattatttctatgtgggatcttaattcaaaagatttagggaaatttacactttgcctaatttggccaattttttaacatttatgattatgtacggttaattaaacttttttttttaaaatttgtttttcatttttaaattttaaaaatttgttaattacaaatttacctatgcatcctggtgtcatactttttttcctccattacacgacatctttcccttcttcttttctttttttcgtttttcatttttttttctcttttctgcgtgtttttttctctttctataacccacgaacatcaaactgtcctcaactcttctgccctaacccattaatttccaacctcccatttcagtcacgatctcccatctttttcataattgcatttcgttttccctcttttgtttgttttctttcctataaatgactaccactaggacgggttccaagttcccttcacctgctaaaaaaatttcaaaaagtcctaaaaaacctccttcgaagtcctctaaaggtgatcctaaaaaggtcctaagaaacctccttcgaagtcctctaaaggtgatcctaaaatgggtttgaaagacattaagaagaagggaatggctgatgttgctaagccttctggttctaaaaaaagacctcttccagctaaggttgaagctcctaaggcaaaaagaaccaaaacttcgaaatctgttaaggatgtaagttgtctactgttgtttttttatttttttttttagttttttttttcttgttgtttggttttttgtttttgttttgtgttttaaattttttttgtccataatgttttaagttccctccgattctgacttcgatgatgaaattcctgatgtggaatcgaagcctaaagttaaacccaaggtttgtatattctttcgcattttttttctttttttttaagttaaaattgtttattatcatttttttttttatgttttatttgtttgtattcgtggtttttaagtattttcatatttttgtgtgtatttgtttaggtatttcattttatgttattttttagttttttttgttcttattctgctattagtttattttttgcccaataaaaccaaactatatattgttactgtttttcattttgggttttcttattagttgttttttagttttaaatgtgtttttttacgatatttgttgtttttgttctcattttttgttgtagaaaggttttatgttttttatttttaaatccttttttgattgttcttttagtgttctattggtttttattttaaacagttgtttttatgtgatttttagggcttgagagcttcgacttcaacagaaaaattgtggaaagaacatagatagaaaactgggaagaaaagaaaaagaaaaatagttatggataattagagagagaatatgtgtgatagagaaatgggagcagtactattgagtaccagtgatgccaagcacctttcataggtggcaccctacgattagttagcgatattccttaaaagttattttcttaaattatatgagacatgctatttaattacaccaatagcggaataaggagggatgctaagtactaatgatgcattttagcaattctcagagaaatgaggaaaaccaaatcatgtgctgacatcattaatgtagtatttttgtaattttaatagggaaatttgagtttctatg

SEQ ID NO: 25370 - DNA, 2940 bp, Cannabis sativa
  modified_base (1778)..(1781): a, c, t, g, unknown or other
  modified_base (2032)..(2058): a, c, t, g, unknown or other
caaacacaggattactttcagcatattccaatcttgtccagtccagtccaatccttttcaatccaatccagtccaatcctgcgtaccaaacgggcccttattttctacattttgatacctctttctaatctcacattatcttctttttcttcttcttttctcattagcttatatttagaaataaataaaactaaaatagtatatataatataaagaaagaaaaaagaaaacccaagacaaatagaaaaggtacatataaaataaaattaaattatgattttagtaatgtgctttgaagaatagatctaaccatgctagaaaattgcaatatgacatgaatattgaaaacgaacaataacctcaattgatttgaatgatattaatgtatgtgacacaaattaaaacatgtctaagtgtttgttcaatgaacatattattcttacttgaactacttaatgtccaataagggattgaaatgaaatgcataacatgtttattgaagtagacaaaaatctccactgtcaacagaatgaaccttatcatgactgtaatagtctctatagttggatctaaatcactggccttcagttgcagttttctcaaaaaatgtcttcttcaaccaatcaaatggctgttacatgttattaaaaagaattaggataagtaattaagacaaaaaggtcagcataaaaaaaaaaaaagaaacagctaaaatggaaaaaaaaaaagaagcaaattcatgtgcaaaaattgggaaaatgttatacatagaaaaatctcattttgttcaaactaaataagaatccaagaagaaaaggcacgattcagaaatattaaacaaaactaatgcaagttctaagaatatattaaacttcttataattgattattttaccatgagaaaattaagatcttccatataactattaccaagcttggacaagaattgaaaatttgaaatgatggttaagtggttcattatttattcttttcagataataggatctctgtctatcctggcaatgtatggaaccaaaaaattataacaattggtaaatttagaacccagatgataaaaagaatctagtaattagtttgaagcacaagttctatattaaatctaatttgcttatatacacaattttagtggtgaaattcattaaaatctaaaatccatgataacaaaattaattatcaagccacgtacctaagattgaaagcttaacgtttctaaatttgaggtctcaataatccatttacggttacaaaacaaattaagaattctactaatataaatttttaaaaaaccattcttttctttcaccaagcttttgctaagaaacaaatcaaaatcaggtttattgggtttgtgaagggaaaaccaagaattaaattgcacaatttggtaacgcgtagttttgtgtttggtggtcaagaaaattaaaatttaggtttgacatgaagtgggaaaacagagagagagtgggaaacctggacgagccaaagtgcgccggtggtggcggcaacaccccacatggcggcggactgaaattgtgtggactgaggccggagaaacttggtgaatactgtggatcccgatgcaatccctccacccgccatttcagaatcaacacaaacgccttacaaaaacaaaatcagaaggaaattatgagatggaatggagctcagatgcacaattcccaaatcgcaaattcttacatacttgcacggtaaggtcttttatcctttacctcatcctattattattattattattannnntattattattattattattaggaccttttttatttttacaatttaaaattgtttttatttttgtatttttacgtaattctacatagaaatccatattgcaattagcgctgcaacctaaatcgtaacaaaaaatcgtatagcaactcacataaaaaataccggataaaccaccttagaaacccaaaccgtaaatttaaaaaacaaattaaaaaaaataatatatggagtaattctcattattattattattnnnnnnnnnnnnnnnnnnnnnnnnnnnattattattattattattatgcctcttaaaatatacactttgttaaaaatttatctttaacttttacatttacagaaatttattcctttgttaaattccgtcatattattctgtcattacctcatcctattattattattattattattattactaggcaatatagccactcttcgcgcgactaatttaataatttgtagtattataataaataattacttaaaaatataattttaatatataataaaattataaataaattatcttatttcatattattattaataattttatttattaagaagtttaaaatttattatatgtactatttaaattttttttgttttttataaaaataaataaataggatggtctaaaaaaaaattacggtgttccccataatgcatcattttcatatctcgataattcaaaactattgttattattgtatattacttgttgtttcattgtatctcacttatttttatcaccgtacctcacccgttgtcatcactctatctcatcccttgtcattactgtagttcacttgtagtcgttactattgtattttccaaatctaaatgttaatcttaaatttcatctcaaattttaaacatttttaagacataggagaaaattcattagtttattttgttactattaattaatatattttaaaaaagtgattattattttttaaatatcttaattaaaaaaagaaaaaaatataaaaaaaaaatgtgatattttagttatgagaaatgtcaaaaggcaaccctcattggtatcatactactattggtatatttaagtatagcaggtcccgtaaaggtctcgtataactttaaaaaaataagatttagagaatatcgctaaccaatc

SEQ ID NO: 25371 - DNA, 2855 bp, Cannabis sativa
aatattaattgtttcctaggagttagccttttgaggtaatagtttattttagtttatattttcaatgtttttattttcttcaaatatattatcggaagacataatcaacatgcatgcttttcaatcgactcacctaacaaacattaattagtgatcagtctattggttaatatgaagaaactaagataaactctaatatatatcaatatatatatgtatggcattagagagagtcattcacttaaatattcacattataacaaagaaaaatatataatacctgtgctgaaatcgattgttttttcggacaccaattgtcaatatatacattttactttaccaattttcattttatgtgtaatgaatttatctcagaagaaaaaaataaaagtttacacttaattattatctatatgttcgataccactatcccattgaggatagcttattgcccctcatgatttttcaaaaacacataaaaggactattcccactgggcaggagttatatgtggtagttcatattggccccctaaattaaactatataaataaatataataaaaatgagacaaaaacgatggcatagtattggactcatttgaagtgtgcaaaaattgagtaaaatggtatagatagagtaatgttaattatatttaggatacaattaaaatgaatatttaatttaattaaaagtaattttataattaattaatggctaattttatagatgaatcaattgctcttttattaatgtatagttttattaaataataaaataaaaatattattattagggattagtgatgctcaataccactacatataacaaattgcaaatgacaataacgatattttataataattattaaattaaaatatgtagtatccaatacttaattatataatagcaatatgacaccacgtataccaataaaaactacactttgtggtaataaataaaataaattttcaataattgtttggtagtatgtttggtgaaaaacaaactaatgtttaatttagtatagacacactatattttattacaaatttttaatgtattaatacattttgaaaatatttctttctaatatttaaattttaataattgactctcttgttattaaattttatcttcgcccctgattgtaagcttttaattcctaatgggaggtgaagttcgagtaggactttgtgccaaaaactttagctcgaccttgggcatagtcagcgtagaggtgcctagggtccacgtcctagctcagggcccgaataaaaatatttccttttaaaattatacatttgtttttattgattttaaaaatattatatttttttaaatataagactcctaaaaaatattttttttcctatgactcactatatttccgccctacaaaaactatatatatttatattttttcttttatagtgttaatagtattttggaagttcattaaaaataaaactaaaaaaaagtgaccaaatttggtaatgagagagtagtctacaaagggacatattccactgtaatgatcctagaaacgttacaaagcatagtccacaatgataccctgaaaacaaaggcacaagctaagaaaactcagagactgcattattgatttctcaagaggaggaaattttcttgaaagcatggacgacattttgggagtctccattgatgatgacattagaatgcactcttatgatccagagtgtggagccagattcatctcgagccaccgcacttagcatgctcgaatttgtctcgcattcaacatcaaaattcactgtcaccctatcttaaggacacaatatttgagtagctattagagttagctagttgcacatttgtaatacgtgaaaataaatctcatttttagctactaaataaaagaagtcactcctaattacaggcgctaatgaattaatttaggttcttattgatttaacaaatttaagaaataatgttgtaaactttttacatattctttagtaatatatctgcaaattcatatgatcattagtattttataagaacgttaataataatcattttttaacaaagaacattaataataatgatcattagaatataaaaatttcaataactgaaatgtatttgtttgctatctttctttagtatggatttatttatattcataaactatttttatcactcactgtacaaaaaatattcttacttttagttacaacaaaatttgtgactaaagataaaaaagattgtggctaattataaataatcattatcgtgttgtgactaataggtccatggattaaagtattagtcacaaaaattacaatttgttgtaactaaatgtgtttttagtcacaatatttgttgtgattaaactaaattagtgataatttgtaactaaatactatgttttagttacaagtaattttttgttatgactaaaagtcatatttcattacaaaaaatttatgttgtgactaaaatgttgtcactaaaaagtaagtacccaactaatatgacaatatccttgttataagatagagacaataattcttgttaagaattgaattaaggataaatctaatagaaatctcttataaaaaaagaatacgaaaagatacacaccataaatttatagtaacaaataaaacactaattattgttaaattaactatattctgtaattaatacctaaccaaaaaaaaactatatattcagtaatagaatcagtgttatgtttattgtcatttaaggcaccaataatatttaacaccacataaaagcataaaatatattattattagtataatttaatatcaaacttatatagaaattacaaacaaaagatatgataac

SEQ ID NO: 25372 - DNA, 2497 bp, Cannabis sativa
  modified_base (713)..(713): a, c, t, g, unknown or other
ttgtccttgtaatattttgtttagagttgtaattgtctttgtcttttattcatcttattttattcttccattgtaatctatctattatttctaataataagaagataaaaatatttgaattaattgagaatgttacattattaatgataggagttataaaactaaattaagttcgagaaaaatttaaaaactaagaagacaaagatgatgatggagaactcatatagagctccacatcatcatatttgtgctttcttttatatctaaatatagatatatagatatatttatatacttattcaaaaaaaaatatatttatatataaaatatttaagttaaatttaatttttctttatcattttcttgttgatttttttcaattttttttttcagcctatgaaacaaactcaatccatataatataaatataaaaaattttaaagctcaaaattttctaatactatcctatttatgggtaatatctattaagagttaagagtacacccatatatacataggggtgtttataaaatatccaattcaatttgcatgatctaatctaatctacaaagtgcgtattagattggattagaaaattcaaaatctgcacttgtgtggatcgaatgttgattgacatgtaaaagtgaccgaatcaatccaatctacatatattttatgtatatactttttaaaattatatatacaattaatantttaatgtaaaaaatagtaatttaaaaatctaatacatatgatacaaatatattttaaaacttaagagatgaaatgtatatttcattttttttaaagggaaccgatacaggttaaaataacaaaggtaacaaagttacgcaaacaacggaggatttttttttcatctataaaagttcattgtctatcctaatggcatgcaaagatactccagaaaaattagacaataaaaccttaatatcaaagaagaaaaccttaaaactgagagttgtgactttcgaaccaatagaacacctacaaaataaagaaaaaaattaacatataaaaaatatttgataaaaatataaaattttatataaatattgtcacatagaattctttattataaggctagaacttatctattctcatttccattactgaaagtgactataatacatttgatgtgttattattagaccgaattgaccttacaaaattaaactagcaaaatattggctttaaaaaactaaaaactaatcatactagccttacaaaatcaaactagccatactgacattataaaactaaaactagccacattggtcgtacaaacaaaactagctaaattggccctacaaaataataaaaaaaaaacagccatttataaaactagacatattggcttacaatctgaaatgtcacattagctataaaaactaattaaatttgttcttccttagaatttgttattttatttattttagtatgttgttgtagacatcaaacaacaataatttattttattttgttgttagttatgtaagaaaatatatatttttaataaatattatataattcaatattaaaaagtaaccaatctaaaataatcaatccaactcgcacttttgtggattggattagattggattgaattggagatatgccgtagattggattggatccaaaatataaaatccgcacttagtgcggatcgaatgcattatgagcaaaatagtacgaattagattggatgaacactcatgtgtatataaatatatagatatgtatgtataaacatatatatatatatactaggttgatattatgtgcaagatatgcttagtttttctttttttcattaagtaattgttaggctatttttagcctaggtttcgggccgattttagagttgtttttttttgttaatgttatcttttagaatagttttatgcttgatttcccttgtttcaggtcctcgaggtattagagttcaaagtctatcaattggtcaaaacatgaggcaatctggagaaaaatctattgaagctggaaatttgcttcagtagtcgcgaccacaaaaatccatagtcgtgacgaattatgtggtcgcgactatgaagctagacagaatgcttgatttttgagttttgcttatggtcgcgatcaggctttatgtagtcgcgactatgggctaaacacaggaggttttggcaattttggaattttgccattcagagatatcagtcctaattcctatttaaggatcttgtattttagaagcaaaatactcataaattgaatcctaaaactaaaggaggtagcaaaggaagcaattgtggcgatccagagcaagatcaccaactagttctttctttttccttatttatttctttatgttaaattttgtttcacttattattatggatttgcttatgaactaaattcccaatttagggatatgatgaatgttagatgatgtttcttcaatttagttaatgtgattattagtttttcttccctatat

SEQ ID NO: 25373 - DNA, 8064 bp, Cannabis sativa
aagttcaaaaattagattagaacttttaagctaaacggtcgaagctaggaatttattggagttttcaactcattgtggtatcaagatatgactttgtgtaaaatgaaagaagcagaaggatcagaggaaggaaaagaatttgaagaattagaaggatgctctaatgatagtgtgatgccactcaacggaggggaggaggaggcaatgattggaataagtgctctggcgaaggatgtgcaattatcgacagaagagactgggaatggcgacaaaacctttgattgatggagataaaggacacaaatgtttttgaggggagcaattattggccattaatgcaagtgcagatctcaaggttgattgtcgcattggtaatgttatgagacgccaaatggtgcgagttccaaaacactggaggtgaacgagggttagtcgataagccttcgaagaatattctagcagctatttgaaatattgtgtgggtcgagcatcatcaaagacttagagaagcatcatcaaagacccaaagcctaggatttgtttgaacttaaaaggcttgtgtcacaacaacaaaatctaatttaaccatttggagctccataggaatgatgggcggaaaatgttttgggcctgtgggatctcaaagttatcctttggagccaaatatcaaaagtcaaagcattgggcttttggttattggtgggttgggagttttgtagaagataaataagcttttggggtatggtgggctggagattatgggtcagcatatggggcttttggaatacggtgggttggaaagtgggagctattgtgttgggctagagggttgttaaaataacaaattgattaaggtgaacgatccaatcagagccataaaggattttttttaagaaaggttgattgctattcatcaggttgaagataagagagagtttaaagacgacaataattcaattttgggaagaatatggtaaagaaagcaaggtgaaggtctcaattttgcacaactcagaggaagatgatatagaagagaaagaagaggaagtcactagcaagagaaacaattgggaaatcaagggtatttcaccctgaagagatggaagaagaagaagacccaagaggagaggatatagtggactatagttaagatagttgctcttttgaagaagacaatgatgagtgttcaaattatgagagtaaagacctagaagacattatttgtaatgtgaaaaaattgtggaatgagttaggcaagaggacttagcaactaaaaataatgaaaacaataaagataagaaagtgattgggtcctcaggaagaattccagcaatttataaggaaccattgtggaatgaactggaatcatggctaatatgggtatgaatgtaatacaaaaggaggtgattagtgaataaagtccaatttctacaaaggcagatagaaagaagaccagagaactaaagaattttgtttttaatgtaaactaaataaagaaaagtggaattgagggaccaatagtagcttaatgaagatactaaactggaatgtcagaggtagtggatcaaagggtaaaggaaagacaattaagtccacaatatgtaagataaatccagatgtggtgattcttcaggaaagttaaaaaagagtctgtagataggagacttttaggaagcatctatagatctcgtttcaaagcttggatcctcccagcttttggaagataagggggtactctaatgatgcgggatactacaattattaatatcttggattcattgattgaaggtttttccataacaattttgattgaagtagaaggcaataatccatggtggtttatttgggtttacaattcagaattttgggacgaactagctcgtttgagctcaatttgtggtgaatcttggtgtatatggggggatttcaatctagtgggaaggttgcaagagaaattaaatagtagctcttgcacaaggaatatgtaagtgtttaatgagttgattaaggaattaagattgattgatccaaagcttaataatgagaggtttacttggtccaattttagggagcaacctatctattgtagaatggacatatttttgtgcaccaataacagggcaatctcttaccccttttgtgagacaagaggctcatgtaacacttgtgtccaatcatagtccggtggtgattaattccagtcctccaaaatggggtccttgtctttctcgatttgacaatcaatagttggaacataaatcctttcatgcgaactttggagaatggtggaggaaggcggatggggctggttggttatggactaaatttatgagtaaactgaagagcaaaagaagaaataagagtttgggaacaaagagtggaagaagaaatctatagagaaaaggctgatggtaatcgatagtgtgaaaggtagtgcctcttggatttaaacactacaagaagagcgcatggaggttaaaaaggaagggcaaaagttaatgttcgaaaaagaaagaggtgtgtggctaaaatctaagtgcaaatgggctagagaagttgatgctaattccaaaatatttcacagtttgttgagtgctaggaaagcaaggaataccacatgccacatccattatcgaacaagaggatggaacagtcctagagagagagaggaagatatagaaggtgtgatcatctatttttacaagagttgatttagttctaagaagatacgtgtgtggaattgagggtatagagcggaaaaggatccctgaatacctagccagacatttggaaagatcttttgaggatgatgaaatttaagagtccgtattcaattgtaatggtagtaaagctctagacgaatttataatggcagtgcttcaatcaaacttggaggtcattaagggtgacctattggaggtgttcaaggcctttacaagagaagatgtaattcaaggaagtatcaatgagacatttacatgccttattcctaaaaagctcaacgattgtaaaattaaagactataggcctaatagtctaatcacgagtctatacaagatcatttctaaagttggctacgagattgagaggggtgctggctgatactgttcggaaacacaaagggcttttgagaaggaggacaaattttagacgccatattggtggctaacgaggcggcaaaaaagtgtagaagcaaaaacaaaagaggcatgatattcaaaattggctttgagaatgcttatggatcgggtggaatgggactttcgagattttgtaatgctcaagaagggcttcgcagagacttagaggaagtgatcaaaggctgtctttccttggcttcattttcctttttctccaatggcacactttgaggcaaattcaatggttacagaggactacgacaaggtgaccctttttcattgtttttatttacactggtggtggatgtatttcgtaggatgagaagagataagagataagattcaagtcagccacttgcaatttgcagacgacacaattttcttgttgacgatgatgggtcattgcgtgtgctattaacggttgttcaagttttcagggtcattatgttgaatgacggtaccactaccatcttcctatagcggcagcgcaccacttcaatgtttccattgccattaacatcgtctttgctattaacgctgccacctcccaccaccactgaaccaccttgtgaaagcaccctatggaagcaccaatctatttttttttttatattttttcccctttatgttttaactaatcgaaatcacatccaaaacttaaacttacaacactaatttaaaggcttcaaacacatctttgtgtggttagttgtgctggcatattttttaaaatccaaacctctgaatatttgcagaatttcgaactaacgatgcttttatgatgatctccaatgatggttttgcgatgctcccatgaaaagctaataaaatgggagcatcgcaaaaacattactggtggagcatgcaaaagcattattttgtttaaaattttacaaattttcaaaagttaagatttggaaataaagttggaagtaaaactgataaagcatacatatatgtgtttgaaaccttatttagtgttttaagtgaatattcttggaggtttatgttatagagtttattttgattaattaaaaaagaaagttaaattagagtgatccttccatggggtgcttcaatggtgatgggaggaggtggcagcattgcagtgatgaagtggtgttcagtcgcctcagggaggtggtggtggtggtggtgtcattgtggtagatagaatgtgagcttgagggatggtttgagtgaggaatggggctgataatgggaggggcaattttgtcatttagaaaaaaaccctattttttcattaattaataaggttggcattttattttttctcaatatggcatactagaaagcatataagctcaagttttccttttaaaattggtccttcctattgtttatttgatgaagcttttgtgcctctggagttttgtatcacaacaacgtttgataagtgatattaaattagtggtgagagcttggtatttcacgtactctaaaaagtttgatgtttgaatgccaaacttaccatgtagtactaaataagtataactttcacattaagtaggaagtgctacactactagtttatttgtacttttctcattgctatgtttccttggactccagttacttgaaaaggggagtgaacgatcggggaagggttgcaaatgatgttgaaacagagcagattgttcttgatgaggaagctgggtcatgtaagggaaagatgagttcggtcgtacagatgcgtggttcaattccgcttttttggtctcaagaagtctcaaaattcccaaaacctgatattatatgtaaggacactgctttttgatgtttgtactgtaactcagcataatgcttttaaaaaatcctttttaagcctcaaggggttttgatgcctaagcctattaaaatctgtttttaaattgtaaacttctaaacactaataatcaaaactaatacattctaaaacaatgaacaataaataatcataatcaaaactaataaagtattaaaacaaatcataacagtaaaaattatgggaaagataaaaaaaaaaacttcaattaaatctttgaactagcagcctctaagtgatttcatgtggtagttattaactaatgctccaatttagttactattctaggcattattgtctgggccagtacttataaaagtcacttttattgcaccaaacttaatatgtaatcgttcttaagctagttttgttgggcacaacacttcaaacaagatcaaaataagaataagaaggttggggttagcctttgaggcaggggtgcctcccagttaggtgttagcctcccttttcttccctaaggcgtatgtaagccttgaggctttcttttggaagcttcactttgaggtgatcctcaataaagcctttttgaacatttttctagcttaatttaagatttcagatttcagatttcagctcttctgttgttttcctgttgactgcagtacaaagatatgatcccacatatcaagcaaccaagctgcattttgaagacctcgttgaaagatacggaaatccaattatcgtacttaatttgatcaaggtttacttttgattcttatttacaaattttctgatttctgttgtgatttcatctttgaacttttggagataaacagagtttcaaaattgtaaacaatcagctgataggctattggattaaacaaactcaaccttcaatttttttgcatatctagcattagtcttatttttttttttacatatttcttcacctattaatattgattactatttgttattttcccaggatattaccatttagtttatgttgttgtgattgtacattttgttctcgcttctttgtgtgtgcttgttatggtatgctttctggtcttactgatttaattcatataatttttaaaatgtagactgttgagaaaaggcctcgagaaatgatgttgaggcgtgagtatgcaaatgcggttggatatctgaaccaaattctttcacaagacaaccatgttagatttattcactgggacttccacaagtttgcaaagaggtaagcctcatttttatctaatgagagaattgttctttcttagtatgtacaataaatagtatgtgatcttttatgttcataaacaattctgatcaattatttgtgtctgtgttgtcattgtagcaagtctgccaatgtattagcagttttgggtaatgtggcaagacaagcgcttgatttaacaggtttctactatagcggcaaacctagcattattaagcgaaggggcaatcaattaagtcgaacaagtactgcgaggtatgcatttttttttattgactaacatataagattattttgaaatagcatctttacattattgatataccaccaatccgttacacgtgtttagagctgggcatgtcagatttgttgtaattgagccttggctctggagagaaaccaggtctctttaatatcatggactcactttccttatttcaataaagtttctccctattttcctctaatttctctctgtttttttgagatacactactgctgtgtataccattagttctttgaaacttaagtaatttaacataaagcctgtaaatgtgccatcacaaggtacctgctacttatgctgaggcaggaaatagtaggcttgcacaaccattttatttactttcgtgtttcttcatcgaaggtttatcgagtcattttttattacacttttattctcagggatgcttctttgagagacctgagagctagttctggggatcttgcaaggtttggaagcagtaacgagactcttagttctgctgtcaatcaagacagacaagctgattttggtgaacataacagaaatgacaacttttatagtgaagcaccatgttttcaaagtggggttctgcgcacaaactgcatcgattgcttggatcgaacaaatgttgcccaatatgcctatggtcttgcagctttaggtcgtcaactacatgcaatgggtttaacagacatgcttaaagtagatcctgatagcacaattgctgcagctcttatggatatgtaccaaagcatgggtgatgctcttgcacaacaatatggtggctctgaagctcacaatactgtatgcttatctgacttaaatggaaattttctttttgttattttgttttgctttttctatgaaacgccacttgtgttttgaatgtatggcataataagacaaatttttttgtttattattttctgtttccactctatactattgctacatttggtattttaggtattcacagagagacagggaaaatggaaagccacaacccagtcaagagaatttctgaagtctattaagcgatactacagtaatacttgtactgatggtgaaaagcaagatgctatgaatctgtatgctttcctcattataatttcatgaaagtttctttattactatttattctctcatactaacaaaatgaatgtggttgctgatctatttgataattttgctataacttgcttcttgttttctaacattaccatttttcttgaaagtttacaaaatacattttttacttgaaagtttataaaatacatagtactcatagtttctgtgtctctctttctatactatttcttacaactgaaggtactttataatttaccagatttctgggttacttcaaaccacaggaagggaaacctgccctttgggaacttgattctgattattatcttcatgtctctgggattggagacgacctttttccagatcggtggtaagcctatgtgttttctgttttatgaatttatctgtaaggattttattcatgtttaattacacatagctagtcataaaaagctaaagtgctgcgcattatgtgtggacattgttcgtagatcttaattctgttttataaatggtttagccatggacattatcattttaaa

SEQ ID NO: 25374 - DNA, 6205 bp, Cannabis sativa
  modified_base (5346)..(5349): a, c, t, g, unknown or other
  modified_base (5684)..(5688): a, c, t, g, unknown or other
gtgatacttagttttattgatatacttcatagttatatcaattttttattatgacatgtagaatacaatttttatgatcgttacttttgattatattaaatgtgctttatagttatataattttctaaattacatgaaaaatcttattattattatattataaatgttattgctagtcatacaaatatttttttgtaacatataaatattgttatgaaagtcaattttaaaatctgaaaaatccaggtggggaaaattttaaggaattttgcaattttcccctacctacagcaatgcgcattttatagctgacataaaaagtaaaaaaaatgtgtaaaattatgtgtcaagttgttactgacgcaataatctaattagcttcagttacaatttgaagctaagtttcttgcttcattcaagaactgacgctaatagagcatactttttgcttcagttctcaaccgaaggaaaaaaaagtttacgtcggtttagaaatgaagcaaataacttgactatatgcgtctgctattattacgtcagtttgtgcaaccgacacaaaatatttttgtgtcattttacaactgaagtaaaaagtcatttttgtggtagtgatagtattagtggcggggcccaccggtaatagtccactgctaataaatgggcgagaaaattctcgcctattcaattcaaatattattaagtatctattagtggcagggcattaggggcagaccccgccgcgaataagtctataaatacccgcagctacctattttccttatttttactatttttactctcagtcctttaaccttcttcagtcctctctctcaacccttctttacaaccaccaattaacaccaccaccactaccattaccgagttcttcaccaccatcaccgagtaccatcacgcaccagcaaaaacaccacacaccaccgagtaccaccacgcatcagtaaggacaccacgcaccactgagtaccaccacgcaccaaacccattcatgtaagtaatttttttttaatttgtggtttttttatattttaaagattttagggatatatattatttgtaggttttaaatctatttatatatataatgtttatttatatatatcttagttttgtgtatacatgcatgtacatcagtttgtgtacatttaagtatatttaaattaatttttgtgtagtatagatatattttattcttcatagtttatttcattttgttttaattttagatctatttttagagttgttaagaattttagagatatatgcattatttttaagatttgcagatttatttataaatgtaaataatgtatattatatatacgtagatatatataatacatatacatacatatataatacatataatgtatatatagttatacacgtataatatatatatttaaatttgtttatgtatatatattttttattatgtatttttttatatttttattttatttttgttagttttacattgagcaaaagggtagttggatttttagtagcttggagaaggtgtacacaaaatttcttttgtgaaatatatatttgtattaatatgtgtattttttattttattttagatgcattaataatttttagattgtatttaatttaagtttattttttttttgtatattaaagatgtaatattatgctggtaaaattttattaacaattaaatttttgtaataaaatttaaaaaacttctaatattacattgtcaacaacaatatcagtctagtccgcaattaggaaatcagttcttatatagaaccctatcagagtctcctccgctcggctcaaattttgctaattttggagtatttgggagttcatcgtaggagcaacaatctttttcgactcataatctcaaccaagctcagtagagaacctaacacttggtttatcgtcatcaaccatatgttacttctccaccacatccgttgggtaggacctctgaataataatcatgtgtatcaagactttgtaactcgagaccttaatgaagattttatggaataattagtttatgttttttaataatttagtttaattttgagacattttaatatagtattaatgttgaacattgttatttagtttaatttgagaccttttaatagcattaataaatattattagtgttaaattataatatttgtaattggttatatttaatttttatttaaattattatttttatatttatattaattattaatttttattaatttgtttttttactagttatagcagcgggaacccgctaataatcgccgctattaatgttattagtagcagaactaaattccgttgttaataaccattaatagtggcagactattagcggtggattcccaccgctaatagcctatagcagcggattttggagttattagcgacaaactcctctaccgctattgatgataaatgttgtagtgatggtgggagctaaagtaagaggttttgtcattttaataaagttttttttttttttttttttttttgcatttttagggaaatctccttaacaaactatataacaatcaacggagcaacttaaattgcaaccaaaatccacatagcaacctacatatatttaatcccccaaagtaatttaaaccataaattttaaaaaatatatatattaaaaattaatatatgggataattccccctaaagtaatagtaatgcctccaccaaataatttaacttcctatattgatttatatatgtacaaggttaatgttacgtgcaatgcacgtataattagttttttttttaattaggtttaattaaatgatgttataataagtgcaagacatgtgcatgaaaaatttttaattattaggtaatatatttttattttttaatttttaaaataggatttgaaattttgatctttaagaattttcttcagctactgcgaccatattagtgtgctctttagatgtgattatatatatacgtatttatatatacattaaaaaaatgaattttattgttatatgtattttatattgatctctatatataaggattatattagaaaatattttgacaaaatttgaatttgattagataattaattactttcaaaatataatttttatatattatgtctgaatatatattaatttttaaaaaataataatagtgatagatacaatattcttaatttatagttaggagaatgtacttataataaagtgtacaaattattagaaacatatatattattaattatttttaaaataaaaattgtcgtagtttaaatatatattttatatataaatgtgattatagatagatgtaatttttatttttaaatataaaatatctgcataatttttatttttaaatacatataataatattataaaattaataaagaatattatatatagtaattaaaatattctgttaaagttaataaaaaaaactaaaaaagttcgttaaaccaaaaattttgttacatagcgacatagaataacttcactttcaagggcttatctttgtgcgctaaaccaactgcatgcatatataccaatgaaggatcctgtcgagacaaacaaatttgatgaacttagcaaacaaatatgtgtctctgatcatttggccaccaaacaaacaaatcaagtgctttcatgttcatttttcattattttattaagtgttgaattattattgccgacaaataaccctaatattattggtatataatattataaggtctcttggagtattcaaatcgcacaagtagtttcatttaaatggcatttatatatgtatcataatagaagaatgcatctaattcataataaaaagacaaaaaaggacttgtttttgtataatttttttttttttttatcttttgtgatacttgacactattaattgtatggcaccatttataatgtttaactacttctttagtattttatttatcatctctaataaataatatataatttaaatttaaaaacaaaatgagtaaattttataataatacttcaacacatttaggctaaatttaaccctttgttgatagaatttgtaaaaaaaaaattaataaaagcattaaatttttattaaaagtaaaaaaaaaaaatctattaattaaatatataaataaaatataaaaaatttatttttttttgaataaaaatcataagatttattaattaataaattcgttcaaaataatagagcgcactttagaggaacagtcctccagctgaagcacacgacctctagaaaaacaagagtctcttgccaagcaatgagccaacttatttgcagatcgttttacaaaacacaaatcaataaaagataaagccaaaagcaaatttcgaacattttgaacaataagaccacactgtgaaggcataaaaatactgctctgaatcacttggacacacaccaagctatctgtttccaacatgactctatcccacgaatgagttgcaatccaactcaaagcttctttaatgcctattatctcagcaatttcggattgaacacaaccaatcttccccttcttgaatgcttctaccatagcaccatgatgatttcgagctacacaacccatggcaaagcgcccctcttgctcaaataaagccccatcaacattaactttgatcttgtttaactcaggtgcaattcaacgctcaagctttcgccccccatcatgcagcagagacaacgaaagactcttccttccttgagcaaattaatactgatcaagcatgtttctcgctgatgcaacaatatttgatgcagagcaactcttctttttccaaacaaattcattccgcgcgccccaagtagcccaactcaccacaaccacttcctccatttcaccttcgtgtcctctgccgaagatccccaacagccagctgctgaatgttgcacccccagccccgacgtcgaccatgttacgattccaagaagctttagcgaattcacactccaccaacgcatgttgaacggtttctgcatgagcgttacacagcggacagtcagcattgacaggaacatgacgtgtttggagctgaaaacaagttgggagcacacctgaagtagccttccataagaagttactgatcttaggacgtatttgtaatgatcaaaggcgcttccaaaaatcagtattggcataacggcaccaagcacctttagatacttgcaaaaatttacaggcacttttaaccgaataatttccccaagtctcaagtctccaattccaaccatcatttacggccgaatcactaagctaaatggacaaaataagatcttgatcacgtgaaacaaacaagtctcnnnnaacatcctcatcccaagcgcgagtatcaacttgaaagagacagctgaccgatttgttcacaagagcagggtgccttgtaacgacatagctgttagaattatgtggaagccaaggatgtacaagaatggatacattttacccattagcgattgttctttgagcacaagaatgtactagatctttagcttcaagaatacttcgccagatgaaactaggattatctcctaattcagcagaaaacaagttgccatgagcataattattttccttatagagcctaccaaccaaagagtcatcattaaccaacgatcgccaatattgtttccccagaagannnnnattaaagtctctcaagcttcggaaacttagtcctcttgcatgtttatgaccacacaactgctcccaactcatccaattaatacctttaccactgctcgaatctaaatgccaccaaaacttagccataagccgctctaactccttacaagtgtctaaaggcaagagaaatacattcatagcataatttggcaatgcttgagcaatagatttcagcaatacctcctttcccatacgagacaaaatgcgcccttcccaaccttgaattctcttccgaagcttacccttaagaaagccaaggatagcattcttattcctcccaaccaaacaagtaaggctcaggtaatagcaatttttatctgcctcgtaaatttccagcataacatagatagaatcctgcacatcactaccagtattattactataaaacacaaaagacttagtgaaattaattctttgtcccgaagccacctcataagtacgcaacagctccttcacattgtacgcttcctcctcagtg

SEQ ID NO: 25375 - DNA, 2781 bp, Cannabis sativa
tccaagaaagaggtattagtccatggattgtctgttctaatagaaaaatgtgtaaaactatcatccttgttaaattttgtatttttaagattgcttcctttaccaagtaattggatccaaatgttaatgattcaattcacctcttgaggattgcagaggcagagtgacatggatatgggactataatggagaagatttcattattgattggcaggatgaggttcatattcttgtactttggttttttttcaggtatggcaactgtgccaagagtctaaaagtgttgtttttctttttctttttctttcgtgcggcagataaggttccaagttcggagtgtaaattatcctccagttccaattgaacagctgaatgagtcaaagccatttgcccctatggtgatcacagtaagttcatccatgaaccgccatttgatttggtatcactttgagtacatgatatcttgtcattttcaaaggctcaagataataacacagattaggcaacagtgttctttctttaagtttatcttttccccccattttgtggaaaatcaggaacagtattatgatgatttacatgggttgtcacaaaatctgtgttttagtcatttgaaacatctccagtgcagtgctaaattgtggcaatgagagatagcattgtcaaatatttatgttaaaggtatactaagaattgtgctaaatttgtgatattagctgtacttaatttgacacaaagtatacataaagtaaagtattaaagttgaccaattaatgtttgtcaaattaagtacagctaacatcccaagtttggcacaatttagtatacttttaacaataaagtattaatgtgctgtttatattatattgagaaatcaattctaatcttattgaatattattgatgtttatatattttacttttaaatagaattacatgtactgacaaaaaaaaaaaaaactagaattacttgtaggattaggatatgcactaaagcatcatgctaagcattgcttaggatagatcatttagtccatttttgttgatattgacacacattaagcatgatgttatgttgaattctgtacatgaaagattcaaaacagcttaaccattttgaagagtctaatattttgtttcttgattgatttggtgttgcagggatcactggattttgatggttcaggccccatttcatggtggactgatgcagaacaagttgagtaggaaaaaagaaaaaaaaaaggctttagaaaagtaggaaatttttgtaccagttttgcctgtagctttttctgacttctgtcctagaaatcaaagatagaatagaaacatctgaagttcaaagctaaaaaaagaagatgacatactgtcgtttgctgcaaaaagtgattgtttatactgagattattagaacaacccaagtggcaacttgtgattgtttcaacttcaagttctcaatccaaattgtaaattgacagtatttttcatctttatttgttttttggtaagttagttttatcaattttaaatacatgcaggatatattcctttagctttccttttgtctttaaaactaatcaaattgttcttgtcatcaaaataaataaatgggaaggagaatcaaattttgtttttgagttatggtttggaattgattttaattttaaaatacccttaaaaaaaggataagtgcatgaaatgtaatatgaaaagggtggccgtggctctagaataatccttcaatcaagtttaagtaaatctcaaccgtgtatcacaaatgggacccgctataaatggacggtcaggatataatctctctccacagcataaggtatatctttctcatttcagttagtagactagtagtagagctcagaagaaaccctcttccccagaaatggcgtcttctttcactacgccaaagctcaccacatccacaactctcctcttctcaaagaacctctcattttctctctctagcccctttctgtctcttccagtaaatttaacttcactcgctcgcgcccgctctcgctcaatctttctcaatgatcaccatcaccaccggcagcggcgtggtttcattacagcttctgccgagtccgaaaacggcgctgaaatcggccgcaagtacgattttgatctcttcaccatcggcgccggcagcgggggagtccgtgcttcccgctttgccgccaatttcggtgcctccgtcgctgtctgcgagcttccattcgcaactatctcatccgacaccactggcggcgttggcggcacgtaagtttttagaaacttgaccatgttcagtgcatgtgtctgttttgttttctgccttcaatcattctgcattgaaacattattgccgtctcaaatatttcgtttttctggtatcggatattgggacggaaatgagtgtttgtggatgtgttatatacacctatacatacataatgtgtacatttatttatgtatcacatgattaattggaaatgagtatctgttttcgcttactgtgttataaaagggattgagtcttaactatgatgtcacaatggaaatgaatttggggcaatcttttatgttgggttaacgagcaacgagtgagtttcatgaatttcacgtttgtgctatctgttgttgtgattaatagtaaccttttcaggtgtgtgcttcgtggatgtgtgcccaagaaactactggtgtatgcttcaaaatattctcacgaatttgaagaaagtcatggttttggttggtcatatgacaatgagccaaagcatga

SEQ ID NO: 25376 - DNA, 4342 bp, Cannabis sativa
  modified_base (4278)..(4283): a, c, t, g, unknown or other
cacattagtgataagttgtgactcagtcactcagggtatggctcacctgctagagctaacaaatctgcccaatttttcttctattgaagatactctgtcatagaaatggtccttttccttgtaacctgaatcatggttattgtctcatctattttagatttggagtgtgcaccataaatttgttctagagcttgccataggcctgcaatagtgacaactctcataacctctgtggttatggtttctgtcatagaattgtacacacagtaattggtcatttatgatctagttttcatagacatggttgatacttgagatacttcaccatctaagcttttcatgatagtacctgcatcaacaaactcagatgggcatttgttagtttcattgagatatatccatctaatcgatggcctctaactgtggtggagactatagttttccacagactgtagttgtgtctgtctagtttaaaaaagaatggctaatttagagtgctgaaatggtgagaaactcggttgtgaagctgagaactggtagagctagcacctaagactgtggatgctgcagcagcggctgtaggttgggttggggtattatttccaagattttgagagtcagtcgacatggtaattttttgctctaatactaagtcaaattttaaagagaaagattttgataaatcttagctcaattgtagctgagggaatccatgcatttatataagtagcaaacataatagcaaagcaaaaaaatgctcaaacatacagctagtaattgccataacaaaaacgagaatattcttacacaatgattaaatcataatttcactctaattgtacaatctttatgagaaaccctaattctaaaatagcaatagaatgatgacacttgtcttttcaagaaccacactataactgaatacacctcagcataaattctttcatttcttcaaactttctacaactaaaatttattggactaattttttgaagaaaaataatcaaaaatttgagttggtttctgaaaaaagggttttttttttgacttggtgttctacttctatataaatcaagatggtactttaatctatctcctcctttccctgagctgagaataatttcatgatgcttaattaaaaaatattaatgcacacactcctttgctgttagcctaggtctctcattttatattttcatttccaacgatattagatagagacgacttatttaactaataatttagttatatatatatatgtgacaccaagtcagcaacatatttataatatatataaaactagtaagatcatactaactaaatacagatcgtatcatctcatcatcaagggccaattatataaatataagacgcggttttggtactaatttaattggggtatccaatcacgatttacctacttcctatacttaattaattattaatattgattgttaaatacaaaatatctaaacttgtatcaagaaaaggtgaccaccaaggttgtatagtgtagatctgatgatgaatcatatggccaaaccccaaaatgtttttgttataaaattaaaagtacttgctaattagaatagaatagaatctttaagaagatcagaggttacataattatagaaattacaatacaaaacacacatatatgtaagaaaatagcatattaataaattaaggccaaatttcagagacacagctaacagagtcactattcatcattggtggtgcttggactagtgtgattgttggtgacacattattactattattattgaaatgtgttgtagtagcagtagtagtactagtgtttagatgggtttgaatcaattgatttaagcttgatgttaatgatccacgagcaaccatgtcttctgctaacttcacctgtattatataatataattaaattaattaagaaatgaaatatcaaatatgaaattaattataaagtagttatgtatatatatatatatgtaccctggctctcattgcttccacatcagatttaaggactctgttatctgtatcagcttctcggtattgttgagaagcattagtaagttgtttgtacaaacatgaattttctcctctcaattgctcaacctgcatcatccatataaattactattaattaagtttaattaattaagattagtatcatcataataattaataactttaacctgtatttcaagatctgccaaatgagcctgttttcttcttcttgatcgccgagcagactcccgattcgacaccatcctatatatataaaaacttaatggttggttataataagattagttaatattatattttatataaataaaaaggatggagaaaaagacctcctaatacgtttaacgtcatgattaataacaatggcgtctgtgctctgttcacatggaccagcttcaatgtcaatatcatcatcatctgattgttcatgagaggaaccacttgttcctcctcctcctcctattgcttgctcatcatcatcttctttgattcccttattaatgcttcgcctcccaactgaaattctctcaattcaaatcttaatttcatccatacaagaatcactaataatagtataatcaaattagttattagttattaccactcttaattattttgtaattgatttcactttaccacactggaatttaaattaacttttacaaaattactgtctttttataaaataaccgtaaaacacaaaacataacaattaaaaacaacattgaaacaacaatacaacaacagaaaaaatttaatatagtacccaataaaaaaagtacggaaaaaaacataatatttttgaaaaaaaaattcgttctaggtgcaaatttggataacttttgattatgtgaaatttttcaattataatttagcatactattagaatagatttttaataaaataaattatattttgcattagcatcacttatttgcatattagagatgctcttgtgtaagatatttgcattttaatttaacatactattggagtagatttttaacaaattgaattattttacatttgtatcacttatttgtatctccaataaagatgctctaaaaattgggttctatcaactttaatttttaattttaattgtagtttcactataaattttttaataagtgaacatctttctagtacaactttttcagaaaataatttttaatttttcgaaatagtatactaaagggacccatagtattgtacgaattatgatatgatagatatatgtgatttttttttaaacaagatagatatatgtgatattttgatgatataattatatatatgtgtataccacaaattgatgactgggaatcgatggtggctgagatgctgggatttgtagtgggagtcccattttgagagtagaaaattgagtgatctgctgtacttactccactactgctgctatttggcattacatcctgtacatccatcaccattcacatttaaataaatctttatttatttatgatataaatctaataaccaataattcgtttcaaaatgaatttaattagatgtctcatgttgatctcacaccaactttagctgtaaaattaattattaaattggcaactattaatattattaaattaggtgggctttaagcttgaatttagcccgccttaatattatatataatgtatttcaagattaaccttacataaaaaagataaaaaaatctataaattcctataagctaacttggctacgtacatgccatttgaaatccctaataaatatatgaaaaaaaaaatctaataaaatatcacattggcaaaccaacttgttaattaataataacataataattatgtagtaaataatattgttttttgagaaggagatttatatatatatatatatatatatatttaatgaagagcttttagctctaaactcttttaagagaagttagttttggcagtaattttctcaagaggagtttctaaaagtaaggctgaatatttgcacccgaaaattcacttactcgacaaactcgaccaatccaaacctaaaaaactcaatggtttcaaaaaataatgggtgaaatctagtgtaaagatatcataccaggccagtttgggtgtaacccggtatcatactcggccaagttcagtttaagaaatttaacattttgaaacccagttgtaaaccagacccaccaaaaattggcccacataattaaaaattaggaataattacataagacactattttttgtaaaatatttannnnnntacgttcaaagaatgtttttttatatttttacggttttccaaaaaataacacgaaaaca

SEQ ID NO: 25377 - DNA, 1200 bp, Cannabis sativa
tgcatggcattctgattaagtcaaaatctcataattccacaaattatatcaaaaatactttgaaattaacgaactaattatattgggagttattaatattgttacaattttctaataattgattgtgtgcatatttatttacaaaggattaaaacattgatattgaactggtcaaccctaatattaataatagtagtttgttatttgttttgtgtttgaaataatttacttaattttttgaaagagataaagacaagaagaggactaggcgccgtatggtggagacccaccacccaccattctaggagagttgtacatgtataatatactataatgtgttgtgttgtgtttttttcaaatgtgaatgaaagaaagataaagacagtgcttcttttattataatcattttatgcatatagcttaaaaagaagcttcctcaaaactaattggttcaattctttactatttgtttgttttatatgggacaatatccacaacattctcttgaagatgatgattattttttgctcatcaatcttaaactatatcagagtgtacataattactatctgtataggtacgaatcggatatgatcacttacgcgcaagggatatgattctgataccatattgagaatcatagagttgcatctgaaaactaattaacttaattttctatttttgagacaatatccacaataccatatatccacttcctgaaaaattgcattttgggattatatattatatacataattatcatatacactatagatcgactatagtactatacacacacatgtagtagtggaccacaactacaatgatgtttaaatatatatgcactgtaccgcaaataataactagctcaaaaacaaaaccttcttttatatatatagagagattttcaatcttttttttcttctatatatgctttttatttattgattagatccatatttgagatcatcacatcgtaatcgaccatatatgtaatgtaagtaattaactcatttacagaaacatgcattatattagttacccttttaatacataggtgatcagtattgtaaatatacacacattagtttattatttttttttttcgaagggggagcatatcaaagaaggtgacatttcaattaattattttaatatcgagtcctacacatttttatttaattaataaataatataaaa

SEQ ID NO: 25378 - DNA, 4314 bp, Cannabis sativa
aatccccaccccattaggggcgggtccccgcggttacctatccccgcggtataaatatccatctctattcccaatggttatcaactaataatcttttaataaaaattgagaaataataacaccattatttaaatcgtaaatacaggaaataataaaattaattatgttatgatactcaatcataaaagatttgatcatgaaacatagggtcaatagcaatccacgaatcccatagatctgaccaccaaagagagtaatcaaatcgtcctcatcggagttgctttgatccatcgatgagacactaatgaactaataaaaaataaaatttgcatcacaagacaataactaatctcattaatcttataagacagtgaaaaatcaccattattataaaataataaaaaaaagaaatgaaacttaatataatcataaaactaaaattaacaaaacaaagattagaacccatgacacccaaatcaactctcaaacactcatatctagaaaacctttgaattcttgaccaaacctcaaactctcacgacatcaaaactaaaacactcaccgaaggaccttgcttatccaccatgaaactgtacagtgagaccaccagatgcaaaaatccccaacaaacagaccccttgcccatcatcttagagaatagtcccttcgtaacaaccaggaaatataaaagatccctaaagacagtgcactattgacgtcgacacacaccacccaaactacacctatctaggattggaactgtcaatgagagaaggagaaagagcccaaaaaatagacaaagaaaagagaagaaaagattgttggttttgtggtactaaatatggtatgcagcagaataataaattctgaatgtcatcgtaccactcctcaagatcaccataggtgtatacattaaatatgaaataaatagacaaaaagaaagtttacctcttgaagcttgttgagtcataaatcttgactagacttctaagccacacacgctccctagattggcaagaataagaaaaataattaaataatttagagagacataagcaatttttagtagttcacccctatattaggatagtaatggggctacgtctactttaatttttatttctcatgagatggtaattacagtaatagattaagtatcaaaaaactttaaactctagaaagagaaactctgaccttgtgggtagttttttgaatgtgaaaaatgagccaaggttctctacttttataggtgaaggacgcccacaaaaataggaaaaaaaatacaaacaagttattttccaccattgatgatgatctaccagtgaacttagcttttaatggtaatggctaatttttggtgcccgacgggtctcacagcgggtaactcggagcttatttttgtaactcccttgagtgaattttgatgacgataactttagaactacatctggagtgtgagacatgacatgataaagcacttaaatagcttcaaaatacaaggtgaatcgcatcaattggataaaattgagtgagttatggtcattttacttaaggcagttcaggtcccaacgccccggttgacatcccagcacccaagtttacatctgacgtcaacttggacactgggtaagtgtagaaacgtccaagggatgtcctttaagatgcctaagtgatagtttgacaccacttagcttgacactagtttttagagatgttgttttgcgaaaatgagagactcaaaactcttcatttctagttgtacctggaaatgaaaaatgcaaagttatgaattttatttttctgacttcatagatcattgtattttttaaaaactagacggatggttaaaaccttggtacaaacattggattcaagttgtagtcatagcatgccaacttataagtttcgagttcaagcgcttcaaccacgacgtatggtccttcccaattaggctcgagtagtgttgctattgcatctttgatgttcaaggaatacttgtcgtaacaccatgactcctagcttaaatttcctatctttaacattggagttatagtgttttgcgaccctttgctgatacgtcgcatttttaagctcaaactttatttgatctcttcaattccttctagggatttggccagaagctgatggttagtatgctggtcatatgtaagtccttgatatgatggagatgtgagctctatgggtatcatggctttgtacttgtaggttagagtgaagagtgtgtgacatgtttcttttttttctattgtgcgatgtgcctatagtacttcgggaaattgttcaggcctattccctttttcttgctctaggagtttctttagcgtatccttaagagtttgtttgattgcttccacttttccatttggttgtggataggaaattgccaagaaactcttaatgattccatgtctgatacaaaaattagtgaagaggttactgccaaactgtgttccgagaaatgatgagctcaaaaaagaaatacttgtaaaggctcatactacaccttattcattgcatccaggcaccactaaaatatattaggacttaaaaccctattattgatggtgcataatgaagaaagacatagttgactgtgtgtctaagtgcctaacttgtcaacagatcaaagcagaacattagaaaccgacagggttattacaaccattaatgcttcttaagtggaagtaggaggaagttacaatggactttgtggctggtttacctaaaaccatgggaatgtatgatttagtatgggtcatagtggaccgcttcccaaaattagcgcactttttaccagtgaaaacaacttataccgtggatcagtatgcagaattatatgtaaaggaaatagtttgacttcatggagctcaaaaatccatcgtttcggatagagatccagagtttacatcaaaattttgggtgagtcttcataaagatatgggtacaaagatgaagttcaacacaacttttcaccctcggaacgatggacagtttgagaggatagtacatatattagaagatttactacgagcctgtgttatggactttgagggtttatggagtaaatacttgcctttaatagagttttcctacaataatagctatcagagtacaattgggatggctttctatgaaatgttttacgataggaaatttcgttcctcgattcactgggatgagactagggaaagaaagtatttgggtcctgatttagttcagcgaaccaatcaagcaatatccaagatcaaagctcgaatgcctgcttcacaaagcaggcagaaaagttactcagatcctaattgcatggacgttgaatttaatgtaggggttggaccatgtttttgtacaggtttcaccaatgaaaagtataaggcgctttaagaagaagggcaagttgagccctaggttcataaggccattagagatgctcaaaaaggtcatacatgtagtgtatcggctagccttaccaccagagaacgcaaaagaggaagctgagaaggcaaagagggaagccgagaacgcaaaagaggaagctgagaaggcaaaagaggaagccaaaaaagcaaaggaggaggccgagaaggcaaaagaagaggctgagaagtccatcaaagcccaagctgatgagtttgagaggaagcttactgaaaaacttcctgagaaagaagttgagactgtagaacggtgcgataagattggtttttgcactgtatatcgagcctggctttgaaaccctaatatggatactagcttcttggaggagcaggaagaggaaactttagctctttgcgagaagactaagatggaggaagaagatggcgaggtcgaggaagaagaagtagaagatctgtccaaatctcccagcatgtagactttgtttttatttatctcccttttctcttttagaaaatggccctttggccgagacaatggtttgcccctagcggcacttatttgtaaagacaaatttgcaaggttggatggccaacttttctttctaatgcctcgcactttttaatatgcggatgttggcttgcgttttattcacaatataaactatcacatgcataaagtttattacgggtttccattgcttgtcctttcccccgacgttaagtaatcaatttcctactttacgtgcgagcagcttatgtgctcgttcctcattctgcgagccatcatcaattccaccttgcaatcatcggaaatgatcttattttaagaaaattcaaatatatttttaataaacttgtcatcttgtatatattttcattgcttacatgagtagttaaa

SEQ ID NO: 25379 - DNA, 5184 bp, Cannabis sativa
  modified_base (2283)..(2287): a, c, t, g, unknown or other
  modified_base (2409)..(2431): a, c, t, g, unknown or other
  modified_base (2477)..(2479): a, c, t, g, unknown or other
aacacattacaagtaaattctattttaccagcacaatactaatttttgctagcacaaaaatatgctggcaaaagtgacattttttgtagtgtgttttgagacatctctatatattttagtattcgaaataattttttactcaatttttttctcatgatcatgtaaattatagttatttaagacatcttgtaaaattttaataaatttggaaaagtttaacacactgaaaattgcattcagtgtaccattgaaaaagtttaacacactgaaaactgaaatttataaaattatagttatagtttattgagtgcattgtaaaatcaccctattttttttagtaatttttgaagttgtgtaccatttaagcaaaaatgtcaaatctataaatgaaaaaaataaaaaatatatattttgtgatgataaatacttttggcacctatagaaggtagtggcgctctattatattagttagaggtattttatcatttttaataattattaaagtaattaaaatacttaagaacccatacatatttacatctcacaaattaaatgtggtgaccgcatttctctattatatatgtgatatatgtgtgtatttaatccaacgaaattaagcttcttcagcattaatttaattcgtcttagtattctgtaagtaaatatggatgccttatcaagagaccaagcggagatatttgaacacatgttcagctttgtggactcaatggcactaaaatgtgccgtggagcttcgtatagccgacatcattcactcccaagattgcccaatctccttaacccaaatagcttccaaaattattactaattctcataatagtcccatgatctcctcttccccagataataataccatgctttacctcaaccgcatcatgacctcgctcgtacgcaagaagatcttcacagcacaatatgatcatgatcagaacaataatcagacagtgctgtattatggggtgacctccaagtcacgatggctactaagagactccaagccaagcttggcaccgcttatactgatggagaaccaccccatacagatggcgccttggcattactttagccacatcatcaaggatcaggagggtagcgccaccgcttacgaaaaggcccacggctgcggcatcttcgagttggcgtctgttaatggcgaactgaacaagatttttaacgatggtatggcctgtcttggggagatggtgatgggagcgattctacctgcttacgatgtgttcggttgtatgggatcattggtggacgtgggaggtgggattggtggggatttagctgagattgttaaatctcatccgcatatcaaagggattaactttgatttgccacatgtcactgctacggcgccggagtctaatggtgtcacccacgtcgcgggtaacatgttcgaatctgttcctagcgcagatgccattttcatcaaggttcgtatactactttaacctctatatatctactttaaaaaaaaaaaatttaaaaaaaaaaacaagttaattagtatcatttcctaaattgttaatcatggatttcctgttttattattattgttagaatttctctctttttttttaacttgctgtcttagccggtaaagatttatttattaaaaaaaattatttcatatattattttttatttttattttttaaatttataattttgaaattactccaatagtttatatgtaaattgctatataaattttagttactatttaaatttctccttaattgttatgtaaattgtaaacatacaaaaaaaaaatagtactttaaaatattaaaataatattacttttaaagtacaaaaaaaatactactttaaaatattaaaatcaaaaaaatcaaaaaaaaaaaaagtaaataaatgttcttttgtcaaataataaataactgcacgttttttctccaataaaaaaattaattatcgcgtttctttgaattttttttcttttattacaaataataaactaattcttttatagagaaaataaaaatatgttttgatatatcaagtaccattacccccattacatgaaaatacaactcatttagcaaaattaacaacaaatagatttttcaagtcatatacaataaaatagaagaaaattgtcatataaattatagggtgattctattatgcatccttttaataggaatatattgatacacactctacttaaaaaaaaattagtctaatttttttcatattcatgtaaatattttacaaaattttgagaaatttgaannnnnttacaatataaaaaataatattcaaacagtctattttacacgcgtaacaaataaaatagtcatgcgtacaacatactacttgaacgtaatttttagcgtgttaaactttttcgaatttcttnnnnnnnnnnnnnnnnnnnnnnntaactataatttacatgaccatataagaaaaaatttgactaaaaannnatttcggatactaaaacagataaagatatatcgatgtatcccttttaaggggtacattatagaatttctctaaactatatataataatataataaataaattattgacaaaattcatatataataaatgtaaattttcataataaaaaaaggagaattttcattgtgaagtatagtaagtttctaaattaaattaaagtatttaaatcaataaattaatatatatagtatcttcttaatgaaaacagtgaaacaacaactccattattcaaataataaataatattagagggagtagtaacaacatcaaaactatgttctaacactcaatcacaaaattggagcatgtaacacggggacaacaaaaacttgggaaatatctcctaaatttcactacctagaagagacacaatgaccacctcacaaaaacggcaaaggcaaattggtataacaccaattacccaataaaaatcacattagtagccaaaacttttttattatttttattaacaatactagctaaaactaattaattacacatttttgtcaataaaaatataataataataatagttacgtatgcttaagcattttcttttttttaaaaaaaaggcgtacccgtaagcatatataattttatgtatgtataaattatttactttaatttaagacagtctacaaaatatctgtgattaaacatctctataaatcatctttcattgaattttcataatattattgtaagatctatttggatgactattacaaaagataattacaaaaagttatataaatataattttgaattttaatttgatatatcttatatagtagtgccacttcattattattaaaaacataaaataatgttgcccaaaaaaacataaaataattattataataaattatccagcagatcattatatattgaaaaaggtagatcttatcacattgtttaattatatggtatttttattttcttttaatattgttgcctctcaataattttaactttcactaattatttcttaaagattttataatattattgatttcttttcgctcaccaaacacttattttatagaatttaataaattttgtaatgaaataataataccaaattttttaatataaattcacaccaaacacaattcatttataataatatttattaatacacacaaaataacactagtaatttttatattaatttattatcgcgtattgatatatattgagaatttttatattgggtacatatatataaagattataagtagtaaaagtaatcgtggatgaataataattttattcataaaatacagtcttccatcatgaaattattgatgtgggtacaaacaaagtatataatttaacgaaaaacataaataataatgaaaagagagaaacatataagtgatatatatgagttaatttcctctattaaaatatattagttcaatatcttaattattaatttagagtatatataagtgatatatatatactggcgcatgcagtgggtactacatgattggtgcgacgaagagtgcgtgaaaattctaagaaactgtcgcaaggcaatcccagaaaagaatggaaaggtaataatcgtggagattgtattgaaagattcatcacaaaataaggaaaacgacgacgtttttgacgaaactcgtatgatattcgatatggtgatgatggcccatacttgtagagggaaggagagaaccgagtttgagtggaagaaactgttagaggaagctggctttcctcgttataaaatcactaaaattcctgctataccctctattattgaagcctatcctttttaattaataaatatttcaattacaaaaattatatcaaaacggtatcatcagttatgcctgcttgtgttgcaatatttatattttgttctccatttatgtaaggtttcaagcaagtgttaaataaattggagtgttttcaattaattatgtcaaggattaattcttcaactacagttaaacacactactgggctttaacaattgtttaaaatatttgtttgacaggatagatggattaaatagtgtgcattgaagctatcattttttttacgatcaatctttgtttggtaagattaattaaggctgtcaaatgatacatggaagtacctaagtattggcaaatattttctaaaatagctttaattgtctcatttggagcttgaattattaaaaaaacataaaaattatgcatgtagagttttcctttttttttttaatagagcacgtaaggctcgtacaaattaaattttatcttttgttaaaaattaatctgacataataatcatcttttaaaattcatcagcacaacactaattaattaaaaaatttcccataacgtacgcacatggggtgggcaagaaagttgacagggattgaagcgtttccctccatgtccgtgttaaccattttaattgccatgcccaccggatgtgcttattttatttaagaaaataaatttttaatatacatgaagatcaattgcataaaaattatacataattattattttgaaagatattaatatgctatgcgttcacttatttagttataatctttcaattaaaataaatatttttcaaatacattttatattataccactattctaattatattgtagatttgttgtggctggttgggtggatatattccag

SEQ ID NO: 25380 - DNA, 4859 bp, Cannabis sativa
attcttttcagctcggagaataagtttagataaaacttcactacaaaggatgaacaagaaaggcgataacgggtctccttgacgaaggcctcccttaggattgaaaggagccaagggagcaccattaagcagaatagaacaactaatagtcgtaatacattgcatcagaagggtacaagccttgttacagaaaccattcgctttaaaaacccgcaaaagaaaaccccattcgaaacgatcgtaagctttgttcatatcagtcttaacaaccattacccccacttttcctttcttgccttgcatggaatgtagaacttcctgagccataagagaacactccgcaatccatcagccagggatgaaagccgattgaaagggagacactagacgatctgttaggatacgagagattactttatacccaaaattgcacagacttataggtctaaattgatcaaaggtggcagcattagcagtcttgggtatcagactaataaaagtctcattaactctttccatcatttgcccagacataaagaattgttgcaccatcttacaaaccgaatcaccaactatagtccagtattttctaaagaagatacctgaaaatccgtctagccctggggctttgagggggtgtagtttaaacaccacatctttgatctcgccattaccagggattcgacaaatctcttcattctccctctccgtcactttctcagaaatcagagtatccagatcagcgtctatctgaggattagaggaattgaaaatagccttgaaccgatcttgaaaataattcccaatatcatcccttcctcttatccactgccccaactcgccactaactgcaccaatataattatgtcttctcctgatcaaggtggacgcgtgaaagaactttgtatttccatcgctgaaccttagccaattctcacgagacttttgaccccaaattctgcccattttctcctccatatcaaggatatccatctgaatctccgcttccttaggaagtgtagcatgagtaatgggcaatttttgcgttctctccagttggacacaaagttgcctcagttttctatcacagaaatcaaatacattttggttccaaacgttcaagtctcttttggttctgctgagctttcaagggagccccatctccatctcttccttccaagcatttttaacacctgcctacaatcatctctcgatgtccacacctcaagaaaatgaaaaaggatacttcaacctcaaattatccccccaagtgtccaggagaataggagcatgatccgaaccgattatagggtaattctgcacccgagcattagagaattcagtgcaccatttcacatctgcaattactctatcaagttgtttccgaatttgattaggggccatcctcgagttctgccaagtgaacacaccaccatcgcttcccagatcaactccaccacaattaaacagaaattttctcaataattctccttccttagcatcaaaattcctgccccctaccttctccgtatggtcatgaatgacattgaggtctcccacaagagcccagggatcactgcactcgttcactttctccgtgagccaactccaatattctgctttagaagtacaatagggtgtgccataaacacaaaatagtttccacacaggatgtcccaaaactgcttcaaatgacactagaaatcctttgctttgtaggtattgtccgtaataacgaacttgcaaaatgaatttgtttatgataaagagattcgttgttcctgaccttgcttcaccttaattgttatttactcttccagttaaatgttgaggatgattgtttatatacacatgttatgttttgattggtccacttaattttcaatttcttaataaaattaaaataattaaattttttaaaaaataattaaaaaagtaaaaaaaaaataaaaagaattacaaaacttttttttttttcatctcttcccttttttccttttctttttcttcttctggaattatcaccttgccccctcggttctttcttcttcttcttacttgttaggttttaatttgtgttacttttaaatgtgctttcaaagtatttttaattagttttagtttcattttgtgcaatttcatgctttagtttgttaatattttcatgtttagtaataaagaggaagtgaacacgttaaagaaaatttgcttttctgacctcagtacagaaactaggtgtgcatgcggacctgaatggaaacaacgcttgacgatcccgggttctatgtcacgataacgaaaattcagtaaataccttaaatcaaagttccaggagaaaaccctaaactggacaaaccctaacttccactagctccaaaattagccatacaacacctaaacagcctaaactagatactggatatcaccttgagccaaaaaacgatctcaaagcgaatcgagaatttcccctgcagactaatcggtcgaccagttctgttacaccagaaccaaccggtcgaccggttctggtaggcaaaatttcttgggttttcttcccccaaaaccgaaccaaaacctttccaaacctgtccaatagctctagaacaatttattaacataaaaacaaggtattcaactcagcaattcacaacaattcatccaaataccaccatgttagaaccaaaactaggttctcaaatcaaaatttccaattccagtccaaacagccataacctttaaccaatttaaacctaaatagccttaaaattaaaaccaaaataagctttgaacctagactacctaacaaccatgaaatcccaaagaaatcgcaaccaaacttaatctaacttgaaaaaaaaaacaaagagaaaggaaagaaaactcatcaagtatgtacaacttcaatctttgatcataacttggaagagatcagctgaagtaacaagaaaatccctaaagcttgctgagtttctatggccacgagagggagaagatggtaaacactcaatgtgacttagtttagggtttctttttcttttaattttctagaaaaagtaattaagataacatataataacttaagtattcaaccaacataattactagagaaccacaaaagacaagttagggtaaaatgaccattttacccctcccataaaacttaagctataacacaccctaggggtatttttgtaaaacctaattaatccgccaaactgaccacataaaattctaaactagtccggtataattccaattccactcatctattattgtcgtgacatttctgaccattttgtcgagtttccatggccgctaaacccgaaaatctttttatttcaaaagtggtatctattatacccacataatctgataaaatctctgtaattgataaattatgctttatttaataattaattagatttacactaattatcacacaattagcttaagtaagatcataatcgtactctaatatcaatataatcacatatttaataagatatgcccaattaaacatcattatattttctgggatactacaactatcccctccttacaaaattttgtcctcgaaatttgtctaaacaactcgtgataccgttcccgcaactgtgactttaactcctaagtcacctttctatcttgttgctcatccacatcgctttagctaatgatatggtctttgttccgcaatgctttctcttttcttgtccaaaaacctagatcgattgtttctcatatgacaggtttatttgaagtttaatattttcgtaactcaatatatggatcgtatctgcctcatacttctgaaacattaaaatacaagttgtgaactccagatatggcagggagtatggctggctgataagctacctgacctcccattttcagaaactcaacagaccaataaatctgggacttaactttcttttcttcccaattttcgagttcccttcattggaaacacctgaagaaagataaaattcccaacttggaatttaatgtctctacactttggatcagcatagctcttccacccactccataaggcaaacatatgaactcgaatctttcttatggcctcactcattccttagaccgcatcaggtccaaggttcgtctgttcaccgatttcattccaatgaatgggtgaacgacattttcttccgtaaagcatttgtacggtgccacaccaatagtactcaggtaactattattgtatgaaaactcaatcaaagaaagatgcttactttagaaaccctcaaaatcaatacacacgcccgtagcatatcctcaaatatttgaagaattctctcagactgaccatcagtctgagggtgaaaaactatactgaaatctaacttggtacccattgctcattgcaaaatctagcatttagatgtaaactttagatctcagtctgagagaattaactttggagtaccacagagttgaactatttcctttacatataaattagcacattaatccaccgtatacgtagttcgcactgataaagaaactgtggtaactttgtacatttatcctcaattacctagatagaatcatagaaccctaccgttgttggtaatccaaccacgaagtctatggttacttcttcccattttcactcaggtattttcagaggttgaaatatttctactaacgctctgccttgacttgctgacaagttgaacatttgacacatactccacaatgtcacctttcatatctgaccaccaatagagggctttacatcgtaatacatcttggttatttctggatgtatgaaatatggcataatatgagactcgtttaaaaccttctgtctgataatcataatgtatttatatcgt

SEQ ID NO: 25381 - DNA, 1510 bp, Cannabis sativa
tttaaaaaaaaaatccaaacaagttttgattattattaattatgtaccatgttgttgaagtatatatattaattatatgtgtgtctattttgagttgtagaccacattaaactttacttgtaatttggtagacacaaaatatatataagaaaatttcaacaattgcatttgcagccccatgatgtagttgtcttttgcttaagtattagccagactgttaattattttttaatgctgcccaatattcattattattattattattattattattattattcaaatattttaatattattattattatttcaattcaaaataaaatatttgatgagaaacacattaaatataaatatatgaatgtgtatgtgcccaaaaataaaattacaattaatagaaattcacaaaagttaatgatcataaaattttttatcattaattaataaatatgactttttttccatattacatggatggtatttcttttacaaacttggcttatcataattttatacagctagaaatttatacaaagaaataagacaattatgttgaaattgattgcttggttatataaaggccaacaaaagcctaattttctctgttaaaaagttgtatatatatattataaatatatacttcccccttgctcgaataatatattggaattaatacattgcatttgataactattgcaacaaaaaataaaatattttcttgagtaaataattttttgtattttggtatagttaatttcaataattattctaaattttttactcaaattaaaatttatgtttggcagttgaaatgtttacaactagttaatagatacaattttacccaaatatatttatatatcaaatcagaccaaagtactattttatttaaaaaaaataagtcatttttcaattattttattatatattggtatcacttaaaaaaaaaaaaaacctaattgctttcataatgataatttttaaattttctaaatatttttaaatctttgtcaaaactattctcctccaaatattcttacacatcatattctattgaataatatgaaaataaaaatattaaaaaaaatttcccaatgacactcgtaaagtttttttcttgaatttttttattgcaaatattctctcgaactatacaaattgttacaaattctcccactcatatgttacatgtatagttgagaatgatggtctacttaacaattttaaacacccgaaatccagtgtattaacattaaacatacaaacattagcactaataagtaataatgcatatatgtatattttatcttaaattttgtctacctgacatgacatgtccatgtaagccacacgtagaatacaaccttgtcattagtaggacaaagtctccttacaaggcatggcagaaccgtcagcaacaaatgagagttaagcaagtcgttaagaagctgcacactcatgtttggccagctaaaggaagtgcataagctggctacgatgagcttgtatgg

SEQ ID NO: 25382 - DNA, 5142 bp, Cannabis sativa
ttttaaaaaaaaaatgagagaattagagataaaagtatgccaaaaaaagaagatgacactaaaaaattatatactaataaatgtaagtggagccatatacataagatattatgtcaaaaattaacatgatataataatataatttttctttttaaaaagaataatttaaatttttaacttaagcaaaaaaaaaaaaaaaagactgagtttaaatgataattatatgtttattgtggattttaagttattttaaaagatgttcttttaaaattactaatttatttaaaaataaatttaatttaatacaacatataattcatatacaatgtgcgtagcacgtgaaaaattcactagtaattttaaaagagagaaaaaaattaggcctatggactaggtgggccctacgcacaggtttagcccacctatgcccaaggtcgggcctccctccataattatcactaatattaagagtgtaaaattaggtgttacacatcatagtttgaaattcttaaaaattataggagttacagttgttggagaataaattttatacttatttattgagtctataacctccatgggaggttataagttagaatactatataaaaaggtctaagatacttatattgagaagattaagttttctatccattacaagaaaagctacttttgtcggcgcttgagctcgccggcaaaagtacgtgtaactcgccggcaaacttttgccggcatcatttgtcgccgacaaaagctgccggcaatggctcgtcggtgaatgaccttttgccggtgacataaaggcttgcgccggcaaaagtatttacaccaatgcatttttttgccggtataacgtactcgccggtaataagtccgccggctgatgtgtctctgacgacgttttgccggagatgtaacgcgccggcaaaagttttggcgggaatcagggcatttggcgcccatttggcgcctgatttttaaactcgccggcaaaacgttaataaaaaaaataaattaaattaaaaatttatctatgccggcgaaaaatgcgcttgaaaaaatatgcgcttccatatcgggcacttgatgctcttgttgcacattttgtgagattttcggatgacacaagaattttgcctgtaatatggcatcaatcgctgcttgcattcgtgcaaaggtattcaaacattcaattgggtgttccaagtaagagtttgagactggcaaagttattgattcttttacaattgggtttcgttgcttacaggtacaagaatgaactgcaaaaggaagataaagttaaactgagagctcttcttgaaaagcaaaatcataaattagtgagaacatttatctaaactactttcatttattgtatattcaattctttccttaacataactaagatggatatgtaatcattttctctggttgaatgtagattactcctgagattaccagggagctaaataatagccgcaatcggggtgagaaggaggatgatcttatgctaattgatatcctttgtcttacaactgctgttttttttctttatttgtttttatttccatagtttcttatgactaaataatttagctgtccctatagattcaatggtgatgtaatttgttgtttccttgacctcaaattacctttccctatttatgtcatcaataagactattgaagaagataggtttgatattccacaggttcctataaaggaagattgatcaattacttacataggcattttcttatgatccattcttgtgtttttggcctcaaatcatttttttcttttaatgcccttttctcaggtttgcaaggctcattgtgttgttgcagcatgtaagttttgtcgaaatttaatcgtatattttgctttgcatcgaattacaccacatactccactgcttttacttgagtttcattcttgcgaacgtactcaccggtgacaaagggtgtcaagggaagtataccattttctttttccagggacaacatataactctgggcttttatatgtgaaatgtttgtgcagctgagtggatttagtttatagtttatttattatttttttcccatcaatttctaaagtttgtttggagtgtggatttttttttttaggaaagaaaatgtaaagaaataaaaatgcaacattttcttctgttggattttgcttggatacagtaaaaaaattcatttgggtttttaagtgatgtttattattattattattttcagttgtttcaattttttaatatttatttaccaaaattaaaaggaaaaagagaatacttgtagcaaaactacctaagctacaatttctgctatgcttaaaatcacaattttttgaggcgaaatctttcaaactatagtttcgttttggtatttactattccgatggtgaccagttaaagtttaaacttgcttgtgcatgatggcccatatttagctgatgatttacttgaaagagtttttgatgagtgcctagatatcaaaatactcaagaaactccattgcaagatcttttttgaccagcatcttcatcagaatccatcactagctattaagcttatgaggggttatgtagccaatgaggaaacaatatttgattttgatgaaatgtctgggaagaatgttgtcttctttaatgtcatgatggtctagtttgatgagatgccgagtagagatgttgtttcttggtacttgatggttgcagggtgttgatggataaaatggcataataggaacagttattacttttaataaagactcttggtgaaatactttaattatggatgagatactacacaagttggtcgataagagttgataaaaaaaataagattagtgcaactggttggagaggttgtatgtagagtaggttttatgaaaggtaggttaatacttagctcctataaaagaaagactgatggaattcacaacacacaattcagaagcacagaagagtctctctttcgaaaactagctctcatttcatcatttttctctcttacacaaccatctcatcacttctcttttatatacaaccatttcattcataatagtctttttaattaaccacacccttaccattcaccaagctgcctatttaacaagcttctataaaagattagactgcttatttaacaagcttttatagaaactaggccgcttatttaataagcttctataaaaattagattgcctattttataaccctctgaaaatcagactgtctatttcataaccttttatgaaaattaggatgactatttcataaccttctataaaaccaaagtgcttacactacctttaaacctgtcgacagtctttacagtttaccaagcttgttcttgaattataagttcctctattcacaatcttttttctttttacaaacataattatactctctaatgcatcctattcatctactaaatactcacaaaaaaagaaaaaagaaaactaacctaatctaggttaccacacatgcccaaaattgatcatcttgttcaaatatagattatgtttactcttgatctttgtaatctttcacattaataaaaatgcagctccttactaccatagacgtaggcaaattaaatttgttgaactacgtatatttgtgtctcatcttttttttttttttttaaagcaatatatataaactacaattataaaaaaagatgagaggcttgttcatttatacatttcaaagtatgtttttttctatttatatggtaaaattggtataaactacaaatatacagtagtttacagtaaatgtcttaatcgcaacttacgcaacaacctaactcaatttgtaatctacatcgcaactcacacaataacccaactcaattcgcaatttatgcagcgacccaactcacaactaaaattcaaacaaaaaaatataaaattaaaataatgtgtaacttaccgaggtaattcctcaaaaaaaaaaattaatgaagattgaatgaaaagtgtctcactcaataattaaaatatcatattttatctaatttccatacaacaattaaaattttaataattttctctcaaaaaaaattaaatttaaatactatttcctctatgtggattttttttttgtaggaaagaaaatgtaaagaaataaaaatgcaacatttttttctgttggattttggttaaaaaaaaaattgactgtatgtgcaatttcttttggtttttgaagttattttaattttttaatattaatttaccaaaaatgaaaaagaaaaaggggatatttgtggtaaaattatctgagttacaatttctgctatgcttaattttacaattttttttttggagcgaaatcaagctttaattttgttttggtatttactatagtgagcagttaaatgccaagtgtacacgtaacatggtgcgtaccattttaattttttaaatattatgagtaaaaaatttcaagagaattatggaatatacactataattaatgtttaaacttgcttgcgtatgatagcccatatctggctgatgacttggaagagtttttgattagtgcccagatatcaaaacactcaagaaactccattccaacatctttttcgaccagcatctttcataagaatccatcactaggtattaagcttatgagggcttatgcagccaatgaggaaacaaggattacccactacatatttgatgaaatgcctgtgaagaatgttgtcttctttaatgtcatgatcagaaagcattgtaacaattacctgtatgatgatggtcttcttgtttttaaaaactggataattacacatacccttgtgtcttaagggcatgttcaacatcccataatttgtggattgggttgcaaattcatgttgctgttgtaaaacatggacttgatataaatcttttgttgggaatggtctagtttccatattattggaggcacgacaagttcttgatgagatgccgactatagatgtttcttcttggaatttgatggttgcagggtgttgatagataaaagggcataattggaagagttattacttttaataagaactcttggtgaaacactataattaggggtgtacatcaaaccgcccgcaccgcaccgccaaaaaaatgtggtttgaaattct

SEQ ID NO: 25383 - DNA, 3179 bp, Cannabis sativa
tgtttatttgtttatatgttttcttagttagttgaatttgttagagtagctttagtagaagtatttcatgtatagatatttatacaaatatgtaactatgtggatccactttgagaagtataccacgtggctcaggaatatggaatacagtaaccatgtgagagtgtcacatgattctcaagagagttattctattgtgatgtgttggactattcaacatttaacacataactaaacagagttaacttagatttgcataactacaacgaaatgctaacatagttatctatcctacagttacttgtatgtatttggggtttagttttgcttagttaagtgttatggttgttaattatttcagggagaaggtatctataagggaagggagattggtttgactggcttgttatatccagaggcgaacgggcttgatccaactgcatcagggtagctaaaatatgccacaattataacgagtttcaaaagtttaatttgtagctgaagtaagcatgggttgatgtatacccttttggtttttgcagagtttgtcaagctcttcagctaaatcagaccaaggttgctggacaagtggtgctgtgcttcacctcaatgactcgaagagttgctatagtaagtgcagcagccactgtgaaagcaggcggtggagttggtcttattgtagccaagcatccaagcagtgccttatacccatgtcctggtgatttcccttgtattgaagttgactatgatgttggcaccaaaatcctcttttacattcggtcaaacaggttagatgttttgatactagcatatccttttgttccattgtgttttgttcttttggaaaaattaaaaaaaaaataacttttttttgtttgtttcattttcacacacagaaatcctctagtgaagttgagcccttccaaaacagttgttggaagacctttatcagccgaagtggcccatttttcatcaaggggacctaactccattgaacctgcaatccttaaggttaatgacatttattatccttctttatttggtcttaatgcagttgttaaatggtttgaatctgttgaaacgatcaaaagttcattaaattttgagttgaagggctttcattgttcgtgaagttaactaagtcgagttaaagagacttcaacacaatgtgttggttcataccttaccactaaaaagtgtaacaagaaaaaaataataaataacaattatggcatctctaaaaattctttaaattgtgaccgaatatgtttgaagttacaacaaacttcattactgtattatttagaactaaaattatattaataataacttgtgactaaatgtgctaagattctgtgtaacagccagatatagctgcgcccggtgtgaacatcttagctgcaacttctcctcatgaccaatttgccgatggcgaatacgtcatgcactcaggaacttccatgtcaactccccacatttcaggcattgtagctcttctaaaagcattgcatcccacttggtctcctgctgccattaaatcagcacttatcacaactggtattactcttctcttctcttgacttagaatatgactaacccaaaagctcaatgatatacttaatactaattgatgattttaataatgtagcacggaggactagtccatctggttccccaataattgcagaagggtcaccccaaaaactggctgatccattcgattatggaggaggcattgtaaatccaaacgcagcagctgagcctggactagtttatgacatgggcatggctgactacattcattatctctgtgcaatgcattataacaacactgccatatctaggcttacagggaatgtcacaacttgtccagttcaaaaattgtctgttctagatgttaacttaccttctattatcataccaaacattaggagaggttccattacagtaacaagaacagtcacaaatgttggaacacaaaactcaacttacagaccaacaattgagcctccatctggtgtagctgtgtcagtaagacctggtgtattgatttttaactctactgttaagaagatctctttcaaggtcacattcaatacaactctcctaatgaatactcagtacatgtttgggagtttaacttggtcagacagagtgcattttgtgagaattcctttggctgtgagaacagagatgtttcaaccttatggtgatgggtactataattaaggccatttattaagctattatggaaaattggtcaataaatttgttagtatatctcaccttgtttctttatatttggagtaaatattctttaaaactacctttttgaagggaatttagttgaatttctcaataaaaaaaattcagatacagttctatttatttattttcaatgttcttgagttattacaaatgttgatactaatttttggtcacaaatagttaccctttagttggtacccattatggtgtttgagcatagagcattggtaaacaagagttaaacattaaagttattgaaaatagaaaaatggttaacaataataatataataaaagaagaatctctacttatattttggccatttaatataattacaaacactcttaaatcaactacatgtgaaaggtgaaggtaacactaacagatttatatgtggtacaaacttggggctatttactatgataaaaacagcaaaattttctgaagttgtcatcaatttttgaagagagaaaaagtgtggtatgaggaccatattctagagcaacttttgaacactctacaatggtgtcaaaatataacaccgaacatattctaagcttgcatgtatatagagtttagacaaaaaaaaattaaaataaataataataatcaagataaagtacacaattcaatgtataaatcataatctctcaaaattgtcaaagaaaatggcatgatttcagttaaaacatcaaccctctcatctctgtgattgtgaagcagagacaacataattgtgccgctaactacctccatgctcattttagcttggcttgttcttgttctgaatagccggagaacggcaacaatggtggcagctaagactataatgttggtttttacatccatatcctccatgaatgtatatcattatgattctatgaaactggtattcaattttaacttcaaaa

SEQ ID NO: 25384 - DNA, 5202 bp, Cannabis sativa
aaataaattccaacaatattttctttttgttttcagttctctagaggttgtgatggaccttctctgcatcgccaaatacaggtggtattgtagtgggatctacattaaggcctacaatagccatggcttgtttcatagctagaaaggcttcttgcattctcctattcctttctttttgttttgccaactcaacatcatatttattagcttgtcgcctgaacgacacaagcttagggtattcatcctcctcgtagcttgaaaggtcatcattatcccttgagtactcatggtcattggtgtcactctctttgccttctatttaagaggttactttttcatctggatgcccttgactgtcgtagtggttggggaggtcgttggttattctttgttgtcaccattgcgacaagaggtttatttttggcgaaagcttcctacaactctcaatgaaagtaccagaatgttgattgagattttcagtaacttcttaatcttgtttaagggaaattaattaagggtagagaagagtattttacgtagttcaggagttaattaaccatagtctgtgagtcacttttattgatgagtaatattgttattacttgagagtatattctctcttacagtttcagagttctctttttgtctctaaaattttcgatctcctttcctttacatatcccctttatttatgggcaagattatgaaacattcttgggtgatttttgcatattccctttacctctaggctatgtatggccttttttgtaggtgttggagatgatatttgctatgtgtgtacaaggtaagctttgaagtagaagtttggtgtgacaagacctatcttctatgcgactgatggggacaacacaaaaattcaactttccccactatttcataagccttgtcctcagctgtctcacgatggtcacatcccaattcaatctcaatggtaacatctctggtaaagtcacgcctacatcgtcaaggtgacactctctctacttacatcattttaatgtgttcagaaggcttttcctcccttatccgtcaacaagaaagaagacaggctctcattggctacaaagttgccaagaccgcacttgcaaactcgcatcttttcttcgtggacgatagcatactctttggtcatgcttccattaattcctacaatgccaccaaggaggttctccatctttatgagaaagccacggggcaacaagtgagcctccaaaaatcttctctctatttttccccaaacacgactatcagggatcaaaacctcatctcaaattacatgggtatccaagtcagagctacctttgaaaaatatctggggctccctcaatattttggccgtttgaagaagcaagtttttcattatctcaaagataagatttggaatcacctaaacaactggaagcacaaggttttttcgaaaggtggcaaggaagttttactcaaatcggttatccaagccattcctacttacactatggcttgctttcgtctctcgatagctacttgtcattcattggagtccatcatggctaacttttggtgaggtttcaatgccaataacagacccacgatccattggcaaagttggcataagctctataagtctaaaagagatggtgtattaggcttttgttcgcttgtccactttaactaagctatgcctgctaagcaatcttggcgaatccttaagcatccaaactcacttgtggctagagtttttgtagccagataccaccctcgatcctcttttatcaaatgttcccttggccactccacctcttttatttggcgaagaattcaatggggaaacgaattgttgtacagaggccttatcatgaaaattggtaatggtaagaacacttctccaactcatgattgttggattccctctttcaaccaattatcccgagccatcatatccctaactgtgttgcttctttcataaaagacaacatgacctgggatatcaatcatctcaactagtgttatccttcctatatcgttcaagacattctttccattcccctccctctatttcccacagaagacaatctcatttagaaatcctcaaaattaggaacttactcggtaaaagcaggctaccacttaagttattcgaatagttcccctcctgacatcccttcctctttttctccctcgccttggtggaaagctctttggcatctcaatctcccttccgaactaaaacactttgcgtatagagcttccacatccaccctaccaactaataagaaccttgcctataggaagatagtaacccaatcccctttatgtgtctgatgtggtagagaggttgaatcagttcctcatgccctgttcttttgcaagagagttagaagagtttggaaatatacaattttctatcgtcactttttcaaatactatttttttcatgaaattatttttaatattttttctaacatgaacaaagaagaagtggagttttttctttgtatatcttggtttgtctggcataacaggaacaaggagattaagcatcaaacaatggatcaatctcatgccatcctcaacatcgctgaaaactacttggcagattacaaagcaataactgctattcataatacaccctctccagaagccaagtctaatgccaccgtcacctggactcctcccccacatggccttctcaaactcaatacagatgtggcctcctcgaacaaccacattaaagctggtcttggtggaataattcgcaacagtaatggaggagttgttgctgcgatagcttctcctctacaaggggaggagatgctacaatcctcgaagccaagtccattctcaattctcttcattggtgcatagaagagtactttcctcctcatcagataaaaacaaactgtaaagctgtcaccaaagaggatctctctctgtttggaaatcttatcaagcaaattaagttggttttatctcacttcctcaatgtctcgattactcatatgaagcgcactgctaacaatttttcccaaaagcttgctaagttggctttggagttagataaagctacaatttgaattggagataattaaagaatgttgttagaggaatttagacaacaccaaaataaataatataataaaaatataaacataaatgtgtgagtactcaaactcgaatagcgagtattcaagctatgaacacatagacgtactggaaatataaagaacacaaggaaatatagtggttcagtcatatcacggtctgctttgtccactgttgcaagggttttctgtcttgtccatttcatgttggatcactcatttatatacaaagcaagtgtcctttgattacacagcgattgatttcattatcaatccgtttgtacattgaatataacatttaaatcaataaaaaacgtaaatacaataaatgaagaacagtttcggcccaattcactaaatacaacaacgtatgtgacttctataatatgagttgcctgctcatattctcgcatatgctcgtaggcttaagatgcacacaagactagtcgagtcttgggatgtttgcgtcctgttcgaatcacttatacagacatcctgcagtaagtcgataacttaagatatgcgagtccttatcgggttatcgaggttgttaggtcatccgaagcagctcgctgagtacagaagcgatctttacttcttcgcaggaagacctttatagtcctcgcatatatcttggtatatgcgagtcttaaccaaatctccggtcctgcttcatgcaagctactcgaatgcgaatagacactgtcaatgtgacatcatcccgctgagtctagttgaagaaaggctggcactcacgaggtctctcactgacatctcagccctccttgaggagagtgagtctacaagtcatttttatagaagtctgatctcgagtttctaggtgaaaaattctcactataacaaagaacaaaaaacatcttttgtacacaattttttttacaagggcaggagacacgttgaatgaagtggtgttggaagtcaaacaaaatgaatgtcgtttagagcataacagacacagccttagaagacaagactgagggacagtcggacatcataatcatcacatcatttttctcgatgaaatacacttcatccccagccaagaatttgaactttcaaataaaacctccaatttttatttattcgagttttcttgttgtcccaaccaaacctcctctcttccaagttccaccaaccaatcatttgaactcaatcaaacaataattcacaactccaactctgaactcttcctaatttcgtttctctaggtaaaagcttctctctaaccattctccctctactctctccatttttgtatacaaatgttttatgtaccatgaagaactagttccgctgagaccagtgctcacttttggtctgtatactacattctgttatatgaagtttctgttttagggtttcctttttagcaccgaatcaaaccaaacccatccctgttttccattgttattaatgttgatgtgcagtgtgtgatgcaatcctgtttctcctgcccttaatttagagttagtttaggacccaggattagagctccaattaagtaattatattttaattgtgatgtagttttcagttttcaaattccactttcctgttttatctctgttgcaaatttaactaccccacaagactcttatatattgctaaatcatagccaattaggggagacgacatttatgatcatgagtactgtatgttgtgatagttatgtttggtgtcttgttctacaaatgctactgttgatctcttcaatttatagtactttttattgatgggattcttgagtttgtttttaaacgcaggtatccattgaatgggcacatttggttaagattttgttttttttatctcacacaaatgtctagccacaacagaagtcaaagtgaaagcgctttcgatattgaagaactattagagattggaacaagatgtagagaggtagcatatgtttcttgttaaactattcagatgattgctctcagatattatttttagtaaaatgctctttcggttacaatatgtttctaaggcttaaacacttaagagtttaaacatttgtgtgtgtgcgtgtgtgactgtattgattctcattctgcatatgaaatctttatatatgtta

SEQ ID NO: 25385 - DNA, 7042 bp, Cannabis sativa
ggtatatcgatcatttcattgcatgtattattgatatgattacagtttgttttccgcatttcatatcgtttgtatatgctatattacatatactacattatagtctaacatccactggtcattataaactcccatttaaagcgagaatataagacacacatgatctcctttcatgaaattaataataaaaaaatatgtataaattaagaatttatcacctttgagaaaatatattttttaaactttatacattaatccaaaataaaaaaataataataaatttatatatttatattatcacctttgggaaagaaatttaaacatacacatttaatattaacttaattactagctttgggcaagtagttacaaatatagccaaccaacataaataatattttctacaacatatgaattttggtgataaactatcattgaaaataaatatgtagacaaatttctaagagagatatattacttggttataatatatcgataatcaaaaaataaagtgttcactataacatattatttttgtatcgaacaatcaagttttacaatattagaacaacaaaaaatgaaaagatgcgatagagaaaatattagtggagattacatagtcaagatacatcaaaataagaaagtgactatgtcaaatggaacgagaagaaacccaaaaaaattctatgatttatagatttcaaaaatcattaaaaattatttttaataattttttaactatataattatcattaaattaataataattattaaacgaagtcaaaaaatttattaaatttcatagaaaaattataaattaaattataatcacgcttgaaaaataagaaacataaaaaaaaaatgatgtttggaacagccgcacgcgcccccactggccaacactaagaatggggttgaatggaagaggttgtcttcaacctccaaccaggtcccaagtaggtcgtgccacctggtttgcaccaagcacgtcaggacaaaatttgggccaaaaacgaacgaaaatcgttaggaaaacaatgggttcttatggaaactaatttcaaatagatctacactattaattttgggtataaatgcataaaagtatgtagatcttgtaatgtgattcaaaaaaattaaaaactcaaagaaactcgattatgttgtatatctcagtcaattttgaaaataaatcatgtaagattattgaaaataattgataataatatattcttaatcaattttaagttataatcaatagaatcaaaaattataaaaattaatttcacaacgaaatcatataaatcctaaaacttcaatcttaaaatattctaaatttgaatcgttgattttatacatattatacatcattcaatagataatttcaaaagattaaaattggtgactcagaaaactgaactagaattctaagccatactcactcgctagattgcgtgaataagaaaagtagtaaagtaatgaatgagtaagagtgttcatccaatccaatccgcactattttgcttatagtgcattcgatccgcactaagtgcggatttcattttttagatccaatccaatttgtatagtagctcaaatccaatccaatccaaatccgcaaaagtgcggattgaatcggttattttggattggttactttttaatatttatgaaaaaaaatatttttttacataattagcaacaaaataaaacaaagtatagttattttatgtctccaacaacgtatcaaaataaaaaataaaaaaacaaataataaattcaaaggaagaaaaaaaattgtatgtataaaaaaacgtaattttattttaaattgaatttagaaagaaattatatataagaatataatatacatttaacatatgaagttttgaaatataattgttttatatgtattagacttttaaattattattttctttatactatattaaaatgttatttgtatacaaatttttttaattttttaataaatatgtgtggactagattggatctgttacttttacatgtcaatcaacatccaatcccacaagtggggattttaaattttccaatccaaaccgtacaagtgcggatatccacactttgcggattggattagattggatcgtgcggattagattggatcagctattttatgaagacccctattaatgagagacacaataatttatagtagtttaccccatatatcgcgatagtaatggagctatgtctactttgagtttttatttgtcatgagatggtaattataacactgtttaagtatcagaagcttcgaattctagagagaagtttggaccttatgggtagtgttctgaatctgaaaaatgagctaagggagctctccttttataggtgaaagaagcctaaaaaataggagataatatacaaataaagtttttttccaccgttgatgataatctaacaataaaaattagcttttggtggtgatggctaatttttggtgtctggcggatcccagtgcaaggtactcagagcttatttttgtaactcccttggaagttaattttgacgacgatagttttagaattttaaatggagtgtgagacatgacttgatatagggcttaaatagtttcaaaatacaagttgaattacgtcaatcagataaaaattgagttatggccattttactgaaggcagtttagatgccagcgcccaagttgatatccagtgcttaggttgacattctagtgcctaggttgacattccagggcctaggttgacatctgacgtcaacttggacactgtctaagtgtaaaaatgtccaagggaagtcctttgagatgcttaagtgataattttgacacaccttagtccttttataggtttgtgtgaagctggtcacacattctcagagatgttactattttgtagaaatagaagcctcaaaacttccggcttctgaatgagccaaaattgaagttgtgaatatctgaattcatggatcattgaacttgtgaaaaacatgacaaacggttaaaatggcatcatattcgaataaacagaacccagcgaaccagaccatttgttgacctaggagttagggcctttaactcgagcattctagattctattttttatacttccaaggcttctaaacttgaggacgaggtctcttcccctatttttgaccatgaaaaattcaatggttgcatcagattcggtagttgaacaattaaaggcagtgtcctaggttgattgtcaacctgggtgctggacccagcaccaggtcaacctaggagctgggccctgtttccaaggactcgagtttgtgattttctccctgagtttacttgactctttattatttcgaatgacggtgaagatgcctagagaaatatttgctgaacagaattataaacagccaaagttaacaaaatgtcaacttgggcacagggccgagtccaaggtgtcaacctgggcgctgggtccctcttctgcccctttagaagttccgcttggtctcaagaaatagttaattctcaatattttctgaagacagagatgattctcaaaagaattctaggaaaattccattttttgaggcctaggttgtcaaattgccaacttgggctgagccccaaatgtcaatctgggcattggatcttgctttttctgcccaagaattattatttttcctctagaaggacctatttctctatttttgatgaagaaaaattcaatgaaactttaggtgctttgatcaaacacttggaaggggcccaaaattgacaaattgtcaacctaggcactgggtgctcagagcctcgggtgctcaaaaatcaacttgctcaaaatctgatcttgatgcctcaaatatgtccgtggtatgtcaagtcgatgtcccaatacaagttttggccattttacagtaagacggtccaaaaaattgaaaccctagttaaggatgtcaacctaggcactaggtggaaaccctaggttccaagattgtcttctaagtcacaggttcgtgtaatttcagctcccggaccttgtattaggtttctccatgtcctcatagtacagaatattaaaagatagttagattcaagttattaaagtccaaaattccatcctagagatcctagaatcaacttgggctcagggctagggtcccctcccaagttgactgctatgactcgggtttactcaactccgtgacgtcatccttcatactacgtgtcaaacattgatgttcacattaccaggaaaagttttgagttaacaaaaacccttaaatttttaagattaaacaacaaaaaaattaacaaataataattacgaaatttatatgtaactagacataattaacccacacatatcaattgttacataaattatatatcctaaatcatatacaataggctctgataccacatgttaaaaaattaaataaaccaggatacaaaatttgtacataatttagagtacaataataatagataataattaggtatacatacctgattgatccataaaaattatctcaattttgatagtgtaatattatcaactaagtcttccttcctaaatctctaaattaaaagtaattttattttatttttttattatcaaaagtaagcaacaattgttgtgataagataatatgtatttatagagttagggagaggacttagctacataaccctagttaaattagacttgctcatcaaagacaccaattaactagaaaagtccaaacttctgattcaactaaactttacacaaacaaatgaagtccattaactattgatcactagaaatatgagctaacacggtaaaaaactgtccaatcaacccaattttattaaaactaatgaaaattaatgtaagtccaaataaatagtctaacatgcttttctaatcatcaattctattgatatagaggcataacctatcttttaaggttgcgtttggttacaaaataaaaatggaatgggaatgggaatgttaataggaataggaatagaatagaatgaaatttctattcttttatttggtaaagactatggaaccaataactgaataagaattgtgatatttgatatagtatgaaataaaataaaatttttattattttgaccaaaatgtcctttactcttttaaaataatttttattttataaaattgccaatatagtacaaataaaaaaatgatatatatttatgtatcactctcaaattgtagtttttttagatctaattctcaaaaaataaaaatatataaatatatttaatttaattatctattttacattaaatatttaagtatcaatataaatgttatttatataatttaatcatcacacatcgtctatttatataattataataatagtgtttccttcttataattctgtacaaaaaaatatattaatcatattattgtaatattaaatattgtagatatacattttaaaataataaaatataacttatataattataactttaatcatttatataagagaaaggtagatagggaaaaataatttttagttggtatggaatgagttttaagtcattttatttagaaaaagtaattccctagtttacatgaattataatttctattggaatgaattttcaaatcacaataaacaacaaaacacttgaatgatctttctttaggaataataattctattcttacactcattcatgtaaactaaacactacttaagatgaggtttggttggaaggaatatgaataggaattgaataaaatttaaaatgtataaaaaaaaattgataaaaaatttattaaattctttctaatcatgtattggaatgatctttcctttcatttcaaaatggaatagccattccactaaaatggtaaaaaagttattctattggaatgacattctaatactatgcaaccaaacaaatgaatggaaggaagtttgtttcttttcttttctattccattctatttcattacttccaaccaaacgtcaattaagttcttgccagttagagaaggtggagaggaaattttcataagctttgacaataaagcattggttgatgtccttaaaggcaaggtttctatgccttgctggaatatctcagctggtgattttcctatcttagagtttgttaatctttacatgtttatagttgtaactacatttgtagtttgtggccaagttgatgctatcaccaaatgttcatgttgttaagattattggcaagtttttttaggggagttgccctttgtcatagccggtttaatatataaagaagaaaaacaattaaaagttgcatttgtgaaagaaaataaagaggaaattacacattttttaatacgatgcgtgtaaaaaaatagttttttttttcctgaaaacgtggggaaaggaaaagaataataaataaaaatagggtttgggaaacacttaaaaagtaaccattttcccatatttttaattttttttttctttaacttttcccataatttttattttcaaaaatatcacattttttggaaataatgaaaattccccaaaaataaaagaaggaaaagaatatgtcaacaataattgtgtgatgtacattgatgaagctaaatgatctcatcctcacataaaaacccaaagctcacacttttggattttatttcagttaacaaattcactcaaaatagtacaagtaactatgggccataagaggcttgataaaaataggcccaaaagaagaagttgtctcctataattataggtgctggttttaatttttgagtttacaatactacatttgtatgaagaaataatgacaggtatgctaccctcctcccaaaaaaaacatataccctaattattcgaagaaattatactatatactttttttaatttgatgtttttaattattattttttttaaaatttaattatttttacttttttttaggaataattacgtaaggcaccattttttgtaaaatatttatgtttttatcttcaaagaatatttttttacatttttacggttttttaaaaa

SEQ ID NO: 25386 - DNA, 1724 bp, Cannabis sativa
aaaaagccactcctctcatggctcctgtggaggaggaccatcgtcctcctccacaggggtcaaattcacctcaatagcaccgaccgtcgagcccacatcattaatttgaaacaaattcgtaggcggaattgagagatccgccaaacgggccttggccttccaagccgtcaatctagaggactgtcccgaaggaactggcatgtcaacttgcagagatacatttgcggaagtcttagttaccgctttcactatagaggtctgtccattaacatcacacgacccactttcactatatgcatcacacggcccactcccaccatcaattacaacattacggttagggcccacacctagagcactcacgggctctacaagtgtcttcttattaaaattaaatatctcaagccttccaatatgcatggtctcattggtgggctcaacaacaagcaacggcccaccttctactaacttccccttatcattatccaacaacccaatctccacaggcccaattccacattttggaccactgcctggcccattaacttcgttagtcactaaattcgaattcggcccactacccgagaagtcaaaacttaaagccaacgggtttgtcaacttatcctgagttgtagcctccaaaataggaaaaattgcaggagccttttctccattattcaaaaccacttcagctccattaccattaccagtaaacctcctatcacgatcaactggcaccttgggcttccaaaccatggacatctcaagcccatgccccaacggccctcgagaagccaccgatttcgtacgtctcgagccatgaacaacagaaggagatgggcgatgaacagttttgcccaccccattatcgtccgacgccgcagaacaagcggagaacctcaacaaaggggcagcggtggcaccaaccacaggtctgacactagcacaggtgaatgcattgtgaaacttagagtcggtggcaccaaccaatggaaacggaattcctttgccattagccatcttgacaagggacaacacagaacaccctcgccttggtggcctagacgaccgcagatatagcaaaaaataccagtttccccaaaaatgaaacgaagccatcttttgacactagaggccaaatcaaaagaacaaccagatacctatggaatattaatagtgatatccaccaacatcctgaagaagatgttccagtgcatagatttgtcctcctctaactcaactttaatcccattaccaatcataccacaactaaaacaattgcctttaataggtgcaatagacataaaaactaccaccaaagctatgcagacagtaaaagacaatcaccacacctacccagaatcaaggcaagactcacacaccgataaacagagaaccagaaaaacaataaaggaaaaaaaaactctcacaaaacaaatacaaaaccaccaatccaaccacacataggagactcgaaaaactcagaaaccccaagaataaagcatccaaggaaaggcaagaacaagcagaggagaaagatcagatgacaacaagaacgacgagacaagaagagattggtcgaagcccattctctctgacgaagaatatcttactctgctcaacgtgctcctgatgaccattctcatctgctcaacaaagaatatcccacggtttctcttctcagtcccggtggaattcttttcaggcaccgacggtccaatccg

SEQ ID NO: 25387 - DNA, 3662 bp, Cannabis sativa
aaaaaaaaaagaaaaacagaaaaagcttgggggtgcaactccaaccctacaatatatttatatatatattatatattttaccagcttttccctcttgaaaccccacaatagaggagagaccacaaaatataacctatatatataccttaataccctatacaagtgtagcatactgcccactttggtttataccaattcaaaatgtacgtcttattattattattattattattataaatattatttttcatttatatgtgtagctagggagctttataaaacaataaagttccattttgattatgactcagttcaccacatcaaaccccatctctttctctctctctctcttcttcactataaccttccataaataccttctcctctcactctcttctatcccccttcgttacttctatatatccctcctgcagccatggctagctagggctatatatatatatatatatatatctatatatatgtatcacaaacacctgggaaacacacaactgggctagtagggattgagcctatctttaattgttctctctatttctccttgctcgattttctctcacaaagatatgagaattatacatctacgtagcatatgtgattatatatatatatcatggtttttatgagatattgttcttaatatatatatatatatataaaaaagtatgtgcctggctccctgtatgccatttgcagagtccaccggaaaatcgatggcctccgtggatggcgtatgaggagccatgcatattccatgtaacatatacatggtataataacatatataatataattaatatatatacgcattcatatatatatatatggtcatgattttgcagttggaatcggcgatggtgtagcattttaatgaaaaaacttgcagggtttttctccgatcagacaacaacaaacaaaaggtacttaattttctcaaattaatctttcggaatttagctattagggtttgttaaattctatgtttttgtttttatatttcattttattctaacataggataagaagtcattaaagtgttatacattgcaaaaaaaaattgttggtttatttcttgttttgcagataaataataataatattatatgtttttgttttttgaagaaagaaatagtagttgaatagtgatatatattgtgattagaaaaaaagtttggccttagtatttgtcatatggcatattgtaaaacttcaaattgacacatatggtcatgtcatcgacccaaaaacacttgtatcgaggcgaatgggaaggaaaatttgtggcccaaattacggtgatttatattagaactgtcacacctgacaaacatggaagttacaacctagcaacttcacatatatatatacacatacattaatttctcttctaaatatattgcctctttttctcaagaatttgccttactgatttaaaaaaaaattcatctttttcgttagtaatatatattacctttttttataaaaatcattatttccctaatatatgaatccgattttaatttttttggtgttatatatatatatatatatatattagatgcaaaattaatgtagtgctttttccgcggcaagtgggacttttttcttttttaattctatttcattgtcgaaatgagttttcgtttatattttaattggttatatatattcttatatatttaacctagctgcaatctcggcaagatttgtgatagagacttgtaagtattttctatatatcacttctaatgacataatttctcataaagaatcctttcaaaagagggaaggatcgaaattaaaaaccttttgttaaagaaataaaaggaaattagagaaaacaaaaagaaattacacataaatatagtaataaatatatggcataatcatggcattttagcttttgagtcaaaagaaacttttgaaaagaaaaagaggagctcttgtagggaagggggtagtggtgtatttgtatttctaacaagttttcttttttttcttttctaaaaaaaaaatatgccttatcaatgttttactttcggtgggggaaggtaaggtaggcctactatatgtgtaagacattaataaaaccctactatatataatgtccacatataaaaacctcttcaatattgttcattatttttcttcactattgatatagaagtactcttttttcttatacatgaacatgtttatctttttagagtgtggtagtgatttaactgatgagaaaataaaacaaaaattacatatccaaccaacaaaagaagtgaaaacacttaacatatcaataaagttaggtggagacatcatatcttaatatatatattatatatagcacttatcgtcattatttttcttttgaggggaatatttttcgtctttcttcgcatgcaaatatagctttcgtgggatgtaatatttgatgagtttagctcatatatatatttgcataaaaagattaacagtcgtacagattcctagtcttaaatatccaagcaaaagaggaaaagaaaaagaaaaagattctttaggcttatttgggagggtagcatggagatttcaatatcactatatatatatttatatatatatctctaattacataaatatctctatatatactttgttcacacatatatatataacaaaaatactattttctctatcacaacaacaaataataatgcacgtacgcaaactctctagtcaggcctttgtttcatcatgatgaagaaagaaaattaataacaagaaagaacttatatacatatatatatttatgggcctatatttatatatatatataaaaaaaagaggattctgggaaaagtaaaagtgttattggcagagaagcagggttatgattatggctactagggaatctcattactcaaatacataaccgagtggtcctctctctctttctctctctcttgttctgaaatctctctcttttcaattggttggcagagaatatagtttacggtcaaagcaggtcaaaaaggacaatggggtcaggcaagagatgagtgtgtgtggaccactccattttaaacatctcccattcttctcccctcaacctaggtctccctggattatatatatataaataattaaccctagatgagttttgattattattattaatattaattatattatcttttgcagtagtgtgtgtctgcttataagttggtttttagttgtgagaacattcttctggattgatctgcaggtctgaacacttgagaatagtgtgtgtgttcttcctttgaaaaaagataagttactcataataaatatataataataataataattttttcacctgcagtgcagtgcaggctatatatatatagtagagtatataaccatgagacccatatgggggccactatagtatcctcaccctttaacagagattaattgtactcttttaattaaaagtctcaaaaagtagattctatatatctaaattttctgtttcaacttttaacacatgcttttctttatcactatagctactatttttaactgtttacatcttttttttaaaaaaaaattttgttttgcatatagaagaaatgtcatgtcggtaaaatatatattgtatatcttcctttttcatttttaat

SEQ ID NO: 25388 - DNA, 1977 bp, Cannabis sativa
cagagaggcgcaagaagagccagctccaacggccgaatgagcccaattccaacgaccatcggttgaacaatcaaaatgaaagcgacccatttcacggtcgccagcagaatgttgatttgatagctctttgtcaccagggtaagatcgaagaggcgttaaagtatattgacgaaggcgtttctgctgattacaacgttttttgtgcgctattggattcatgtcgcgactccaagtcgtttgaactcggcaaaaaagtccacgagttcttgaagcggtttactttccgtggtgatatggaattaagcaataaattaattgaaatgtatgggaagtgtgggagtatgaaagatgcacgcaaggtgtttgatagaatgactgagcgaagtgtgagctcgtggaatttgatgattaatgggttagcagcgaatgggcaaggtaatgatgggattctattgtttgaagaaatgaagaaggtaagattgaacccagataaggaaacctttctggcggttttggctgcttgtgccagtgctgaagctgtggaagaagggtttgtatactttgaagaaatgaagaatgaatatggaactatgcctgaaattgagcattacatgggggttattgatattcttgggaaatcaggtcatttgaatgaagcagaggagttcattgagaaaatgccatttgagcctacttttgaagtttgggaggctattaggaattttgctcgaatccacggggatctggaacttgaagaccatgttgaagagttattggttactattgatccttctaaggtaaatgaggataaaattccattgcctcagaggaagaggtcttcagtgaccaacatgcttgaggagaagaacagggtcagtgagtttcgctgttctaatccttacaaagaagaggcataccagaaattgaaaggtttaaatgggcagatgaaggaagcagggtatgtgcctgatacaagatatgtgcttcatgacatcgatgaggaagcaaaggagcaggccctgcagtatcatagcgagcgcctcgccattgcttatggtttgattagtactcccccaaggacaactcttagaattatgaagaacctccggatctgtggtgattgccacaatgcaataaaaatcatgtccaaaattgttggaagggaactgatagtacgagataacaagcggttccatcatttcaaggacggaaaatgctcctgtggtgattactggtgaagacaatgtaagcacaattgatagagatttccactagtaagtttggcaagaaatttactagtgttgtaccaagaaagagcatacacaagttttggcttgaaactcagcagcggtgtaagttaacaaaatgcttggttgtaaatcattcttgtaacttttttagtcaccatttaatatagcaagtttattatgtgcatatcttttatacaacattggctacctagtgttcaccctttgtgcttctgtgatctgtataccaagtcatctgtgtggttatcagtctttaactacgacactatacacaccaatctttaattgttcatgagcactaaaaattaatgaagaggaaatcgatttatgcatctttcacgtgttttattttaagttcactgttacattattaatatgaaacagtaaattgtgattgtgccagaaactttcaatctgccagatacttagaatagaaaacattaaaaactcgatggaattgaaatagttccaatctgctggctgcattactaagccaccgtcgaagaggatggctgtttatcaaatctacaaaaaatttaatcataaaacctagttacctaggtctgcctggctgctatgaatcattattcagtcataggtacaacacaacatcacagcaattagttctttatttgcttccatcatctctatgtacattgattgagaatcccgtcttcgcaaaagaacatcctcctttttggaaaccttg

SEQ ID NO: 25389 - DNA, 1891 bp, Cannabis sativa
  modified_base (179)..(187): a, c, t, g, unknown or other
aaaaataaccacaaaataaccatagagaaggaagaagaaatgtattttatagcctccatcttccacaccacacagatataatcaccacagcaccacaaggatacccagaaaacaatcattaatttcagcaagatggagcaaaaatagtaaattcgacgttaaaaaataaattatggaannnnnnnnnaaaaccaacactaaaacaaaccaaaaaaactaaaaaataaacacatatactgcagtatgaaacttagaaaatacaccgtaaaaaaataaaaaataccgcctaacaatatttttgttaaaaaaatggcaaaagtcagtatactatgtaaatttccctaagttttatttagcaactactatccataatatgagaaaagagagaaagagattagcatggttgttatggctgagttactgactaaggagggagatcaggtgctgatattgagaagaaagatcagcactcacagtgattccatcagtgtcagaattggggttgctggtggaggcaagatttgccttagctttgcccttttcttgtttctttttgtctccataaccaggggaaacacgtgtatgaaatagcatttatcaactaagtgacctggtttgccacagttggaacaagatggtcggggtttcttggctcttggagggttggtagaacttgaagcagcagccagtggaattgcatcagcagagccaagtgatctttgacgttcttcttgaacgatcatggcaaacacacaggacaaattgggtattggttcattgagaaaaatttgagctcgaactgaagcaaaggattcgtttaaaccagtcaagaattgaagcacttgattcttgttgtagtaatccaagaaaattttcattgcaccacaagtgcaagtggttattggttgaaattccttcaactcatcccataggaattttatttttgtaaaatatgcagaaacaaagtgatcaccctattgaagacgagtgagctgggtctacaattgaaatatctgagggccattgccttcattgaaatggtcagcaagatcgttccacatttcagtagacaaatcaaagtacattattactttctgcaatctcagaggaaacaaaattaatcaaccaagacatgaccatgttgttgcatcttaaccaagagttgagatagggattactaggttctggacaaggaagagatccattgataaatgcgatcttgttcttagcagtcaaagccatagagatgcctcatttccatggttgataattggtgccattgaggacagtggacacaagcacgaggctggggtgatcgctggtgctgaggaagaagggactggaatgatcatcagcaacagatcgagaatcgagtgcttgagtcgtgttgtcatcaacgatggtggattggtcctagggagttggatctacatactgagattgaggccgaagtggtggattgcgaggatgaatagctgagaaatttggatcaggaacaggatcgtaattgacctctgctgcttggttgtcgattgttgatggaggagcaccatcctgagaacgagtcgaaggtcttgccatgaaagttgtgagcaagatttcttctgataccatatgagaaaagagaaaaagagagaggaagaacagagcaaaatcttgttattactcaactgaattttacattgagagaaatgagcttatatagctcgattcatcaaaaaagtgttagttgaaaaataaccaacttgtaactgaattataaaagctacaacagatgcatcttaattaagaaaacaatcctaactaagttaatccaaaggtaaatctaaaaatacataacatacattgttatattaatttatataatataatatgtagattaaataattaa

SEQ ID NO: 25390 - DNA, 4079 bp, Cannabis sativa
cttacccaatcttagccatgtgcattcattattatatttatatttactagatgaagcaactcatctgtaagtttgaatgactcacgagtaatgactcatgaccaattcaagagcatttcatgggctccacagtttcaggccttgtgtccactcctacaaattccatgacttgggaattttgatattgaattcagatgtgagagttgcaataatcacaactcgtatgatattgtaatttcttaataaattttctttaatggtacagataccccttaatagcttagctgggctttattatacgatcgttgatcatatgtttcgaggaatctttatattgattggtgtcttctttttgtttctcttccttgcacgttttcgattcctaattctacatgataccaacgaataaattcctcaaccaactcagcaaataacccaaaaagatacaaatccaaccaaaccaaactaagtcgaacagcataaccaagaactaaaagctgtcgattgtacttttttttgctaactaaaaaggagataatgtggtacagatttttttcccatcccttcgattgtaaaacaatcttgatgaccccgtgccaataataaaagtcttatacctcatcatgctttaatttgatcatcgatatacactttacgaggattccccatctcattaaatatgagatcgccaaaataagataactccctctcaatgaaaagcaatagtagacatttgaactcttaatctaagtaaagatgtcataaaagctttcctactacttcaccacacatgttgtaaagctgtccattgtacttgcacacatgaaataatctcccacattcacataagttatgtacttggaaaaacacttttgatttaaatttgattcacaaagtatgtaagtaaacaaaaggatatgtcattggaagcaaagaaggttcatttcatgtgacatgatacttttaacaatttaaacaatcgacaaagtaaacaaaagagaatagagaactagacaaataaagatgcaactcatgaaactcgagacagatggaacattttttgtttttgttttttgacaaccaataatgccaatagaatttttttgtacgacttgagattcaatctcagatttcaaatcagaatgatgggcattccttccgaatcaaaagcaggcatccaagagacagcaacaacatagagcagccaagctgtataaacaccaaaacaaacatgtttttaatcagattcttcatataaatatatattgctaacatacataaattttggtagatacaaagacaaccaactaacccactattatagtgggtctcacatcacatgaatagggtactaaagatttgatcataagaattatctcacataaacaaacaagattttaactacaagacatgattaaaagccaataatactgcttacctaaatttaatattacacattaatagaaacgccaaataaaatataaaaattatcttcttcctagaaatctgagcctgaacaatttgtcgtgtacgaccttaaagacatcgaaagatcagagattcagattgcaatgacagaaaaaaagaaaaaaaaggacggcatcaattccacccttgatttgctaataatagaaaaagggtattttagaacctccaaacaaaataaaataaataaaaaaaattgggaatttttaaaaactaaaatcctcccagtggagagagacacggcatcatccacaccacaacacaacaaatacaacgaaacgcgcattttagttactctatcgtgcgctgtccaaagagatagagagagttgactcgctcaaaactcaagacgtacgagccagatcgtctcagatctgagtcatcgaagcgagtttcaacaaatcaaaggtaccgagtgacagagacaaacatagagatagatagagagagagagatagagagcttaccagccttccatgaagccgccgctttgtttttgttgttgagggggaggctgagcgtactgaggagcgtaaggtggagggtaaccctgttgaggatatccttgtggaggataaccttgttgaggatatccttgaggaggatatccctgtggtggataagcatctttaggatatccttccggtggataacctattccaatattcaaaaaaaccaaaaccatattcaatataaaatttccgatcacacaataaaccaatcgatttgattcccttaaaacagatctaaacaatagaaatctacaacattcggtcaagaaaatcataatagaaaaaaagaaaagaaaaaaaaagaactgaccttgaggcggaggaacaccgactggaggttgttgataactcattcttttcttctttcttgattctgatcgttccggatttgggtagatttttttttttcagaagagagagaatatgagagaaaaaaagagtagcaggaggtgtgatatttatacagaaggagaaaatatattaattaatataaatattatttaaaaagaaataataaaataattaggggaggtttgtttgtttaattgtttgttcgaacaaaagtgacagttttaaagggtgcgaaatttttcattattaattttagttggcactggtagtagcatcctattggttatttgtgacgtgtcaatttttttatataatattaaaaagtatttttttatttaaattttagtccaaatatctaattaccaaaactccttatggcatgttagctaaaatgtatttttagtgatatacttaataaattaaagatttttcgttcttaaatttatatctacacgagttttttttttctctaacaagccttgccagttagatataagtgcggtttggtcagagttgtattttgttattgtaatttttgttatatataatatagctttgaatgtttttagtcttattttaagtgttttagtcttgtttgagtgatataattttgttttattttgtttcggtttttgttattgtttatttttcgatgactctatcaaatcgatgttagaggttaagaataacgagtttcctacgattaaaaaaattgttaataagtgtagttatgtaccttacacgataattgagtgcttaaactacgaaattgaatgttattgcagtagttatcattgttatcatttgagataaatatactaggtgttattaagtttaactataattttatttataatttttatatttagttttttcttttttttaattctaattccgactatgtctttaataagagagatattcttattgaattgtaaattattatttttattgattgctattaaaaaatagtaagatttatataaaaaaaaaaaattgcattcttagtatgatttttgtttataaaggatgatatttttgttcaaagaaaaaaaaaatattcagttatttttcttatttagttaatttttctttctagaaagtgaacgaaagaagaggaagttaggttcgttaaatgaatcccatgacgaacatttcaagaaaaatccctaaagagaaaataaaacagttgtttgttaaatataaaacgactatgcccaaataaataataaataaataaataaagaagaagataaatataaaacgacagcactttggcaaattccgcgtcttaaacgtgtgctacactgtagcatgaccagacagaagacccaaaaaaaaaaacaaacaagtggggaaactttatccaatgcagattttaatttggggaggcagttaaagaaaataaattcaaactaggtgtacttttccaatttttgttcctcaaattcagatgataccttttaacccaaataaaacaatattattttgcaaccaaaacaaaaaaaaattattgaaaggtagttcattgttcaactttggctgtctattgttcaaatataaattagtagaattataattatttaagatttaaataatttatagtgtcaaaaataaaattaataatttaaccacaagtgtaataataaattattggaaaattctaccatgcacttctttaaaatggatatattgattcactcttatctgttttagcatccgaaataattt

SEQ ID NO: 25391 - DNA, 4531 bp, Cannabis sativa
tcctcgcaaatgctgttctctacttataatgagtaacatctattctataatcaatcaactaaaaatggggattactcttacaactatgggaatgtatgagatgagactactcttatcacattgtttcatgaatcatgatgagagcataatcatcattacttctttaaaatcctacaactagtgtactaggaaggaccaaaatcaactacaaaactcaacgaaagaaagtactaagtaggcacagaaacaaggctcaacatcactccacgaaatattattattagtaatatatatcaaaagtcaataaataaatcaaatatatctaacatgtgtataaatagaatagataaccatatttaaaatgtctgaaagagatctcaatggactgtaaatgatattatagatgagagaaaacatcctcagcagaccacaagagagccaaattttatctatctgaatatgaaacggatcgattatatacgttctctcactcgagctttcgtctaagcaggcctttgaagaagtcaaaactatacatacatgcacaataaaagcaaagcagtggtgagaattttcctaaagagtccatatattacatcattgagattatatagtatttgtgtacctattcccatcaggatgaagttcacacatttgattgtcatcaccaacagctaacaaatatcctgaagaggtcaacccctacaaaacagaaacaaatatataaaaactcaatactcaaagtaatatactttgataaggagaatgttagaagtgtacctgaattgtgactacgttttctaccactacgtcttcattcttttcctgtacaataaccctctgcccgctgcataatcaatacgaaatcatttgcttcaaaaagcacaaaataagctatttcggaaaggaaaaagaaagaagctgatgacacatctttacaacaaactactcggttttgctttaaaatcttcagtttatgcagaccacatgaaataagatagtgaaatgcaaaaacttgagccagagttctattttcgaactaagatttactaccagcataagcagaatttctcatctttcctatgcctacacttgttattctccaagaaaaagaaaaaaagatcaagatttcacctgtgcagccatgttttgtagtataacttctcaagagcctcgaaacctgcatgatatgataaaacaatagagttgttgatgatgaaatctacatggtgatggattaccttgacttatagaaaatgatatacaattcactcattgacgaaatcaacatgacaatagattaccttgatttataaatatatcatagaacttctcaaatttgcaaaagaaggcagcaagaatatcttctcttctaaacttgtaatccaaactagacacttctttcaaaaatgtgttcaaacatgttgtcggtttctcattgtcaacgttcagacctatacctgtaaaagcatgtgcaaattaaaactcttaaaacagataaaactatacagtttatttttgttttcttgttgagatgaactgcatgtgatgacacaaaaaaattaataataggaatagttttgcacttaggaaaagttcatttaccgacactgacattaaacttattggatttatacgttgaggtgcagagaactcctccaactttgaggccattcaagtaaagatcatttggccactttattctaatgtcaacacatggtaaaccctgaaataagaatacaagcatatcattttgaaagctagacaatcaatcatccaatcatttcatggagtgtgaaataaatgatcattcttggtagtccaataacagaataacaagagattctcaatcagatactaaagggtaaaacagtggcttgtctttaacactacaaatttctagtgtttacatatttagttgactacaaattcaaagaatcaccaaaaaagagaaagaacagtttcacaattcagatatcaagttcatcaaatggaactttcagtttcatgattccaagggattaaaacttacatttttatcacaaagatggttaatagcttctgtaacagcaagagagaccacatattgtacaagaggcacaactcttccattcttcatctccaaggtgaaagagaacagaagaccacccttaggtgattcccacatattcttagacctccctgcaagaaaaaaaaaaagcatctttctttacttctttacctaatttttcattcatttcaattaaaacaaaaataagatcaatgaaccatttcaaacctctccctttgtactgaatatcagctacacaaactgaaccaatcggaatctcatcgaaatttctgtccacaccaaaacaggaaatgaattgaattgaataaacccaaaattaaaaggcaggacaaactcaccgagaaacgacgtcgtgtgttgaagctaaccgcggagaccaaaggagaaaccttccgaatctattggtggagagagaattcatgaacaagtcgatttcgaacgagtccttttccaagggtttatctaactccgattgcagaagaactgaaacggtgccgttttcagggagcttcagagtgttgttgtgcttgagcgattgggcaaaatcattctccgccattgattttcctcgaagaaccagcgtagatgggaaattggactccataactgagaaagaaacaaaatttaagaaattgaatatgagagaataagggaattaaggtgaagagtacctgtggcggccatggaaatggagaatgaggaggaggaggaagcagtagttgagagtagagagagaaaatggagaggggttcgaaggaggagagagcaagaggttctagcgaagaagagcatgagtttgaagatgatgaagaagaagagaactcgttttcggcggactcaacaactatcaactatcaacttttgaccaaaaacgacatcaaattctgaaaaacgacacatttcaaaatagttattattattaaggaaaataaccacgtaagtacttcattttgaattcattaataaaaaaaaaatggaagtaattgatattataagtttctgtctagacccaatgatctagaattcgagtcttatatgtagggttgttcactggatcacattcaatgtttttagactcatccagatccaattcaattgtacattagatgttagatttctctaaccgatccaattccatattgtaggctcaaccaaaccgatctaataaatcattagattggatcggttccatcaaatggatgaatccctgtattggatcggatccatccaatacttttgatccaatattttttagagcagatattagattcattcaatatttttaatccaagagtaatacctgatttttcacctaaactactaatatattagttcaaaatattacaacccaacataaatccaacctaattgtaacataagtccaacataaatccaacctaaattataacataaatctaatataaatccatcctaaattgtaacataagtctaatatcaaattataataatacatgttacataaacaaaagtatacaaattatgaatattatagaatccatcatcagtccaaactccaaagtgcaaactccaaagtggcaatgtcactcaattctgaacaaatacttttttaaggtttgttaatactactctcactttattaattttttttttctttttaaaaggaaaaaaaaaatatagtaaaaattaccaccaagatgaacgatttttcaatttcttataaataatgcttttttaaaaaagcaaagaaagtatatagttactattattttgaccagtcaaaacctaacatataacatgtttaacggatcagttagaagaatcagttagaaagaggagccaatagattaacaaaaatagtaacttttggactattactcccaattttcaaaattaaagactaatctgatcaaccttaaatttttgagaatttttaccgcaattatccttttttttttttttacaaacaaaagttccgagctcttcactaaattggtgttctctaagagcgaaaattccacgctattttttagagcaaaacaccaaaataatacacctatggagattgccctactaattatttccttccctgaaagaaaatacgaaatagaatgctcatctcctttccgattgcctactaagatttaagcctatcctcatcgttgtaaaacatttgccttttcctatctgttattttaatcttcttctcaagtctcatccctaaaaataattgccgacaaattgttgtaacgaataggagaaaaatattattacaacaaacaaaaatttcaactactgtagatactaaatctccttttaataaactgaaatctatcatattctactcagctgtaggagcaccatcatttatagttattatgaatttaaggtcataataaaattggtaaaattggggtggaagtgtgaaaaacatatgatttggaaggtgatcaaatttgaaacaaagaaatggacaaaaat

SEQ ID NO: 25392 - DNA, 1398 bp, Cannabis sativa
aaaaaaccttgtgttcatattttatttttctatagcttttatttttttttttgttgaattatcatcgtgagactcaaatttggttaacgaaaatctgcgttaacacttataattttagatggatcgaacttaaattaattaaaattttatgctataaatttggcatagttgaaattatgttctacattatttttaatattctaaatgtaaaatttttgcttaatataattattttagttgattcctattaataaaatgatatcatttataataagagtgaattgcggtaaaaccccgaaaacttttacttcacaagtaattaacccccgaaacttatttggcggtaaaattcctaaaacgcgtattcagttagtactttaccatttccatccatcttttggtgttagctgccatgctggatcgtctacatgtaaacactgtacacgtgtcacaattttattggcacaagtattaaataattaaaaagaaaataaaatataagaaataatagtttaaaataaaaaaaatcatttaaaatattttttttatctttccttttcatttattattctttgtttgcttcttcttcttcctcaaacctacaaccacaaccactatatccacaaaaactaccaccacccaccacaaccaaaaccaccactaccatcaccacatgtcaagatttcagatcgaaatcaaaacacaaacaaattcataatcaatctgacatattccacacatttcaaataaaaaatacaaaaaacaacaacaaaaattaatcataatcaatctcaatctcaaattcaaacacaaaaaataagttaaaaaataatatgggtagatcgggagagagattgaacgtgaagagaaagttgcctctgcccaagtcaatccagttgtacatcatcgttggcgagcgaaacatcggccacaaacgatgcatcttcggccacgaacatcttcaaccatgaaggacgcatctccgacctttctctgtcgcgcgcgactttaaaagttgctcaaccgctcgaccctgctccatttaggccaccgtcggagggaaatgacctcaccacgaggtttttgagttctcgaagcctccagatatgaggttttccaagttttaaatctaagataccaagttgtaacgccctattccatagggacgccacgtgtgattttataagactagtttaatactaataaattagttaatagtgataataataaaaacttgactaaaataaaacattaaaaatggacagcatgaccgtagtaaaaatgtgttctaaggatccctgttataaaaagtttcacaaaaaaactatatacaacgatatctcaaaaatataaaactaaaacacacaacagatacaggccaaaacaactcctggcaac

SEQ ID NO: 25393 - DNA, 6424 bp, Cannabis sativa
  modified_base (59)..(64): a, c, t, g, unknown or other
  modified_base (779)..(783): a, c, t, g, unknown or other
  modified_base (6353)..(6364): a, c, t, g, unknown or other
ataggaatcatgatttataattaacaattttttcacatttagtcacaaattttgttgtnnnnnnaagtaagattttttgtagtgactactgtagattgtgtgaattaataaaacaaaaatccttatcattgtattttaatgaaatgtgtcaagaaaataaactaaatgtatgtattgaaactacaaaacaacacacatacaactaaaaaaaattgtgaggaagaaattaaacatatacactctaaaaaaaaaaatacacatgaaaaaaaataactaaaaaataaatgttgaaatttttttttatgaaaaccacttaaaaacaactaaaaaatagcataaaaattacaaaacaaatacacatatgtacaacaaaaaaattatggggaacaaactaaaaatatataccataaaaaatgcagataaactaaataacaattgtacaaaaaaaaaaataaccgaaaaataactataatacacttaaataataacataaaaattactataaacaacaatgaaataacaaaaagatagctataaatcaatagaaaaataacaggatatcaatcttattaaaatatgcaacttattcgtacattaactccgaataaactacaaaacataaaaaaaaaaaaaagtattatttttattaatcatgtcaaagagagaaagatataggatgagtgctcttattttttttttatgagagagagagagagagagagagagagagagtgttaaaaaatattagaaaaaatgtgaaagtaaaataatcatatttnnnnnaaggttaaaagaaattaattaagatttttttttataaaatgtgattaactaaagaaaaataatatgaaatttattgagtgtgaatagtaagaaaatgtaaaagagtgaaaaaaaaatatagtaagtgttgtatttttttttaaaaaaaaacaaaataaatttctgtgagagagtgaaaaagtgttaaaaaaaaagagatatacaaatgttagcttggaaactttccctagtaaaatggatattaatgtttgacacacagcaaaaaagataacaccttatagctaagtagtccagagtcatagcagtcgacatggacatcttttagtattatgtaccatgaaaacatggagcaaccaaatctaggccccgagagctgaaattatatgaacctgcacccgaaagtcaacttgggcacctagggtttcacttggcgcccaagttgacatcctcaataagggtttcagttttcgagaccatcttagttcaaataggtcatactttgcactggaacatgaactagatatagcttaaacatatttgaggcgtaaaaatcaaatttagagaaagtatatttttgagcactcggagcacccaatgctcgggcacccagcacctagtatggcaatttgtcaatctggccacttccaagtatcagataaaaaatctgactatgcctcttctttgtcttcatcaaaaatgaggaacaagtactttcgcggaaaaaacaacatatcctgggtgccaaaagcaaggcccaatggccaagttgacacttggggcttgcccagcaccaaggtggacattttatcaacctgggccaattccagggataatttccaagaactctttcagccatattcttaattttcagcaaagactaatattcaactatttctggggaccaaatggaacttctaggaggcaaaagctaggacctagagcctaggttgacacctggcattgggccaattccaatcaatttctcgaaaaagtgttccaagaattttatgtcattaaaaataacaaagatacaatttaactcggggagaaaactacaaccacaagggcttagaaattgagcccagcacctaggttgatcgggatctgggcctagcgtccaagttaataatcaacatggtgtgttggttttgatcatccaaatgccaattctgctttgagaattctcatcgaaatggtaaaaaatggggtaaaatacctcatcttcaagttctagaaccttggaagtatcaaaacaacatcccagaagttctgaaataagcgcccaacgcccaggttgacaaatgacctagtgcactgggttttgcatatccaattttgattctgtctcaaccgaccgtctagattttcacaataactgagagccatgaagtcaaaaagtcaaattcacaacttcacatttctcatttctaacatggtaaactactaagaaatgggcagtttccacgtaataacaacatctttgagaactggtgaccagcttcgacagaatacaaaaatgaactaagtgatgtcaaaatattacgtaggcatcaaaaaatacatccctaggacatttttccactcacccatcgtcgaggttgacgtcatatgtcaatctaggcgctagatgtcaacttgggcgttgtgcctagaacaatcttaaaatatggccataacttactaaaataatgatctaattgatgtgattcaacttgcgttttgaagctatttcaatgacctatcaagtcatgtctaacactttaatcacaattttgaagatatcaacctcaaatttcaccgccagagagttatgaaaatacttggagcaggtcccgccgtcgtgactcaggctttaaaaattgatgatcaactttagaagttaattttcaccattagatcatcatctatggtcaaaaatagccaacttgtattattctcttattttcaagggcctcattcacctctaaacggagagctcccttagctctttttttatattcagaaagatacacacaaggtcaaagcatctctctctagaaaccaaagcttaaatactttgcctttttctttaattataatcttgtgagaaataaaactcaaagtaaacgtaactccattaccatcgcgacatggggagtgaactactataaattttgtatgtctctctaaattatatacttacattcattattgatctcgccaatcaagcatgctggtgttggccaatttttcagctttaatattttggtgcttttattgagagcccaaacttgagttcccagactaaagtttgatttctttgttgtaatctttgttccatagaaaatccatatgttcaagcaagtaatcaaccatgaacatgcaaagcaacactaccactcctggtagccacaccactactcagtaagcaataggcattgagattccccataaggaagcagactacgagcgagcttctaaaaagactcaaaatcaaaaacgtggatctatgggtctctacatgatattgagaaattacgtgtttgaaaaacttgctaccaataagcatccaaaatgaatcaaactcaagattgtaggcctacaagtccaccacacacagagtataggaccaactacaattctcctcaaagaaatttgaacattgcgagaaacccatctcctttacaggattctcttcacatgtctaatgattctagactaacctgtgaccgtgcaaagggaaagggggaaagaccccagaagctctaccacaaacaaaaagagaaggaagagagtatgagagagattcggagggtgaagatcaatgaactactccacccttaaaaatacttttgtgataaatgaggtgcttggtgcaggtacttcgcctgtggtcctgatggacaataatacaaatactttccacggttgcctggagacgtgttgaacttaagcaattagtccgaatccatccatacatgtcactctaaggatgaatattttgaaagaaatagtcgatatatttctatgagaagctcctcacgaagtaaatgcttaagagacgattctattgttatgtatgataaatccttagagttgccatcaaggccacatgacaactcacacaaccataaagcctaggtcaatcaatgcctttgatttacttggaagacaaaagagcatgcataacaacataagaaaaaagacgccagttgacacagacatcaccacagtgtgtagggccgaatttgacacccttgctgttcttgttaagggtatgactactccaaagccaacaaagtatggattagattgagatcgatgttctcctctctcagatcaaatcaaggctttagagatcccctcaaagttcagaaatctggtgtggcatccatacaatggtaaaaaagaccatctctctcacatccacaacatcaaagtaaaaactaacttggaaggtattcgagatgattcttattgttgagtctttccaacaacgctattagaagtagtacaatagtggtatctcaagcttgccttgagatccatcgattcttgcgagacactcaagaaagtattctatgactaattgtctccatcaaggcatagaccaatcgagcccaatgatttggtctgcatcaacaacaagaagacaaacctctggaggattaccttcagcgattcctagaggccaccatgcaaataaagatactcagtgaagatgccaaggtcatggggacaacaattggaccaattcaagagtttctagatagagttgacagttttatcaagctcgaagatgctgtcaagaagatcaaaagatttgctcaaccagaagcaaccagttataatgcttacaatatttcctgagtctccaatagacattgaccaagaaagtgaagaagagttaatgcctaatacgttcactgaaatagactcctcttttgtttcccaagattaatttaagcggggagatagtgatgacgagtcccctactatttcttaaggagatcttgagaatgaaagaagtgatgaagaaaggccaatgggattttgtatggcaagttaccaatgaaggcatttctttgataacttgggggagaaataagacattgtatacatgagctatacacgttacatgagcattcatagaaaatcatggtacatgagagccatatgtcacatacactttggtatacggaagccaggtgttaccatggtatataggagtcagggcttgcagtggcattcaagaattctacacaccagagtcaatattattattatttaatgaaacgttgacattatccctagtaatcgagtttcttaatctttaagtggtagtgcaagtgctggtaagttcattaagttgaacaaatgcacttacaaactatttgcatgccacagttaatcactgttacaatattaatgcttgaggtctcacaagaatattacgtttgagttataaatctaaagtactagtgcaagtgttcctcctcggaacacgaatatctaaaagaaaagtaaagcatcatcaattacagaatgctctctagaagcaagacgctacgtctagaagagatttggcgctcaaaaaatataggtgatagttaatgatcgagcatcacaaaatactctaatcaaagaaaaccctagaatgagtgggtcactccctaagagattcgaacccatgcaaggagctcatgtatgcttttaggtgacctaacatctcaccctgttgtaaaatcatattaccactcacagtcggaacttcccaatggcaaacatcactatgactacctttatagtgatcgacaccaaaagtcaacccccaaccacctccgaaccatctcccctatttaccacttgtctatcaagtttttcacaacgactgatatcaatcatctccttggcaaccaaagtgtatcatgtgaatgttacaatgcattgttgacaatcaccaagaatacctcttccattgttataatagtcaagaggatgacaaagacctcctctactgtattagcagccgaggggaagtagaagaactccttcactatcgagacaaccaaagggacaaagaaggcctcttatttgtgagtaaaatagaagggacaatgacctctaaggttaagaccaaggagaaaatggcaaccgcacctacaatcactctaagatgcacccgagatggagtagacatcacccaatcttaggtataataatttaggagtttttcacatcctcaattgactaaagaatagccagcgactacttcaacacattgttgatagtcgtcaagaggacctcctctactgtaaagctaaggagatgatgaacacctcctctactacaaagttgaggggattttgaagaccttctccgctataaagctaaggggatgttgaaggcctcctttgctgcaaagtcaaggggatgtcgaaggcctcctactctctaaagctaaggagatgacaaaggcctcctccgctaccaaatcaaggagaagaataagaacacctttcactaaaacacagttgagggaatgctaaagaacataaaatgtttgtaaattgtgactaaaagtgaaaaannnnnnnnnnnntataaatcatgattcctatgttgtgactaaaagatctgtagataaaagtattagtcacaa

SEQ ID NO: 25394 - DNA, 7025 bp, Cannabis sativa
  modified_base (4846)..(4850): a, c, t, g, unknown or other
ggtgtaaataaaatttccctattagttattatttgtttagaaaaaaaaaattaaacaaatgtaagcataaaatatcaaatttcctttctaattaaaatagatttcttaatgaatttttgattgtacaatatttaatttgaatccctaatccttgtaaattttgaataaatattcaaaactcttaattaaatctcatttaatgaataagtttaaatttttagaattaaaatagttttaattcagttaaactttagtcgagaaatcttttataagttactagtcaaatagttttaacttataaacatcatgtattaaaaaaataattaaacattcaactttttgattttaaaattatactatgagtatttaaatttttatttagtaaaaattaactttgcacatatgatttgaaattaaataattatttactaaatttgataaaagattcaattaaattaaaatgaatcaaaaacaaatatgtaactaagaattaaaacaataaataaaaataaatttccttttaaacaaaatttttaaactaaaactaaaatcggactccttcaatgctcttctataatctcatccaacgtgaactttgaagaagtctcactttcttgaattatcaagtaggctttaaaatctgcaagcaatagaaaatattattagtggcaaagaataatttattccactgatataattgggatatagagtaaattaaagttaccttgtcatatcatgttgtaattctatcaaaatattcaacttgtttagaagaacatttctctcttatactaattgttcatgagaggcaccataatgattgtgaagtgtcttccagatatcatagacgtagataaaattctcatatttttctctgatctctttattgaataaagtcaacaagatatactttgcacgacgattattttcttgccattatgcaaaggcgatcctagacttgtgactcgattgttcacgtacttctagtcatagatcttgttcagttgctaattcatatatgttctatttgagtagtagaagttatatgtctactctctactcaaatgtgaaataaccatcaaatacaattaccattgtaacgccctacttgattaggcctgctacaataattttctaattactatacacaactttgctaatcaaagagtttctttgaaaatagtgtcatatttaaaattttaattaaactttaaacctttataattatataaccttacataaaatctgggatcctatttaaaaaagtttacaacatcattcaaatatattttacaaaagtgttgctctgcgactacaaaatgaagacccatgttgtcctgagactgaacactcctggtttaatcgtcctaatatgtacaatcatcctcaagctttggactcactagtgctcagcctttgccattcccttacctacacatgtaaacaatatctatgagttgacaaactcagtaagagaagtataaaatatataacataataccgacttgcatctaggcacccatgcatttatttacaaggcttaaaaaattaccaagaatgttcataacagaagtacgacctctataccacatggactaagtatttttctaatatttgtgttggtagggtttgctcgtacttcgagtacaattgagtgttgtaccacatacacactatactcgtccggtagtagtgtttgtaacgttgtgtcataccccttaacattatttactgtatcaatgcactataaccgcaaccgtactagtgtttgtagtatacaaatcacataatacaacacacatacacatatacatgtacacattttattctaattttacctcatttctagattcaagtgtgtcagtcaacctgaatagaaattatgcactgaactgaggccctatgtcatatttacacaaaacaattaaataacttgctaaaatcttttagggacctaaactcaaaattataagttatcgataaatagcgtggcaatacactacgtatcgaggaaacatgaaaactaagacttccaaaactacctaaattgataaactagattcccaaaaatggtaaacgactttttaggatcctctttgggaaaacgttttaccatttctggaaaacagtgaactattgttttgtaaaaaatcttaagagcttaaatctcattcaactttaccccaaatttcaagctaagctctagagcacctaatagtaccccaataaacatatatccatcaataacagcaagcaaaacttatagaatcaaaattaccattgttgagccatgtttgagttcttaaactcaaacttgctcaacaactcaaccagattgcgaattcaaatcaagtaagctacaaaaaactcaaataaactttagaaagcaccccacaacaaactctagctcggacagaaccaaatcaagaatttgcatgcttgactcaaactaaaatcttccaaaaactcaaataaaagagatctagggtttaccttgattttttttcaccttcaaatctgccaagaatcaaagaaaacaccactgatttcccactggtttcctaatagtcgaaatgaagaaagataaagaacttcttgattgagtttagtcttaactattctaacttatccattaacaccttaattactaatttattaagataaataacaatcagaattaaaacttaattctaccataaataactaaagacatttataattcataaacaaaaatccactttgccccttaacttaaagcttaagctatcttaagacctaggaataaaatggttacacaccacaagtataggtaaattacatcactgattatcatatatatataaattcagtgaactgataaatcacgggactaatgtgctcataactagtttccactgtgtagataacacataattgtaaataataatatgataaggattgaacaaaatttatatattaaacatataatcatgaaattattatgtgaaccaagtaatatgaacaatagaaataaaatgatttatgttcttttattgataaatgaaattaagattacattaaaattgagttttatttagggcataaaaactcaatagctcaacccttcccctcaccaccaccactttaacaatgccaataacctcatcctcctcaatactcctttgttgtctaatccaaaataaacaaagatgagagctgaagaatatcatttcacaaattcttaggcttaatttgtcatttctattatatgctttctttattttcaatcccaatagaggagaagtatggattagacgagatatttattctatttaagtttttttttcttttctaaaatattttaatagttatttaagttgtgatgggtaattttttttattgcatatacaggtaaagagagctagaggatcctcattcagatctcaattgccaggctattgacatttcgatcttagggtttgtttctgttttttgaatctcaaattccttccatggaaatggtaagaagggcatcgcacgctggttcttggtacaacgatgatccaaaaaagttaggggaagaactagaaggttggctgagagaatctggggtaactaaatctcctcaagtacgaggtgttattgcaccacatgctgggtattcctattcgggtcgtgctgctggttacgcatttggaaatattgatccgacaaacattactcgtgtgttccttcttggtccatctcatcaccattacactttgaaatgtgccctttcaatggcttcagtttacaagacgccgattagggacttacctattgatttagaagttattcatgagcttaaggctactagaaaatttgaacaaatgagtattcatgctgatgaggctgagcatagcatggaaatgcatttgccttatcttgccaaagtttttgaggggcacactatcaaggtggtaccaattctagtaggagctgttaaagcagaaaatgaagctatgtatggagcgttgcttgcgaaatatgtggatgatccccaaaatttattttctgtatcttcagatttttgtcattggggctctcaatatggttacactcattatgagaaaaaaaatgggcctatatacaaatccattgaggttttggataagatggcaatggatataattgaaacaggcgatccagatacatttcaaaattatttgttggagtatggcaataccatatgtggaagacatccgattagtatttttcttcatatgctaagaggttgctcaacaaagataaagatcaattttctccgatatgagcagtcaagccaatgcaagagtatgagagacaacagcgtaagttatgcatcagcagttgcaaaaatttgactatttcaccccgtgagaattgaagatcatttcaaacaaaacaaatgtaataatcttccatcttttaatcgaaatattacttcaaataaattgttacttaatgcttaaagattatttcaaataaatatatatgataaaactaaccaatctataattccagacaagaaaaaagattgagatttacaattattattttacaagacttgcaatggattcttagttgattattgaatatctacttttctttttttcttttcaagttccataaacaagagacatgctaatattttaattgaaaaataataatcagatacatcttcgatgctatatcagaccaaaacaaaatttcatggcggagtatgacattatcaaaggcaaagatgggtgcctcaagttggggtgttttggtttttgaattttttgtgtggtaatatcaataagaaacctgtccaaatattcaagttttcttttttttaaaaaaaaannnnnaataaataaataaataaattatatcaatcaaatatacattacacaatcaagcgcataaatctattttctatgtgctagttggttgttctttggtaaaagcatgttggactcgatcgattgtggatgctagtaatatttggcagggggtttgatttttacacctagtttggtattttagtgaagcaatatactgctaattttggggttcaagaggaagtggccatggttgcttgggcagtatggctagctataaatactagggtgtggtgaaataaaagtactttagcaactgaagtggttatttcaactcttgtgtcccttagtcaatggacgacaactcaattgaagaggaggggttatttattctcatctacggatttgggtgaagaccttgaacgttggactaaactataataatatgattaaggtgagtgtcgatggagtaattttcatgtcaaaaaagaaatttggcaatggaaaggtggcttgagatagtgttggtcagttggtggaagtagcttcgttatgttggtctggtcacatggatccaactttggcagaggtggtagggataaaagaagcattgagttggattaaggctaaagggtgagcgaatgtgaagcttgaaactgatttgttggtatcgcttcaggccatttgtagttcattgaatataccttctccttttggtcaattagttcatgaatgtagaatatttatagcttctttactatttattaaattatcttttgttaaacgtcctgctaacaaggccactcattgtgttccttgtggctcttgtttttatccagatcgtaattttagtttagagaatgctcctactgaacttttatctagtgtaatagttgatgcttattgattaataaaagtaccattccttttaaaaataaaagaatatactttagataatagcagcatgtattctaatatacaaggaaaaaaataggaaacaaattgcatttcacatgcagttgtgttttatttattgataattaatcataaaattatatcaaaattgaaattttgacctgttttaaataaaaattttaatagcatgaattagtattcttgtaaattgtttttcttttactcttagtaaaagaagaaaagtaaattaatatttcatgtcttaattttttttttaattattttgaattcaaaaaatgataactaataaattaattaattatattattataaaattaattttcaaaatatttattattgaataaattaaattgaaattatgaaaaaaaaaataataacaaatgataaatttatataagaaaaaaaagttattaattttgaaattcttatcatcactgtatcttaattcaaattgtcattatcctaaataaaaaaaatttataaattgataaatctatttaaaactcatcaattttaaaattttcatcatcatcgtatctcactcatcactacattcgaacctgttgtcatcactgtatctcaattgtaattttcaccatcctaaaaaaacataacaattgataaatctatagaaataataataccagattcagagaatggagagtatcaatcataagaatataataagtaaaattaatttaaattatgagacaatattatgcaattagaaaatatttttgaatgactttcttgaaaatctaaatatatataatatatgtacatatataacaattgataagtttatttgagattcataaattttaaaactattgtcattaccgtatcttacttgtaatcgtcactatcctaaaaaaataacaatgacaaatctataaagaaaaaaaaaaaaaacaatgatggccaatagaaaaatggagaaaatcaataaatgagaatgtagtaagaaaaattaattttaattgtgagatactatcatgcaactaaaaaactcttttgaatgacattcttgaaaacttgaaaaaaaaaataatgaacatgagggatcaagattataaatatgcagttaaaaaaataataatgatgaacaaagagaatggagagtatcaacaaatgagaattagattagataacacataacaaaaattaacatcatgcatgacctagattgtaaccaaaaataaaattttatagtcttttaaaagtggtttatgttggattttgttccctaaataaaactcatttcaa

SEQ ID NO: 25395 - DNA, 2949 bp, Cannabis sativa
  modified_base (237)..(241): a, c, t, g, unknown or other
  modified_base (1825)..(1833): a, c, t, g, unknown or other
atatatgtatgattaaccgaaattgatctggaaatacatagtacaatgcaaacccatcgtttcaaaaaaaaaagggcctcgactaaacctttttgacagaagagggtttgaacagttataactccctaaccaaaccttttcgacagaagaggggctgaatcgttataatgccttgatcaaacctttctgacgagaaagggatcaaacaactgtaacttttgatttataacctatctnnnnngaaaggaaaatcaaaagttatgactagcgcataaagctaaaaactaacggctcgtgctatgggaaagtattaagcgagacatccaaatgtcttgaaaaaattcttaagcccaacacgtgtgtagaaattttaactactcatgtaagcaatgaaaatatatacaagatgacaagttctttaaaaatatattttaatgtgcttaaaatcaaatcatttccgatgatcgcgagacagaatcgatgatggctcgtagattgaggaatgggcagataagttgctcgcacgtaaagtaggaaattaactacttaacgtcggaggaaaggataatcaatggaaacccctaataaactttatgcatgcatgtgaaattttatattgtgaataaaaacaagcaaacatccgcataataaagtttacacttaaaagcccgaggcattaaaaagcaaagttggtcgtccaaccttgcaaatctgtctttacaaaaaactgccactaggggcaaaatcattgtctcggccaaagggtcatttcctaaacgagaaaagggagataaatagacaaagtctacatgctgggagacttggacagatcttcttcttcttcctcgacctcgctgtcttcttcttccaccttggtcatctcgcaaagagctaaggtttcttcttccttctcctccaaaaagctggtatctatgttagggtcgcaaagccaagtccgatatacagcgtgaaaaccaactttattgcaccgttctacggtcttgacttctttcttagaaagtttttcagcaagcatctcctcaaactcatcggctttgactttaatggtcttctcggcctccacttttgccttcttgtgcttcctcttttgccttctcagcttccatccttgctttctctatttcctcctttgctttctcatattcttgcctaaggcgggtaatctgctatcgggcattgcctcgttgctcactcataaccttgcattgggataccgatttgtgagcctcaccctccaaatactcgagccgctcttatagtagtctattggaagcaaaagaagcaaaagaatccttgacaattgcaaatagatgaatatgaaagaggtataaaaagataacatagtgataataacaaagtcgacatacaatgaagtgacagtctaagctccttgaaagcatctatttttgacttgtaagactgagaaaatcccaatcaaagggaaggagagtttgaagtttgcgccaacaagcgactccatatgcttgggcaaattcagacccagcttttctggctacgaccgacagggtctcaatggcctgactcggagaagcagtagcgggggtcgcctcaggatgaggagcattggcgttgggaacaactggaggaggaacttgctttgggatctcattgttcgaaacgtcaagattgataggctcggccagtgatttcttcttatgggcggtggttttcctttacttcttgggaggaaccactttggcaacagtaggaactccagagttggatgtccttttcttccccttacggtcaaggatgtcttcataacccatgtctgcaaaacaannnnnnnnnttacaatcattataaaagccgattaaaaagaggaggagtataattttcaacctaagggatttaccaaaatcactagaaggcgagctatcactagatgaagcggtagaaggaccataatattctctaaaatccctacaaaaggctcgcatctatgtgaccagcccaatcttccgtagtaccgtattgctcggctataccataaaatgactcgtgacagttaatctagacatggaatctaggataccaactgtcaaatttttgagcaatgcggtccacgagaatggaattccaagtataaaaattaagacaggagtcttggaaggtaactaatgtattatgttgagccctaagtacagtaggtgcccagccacattgattacctctggatgctccttcaccggattcccgaggggcagtgctttgaaggtattgtgcttgggccaagcgatcccaggcctagtcttcgggtggaacaattatttgcttccaagaagaatacttgggaaccttgtaatcgcaagtgtattctttatcagcgagaaagccccccgatcgccagttaacttcgttcagaaggaatttgcatgatcagagaccttaagggagagttatcaagcgtctctgcctactaaccatctcaggggtaggagtaggttttgtcagaagagctgtcagaacaaacaaaacattcatcaattacttgaaaaaggaagattgatgtaaataagtaagaagagaacaatcacttacaaagaagtttcccttgaaagacaccttattttgcaagtctacgataatttttggctcgctagcgtgagtaccaagaaagaaaaatcccactacgacattcttcctcgatggaacgacgttaattaagtaaagatactcaatctctacgggtgtgggacacccgcaattcataattgtgtacaagactttcaaactagcgacaatcctgaaggagatgggagtcagctggaatggggcaaccccaatgtgctttatgtagtctttgaagtagtaccaaagagggaggaaggtgttgagagtattttactaggatctagatttactaacaaatatgattcattaatatcctaaatatgaattctctaa

SEQ ID NO: 25396 - DNA, 2528 bp, Cannabis sativa
agggcataaaacccaacatattggcgttagcgggccaaggtgaaatggttgcatgtaggtgatagaaacactaaattctttcataaacatgcctcctttcgtaagaagtctaactctattaagtatctcaaagatgagaatggtataattgttaatacccagaatgatatggttggtcttgtcactgcttacttccacaatcttttttcttctcagggcagtaatattgaggttgttgccactatcttctcctcttcaaaactctgggttggaagctctggatattgattttcttaaccaagcttacacagctgaggaggtcaaaaaagttgttttccaaatctctggggataaagttgtcggtcttgatggcctgaatacttatttttaccaaaagaactggtctactattgggacggattttaccaatgctacccttgactgtctcaatcatggggcagattttacggagattaacaaaactctaatcgtccttatccctaaaaaatagcatgccaattctctcaaggatttctggcccattagtctctgcaccacttttcacaaaattatctctaaagtcctcgctaaaaggcttaaaattatccttgacaaaacatttctccccaccagagtgccttcatttctcgcagaattatttttgataacatcctcttagctaatgaaattgttcatgccattaatcataggcgtcatggtaagactagttgggttgctattaaattggacatatctaaagcttttgatagggttgagtgggattttttacaacatatcatgtatcattttaatttccatgttgcttttgtctctcttatcatgagatgcttgtcctcgaccactatttcttttttcgttaatggacgagttgctggtaatgttaggcctacgaggggattaagacagggggatccactttctccttacttgttcattctttgctctgaagggctttctgccatcttgcaatctttccaagctagagatcttcttaaaggtattgccatctctagaacttcccctcgcatctcccatcttctttttgctgatgacaacattcttttctgtctggctgatcagagctcttgtaatgctttaaataatgctcttactctttactctgaagcgtccggtcaggtcataaattttgacaattccttgatacctttttccccaataccaatgatagtatgcataacctgttcgctttaactttcaatttggacaataagccattcatttcgaaatatcttggacttccccaatgcttgtcccgttctaaataccaatcttttgttttcttaaaagacaaggtgctttctgtgatccaatcttggaatcataaatggttttccaaagcgggaaaagaaatcctaatcaaggttgtccttcaagctattccctcttatgccatggcctatttttgcctccctactaaaatctgtaaggaaattgaatctattgttgctcggtttttgtggggttcctctactgatcataactctattcattggagaaaatggcgtacagtctgtcaatttaaattcaaaggcgggttagggtttagatctctaactcactttaatcaagcaatgcttgccaaacaagcctgaagagttttaaagtgtcctacttctttgcttagcctcacccttaaagccagatatttccctcatacttccatccttgatgctgcctctggtcataatctctctttctcttggagaagtatcatatggggtagagatctgctcaaacaaggacttatttgaaagattgggaatggtaacaacattgacatcactagggatcgttggctgcttgagtttaatttacatcctaataatctcttgtaacctccccccgctaccaatctatcattttttatttctctttcaggctcctaggatcttaaccttttgcgcaatttctttgatgatgatctcattaatagtatacttgatgtgcctattgcaggtcacaactttagggatgatttgatatggggaaaagaaacctcggggatttttagtgtgaagtctgcctaccatcttgctgttagctctagggacattccttcctcatcttctttcaatacttctaaaagattttggtctaaactttggtctgcctgtgtaccctctaaggttaaacattttacttggcgtgtccttaataactctatacttgttgcagatagcctatatcacagacatattatcccttcacctatctgtcccttgtgtcacatgcagccggagtcagtaacacatgccttacttgaatgttctagagccaaacttgcttggaagcattcccctttagatgatttttttgctagaaataaattcctcaacatcatagcacttacaactaaagctttagactctcttgacaatcatcaacttgctgtttttttgtgttttatctaggcaatatggaatcaacgaaataacatttttcataataaaaagtgctcaccccctttactcctttatagtcaggct

SEQ ID NO: 25397 - DNA, 2409 bp, Cannabis sativa
caagagtaaggtatttagtctttatgagaaaagaaaaagaaaaagaaaaatgaaaaattgagttaagaggaggatgatgtatgcattggcttaagtccaaaattgccacgtggaatgtataatgatcaatcattaagggtataataagttcttactaatcaaaattaggaagaaaggtatagttaataacttaggagtccgtgcatgttaatttgaagcagagcgactcatttctcgtctcctttcatactccaacaatcactaccaccctctcttcctctccttctaaattctaatttctaatccttcgcacttcattcatattgccaaccaagatgtcaaaaaacgaagattcaggtgaagaatcaaatggggattcgtttcagcaggtgaagcaaaggttcaaggatcgatccatggtatgatcaacccgtgaattcgtttcatttcgttacggatcgtgggtcctgtttatctttcgtattatgatctgggttttgtttggtttttccagaaagttgctcaaacgaaggatttgctttcgaagcaagcggttcagacaaaggagatcctatccaaacaggctgttaagatcgccaaacaagcagaagaacacgaaagttttataagcaaggtttgtctgtctatgtctatgaaagattaatttcgatggatttggattcgtacagtgacaagttgtaaatagcatttaatttttctttttttaggtgactcatcttatgggagtgctctggtttggtgggttttgctttctcttgggagcaagtgagtatggcagttatttttttgcagtaattacacttgaatgtacaatttatttatttatttattattttcttttatatatgtaacaggaccgcaggatattcgctatatatattgtttgttctatgttatattcgttccccttaggtggatatactacaggttcaagaagtggcattactatcttttggtaagttttagtatatttttgaaagatatatcttcattgctcagtaatgaatctcagaaggtgtcactatcactgtaacaaatggctaattccttactagttttagcattcatgaaaatttgtgttacctgttttgaccacccatttgtagtaaatgtagtctgcaggtgcctgaaatgattaccaaattagctttcaatatgttaataaaagattggttaaaccgttttggtctcattatggctttaccaaactcatttttatactttccagtcaatcttgatgttacctcagatttttgttttatatattgttcatgttttgttcaactcattgaagttgaagtgaagaatgacttcatttttttttcccttcatgtcttaggacttttgctactatgcaaatacaatttttttggttgatcttcttctgtatccaaggaatgaaaagcttttcatgatctgcttctcgtttgctgaggtaaagaagtagcactttgctgtagaacttttttattccctcttgactgaaaaagtgagtacaaataacttacgagttttgactctttgattgatgtcaggggccattagcatgggcattgattgtttggcgttgtagcttggtgtttagctctcttgataaacttgttagtgtccttatacatcttctacccggtgagtgaataaaattttggaatgcctgattggctttccttctagagaaaattctggtgtatcaattttaagttctgtatgtggaaattggaatttcgctggatatcttctttgttgtgtttgttgtggttatctgctgttggggtccctgcatttcaaacattggtcaaagatccaagtagatattaaggagtgcttcagctattgacccaaccaagtaaatgtattaccattgttcaactagtacataatcctagactctaatgtttatcaccataccaaagtctactagttggtttatcggcttgtcaaagccatagcgtttatgctgtatagcagcagcagcgtagtatctggttcagtcatccgttttttattgttatcctggcttggcatccccaattatcacaccctattaatgttattttttaccctattaatgttatttttttcttgtatataaaaaatgatacaggtatagttttctttaccattcgatggtgggatccagcaaccttcgcagccatgcatccagaaggatcttctcgcagaagttcatggccttatgtagaagacaaatcttacctatggacatggctctttgtggttcccttatttgcatacactctctggcagattctatacttcctcatcgtcaatgtcttacgtcgacaaaggctgttaagagatcctgaagtcatgacttcctacaggtttttattctttatcccacctttctgaaatttgtcactaattttt

SEQ ID NO: 25398 - DNA, 1529 bp, Cannabis sativa
ccagtttttctggttttttttttcttcataattttctgtttagatcattacagttcttctttccagttaaattttcccggaattgatgattgtattaccctcgttttggtttcattctagttgtgttgcttatttggacgatggaggtatgttcatcttcttcgttcattccgtgcggcttaaggtatagacctggtgatatttttgtaattttttgattttgagttgtataaatattgaatggaccgggctatagtaatgttataattattatttttttattatttttttttttttttgtattttcctgttttttttttccttaataatattagtttgaatttatttatttggaaaataaacttactaccacttaccagccacatcacatctctctctctctctcaagtctcaactcccctccatccccaaccctaatcaaatctgggtatgaaaattatagaacaatatatgcatctatattatttattacttactacgacttgacttgcttcattaatttcattttattttgcttatctatatataattaaatattcccttcaatccaatttaaggtttgattgcttgtttgctctgttttaggtcgttgtgactgtatatgtcttttcatttggctaatcctttctttctcacctttgaactcctttcattttttgtaattgttccttctgaacatgggaaattggtgaacgaatgttatgtttcatttgtgctctgaattatgtatttatattgttaagataacatttgacttgaaccagaaaaatattttaatggtgtttgaatcttctctatttttgtattacataacatttatttatgctttgttctcacttctgacttctttattagtattcctcattggggttcttatatactctcaatttcttagttattttaatcttggattatagctctaaagttacagttactcaattctgactttcttttttatctcagtagtcattaagtttatgaagcttggatcttgtccaggtactttctttactactgaacctagttcatcagttaaatcacttcctctcgatactctccattagaaattagttcaacattattgcttctttgggtttatgcaaatagaataacaataactacaatcacttgtgaataaaaaaaaaaaaactcatttaatcaaaagaaagggtcctgaaaaattaacagaaactcacatattgttccacacaaaaactgcatactaaacctattaaggcattgaacaaataaaactataccaattgcagtaagtatacccagaaaacagggcaaacacagatctaaaaaaaaatctataatcctcttcaccactgaatccataaaattggttccatcatcactgaagcatgcatatcaatccaagtttctgtccacatgtgtcttttgaggttgtctataatttggattggttttttactttgaggaaacttgtgtactcatgttaacagtaaccaaattctatagtttgtggaaagttaattatgctc

SEQ ID NO: 25399 - DNA, 3785 bp, Cannabis sativa
  modified_base (1524)..(1529): a, c, t, g, unknown or other
aaagtttttatttttattttaattgcttactttaattttttattttttaaaatatggccacgtaggataattttttagtgacctgtcattgtcacgtgagcaaaattaggacttaacgaggttagactgacgacaccttaaaaatgtaaacggaagtgcactttggagggttttcccaccaaaatatgaggttggatggttttttacaagtaaattgatagttgggagagttttgccgccaattactctaaaaaaaaaaacaagtatgttaaagtagccctttcttttttatttattcacaaagtaagtatgttgaaatagttttttttttttttttcttttctttccttttttttttaattttttaaaaaatatatgttaaaaagattaaatgttcaaactactaccactctatcaagtatcaagtgagctaaacatattttatatatattttttctcaattattattttattaatttttttgttctttctttattttctttttctttgttccaatttttgtttccatttataaaataaaggatataatatttatataatgtaagaatatatagagaaagtgatgtatgctatatgtcttgtttggttaaatttttatttttacttatatctaaaagtataaaataagtataagttttgacatatttggaccgtttagataattattatataattttttttaaggaaaagtattttatttttaaatatttggacatcattaaaaaaaaatgatttttgtgggtaaattaaaaattatgtaaattattttaattctaaaaatagtttcataaattttttttggtaaaagctgcaattattaatttttttttttttgaaataaaaaacttttttaattttataagataaaaaataacttatagaatagagattagagaagttgaagggaatgctgaaatgtgttttaaatgcacctcatttaaatttaggctctatgttaagtttcaatatatcatattctcttataaaaacaacaaataaaaaaaaaaaaaatctttcaatataatttaaaaaatgagactgaaaatattaaaaaaatttattatttctaatttaaaagactaattattttttaaaattttaattaaaataaaataaatactatattgtgttttgcaataattattaattaacactcactcacttaaatgaaatttttactagtcaaattatacagatatatatatgttttttttaataaagtggcaactttattaatcaaagaaaattacacattgcacaataaaaaaaaaattcagccaaagcatttttctcattgaatatgtgaaataggaagaaacaagaaccgcatgcaacataatgtaaccttatttacaataagtttaacaaaacaaaacttgacattagctagagaagcaagaaagcttagaccatctctaatgggaaatgtaaaaattgtacaatatttgacacaaaaagtagttttttagtaaatttataccaaattttagttttgtgctccannnnnnaattgtaaaattttgatgtaaaatttaatatttaattaatattttattaaaaaaataaaatataataactttataatcaattttattattattttaatatacaagacaataaaaaaataatataaatgttttataatttaatgtgatagttaaatatattaataaaataataaaaatgatataaatgtaaatgaaaaaatagtgcatttattgtggtgtaaattttacatcatagtaaatcttgtgtcaaatttggcacaaaatttgttatgtgccaaatttacatcactctgtggcatactattggagcacattttttgttaaatgagctatattttagcttttcaccatttatttacacctctattggagatgctcttataatcttgaacaattaaaccaaaagatgaaggcatggaaattgaactattaattgcttgaaaaactactaaacattaattcttaaaaatatttgttgtgcaaacaatacctcggcaagaacacaaataatgcaagaaagatcaatgaaaccaaataacaacaatcacaattatgcagtaaagattaaaccaaaaaataactagcatagaaaacataaagaacacaaagtattttacgaggttcgaacaagataatgtaacattatcttgcctacatcctcggccagaaaacaaccacaactatggctttgagagttttattgattgagcttaaaatgagagattacacaggtgcaaattacacaaaactcagaagcaatgcttcagtaattctgcttctcgaatggtggtgaaacacagacaatgtgtcaccccaattacaacactcaaggctatccctttcttcctctcaatcccctgaactctctttttctctttgttttatttctctaagtgtgtcacctcctggtttgaatgacaaagccccttaaatactgatgatgcagccttgttgcagagtacccgaacaccaactgtcataactgacagttggttaagttagttaagttcggtaagggtacaagtgtcatttgatgtttggccaaccaaattaacaattatacacattggacacacatcaaatgagtagaggcatagtgatgaattgcagctgttctggacttgagcgatctcaggcaatgagaatgcttagcaagttcagaaaagtctgaacttggcttgaggaacatatttggttagcatgtcagcaagattttctttagttccaatcttcttgatctgtatctccttctttgcaattacttctctgataaaatgaagcttgatatctatgtgcttggacctttcatggtacattggattcttcattaagtgtatagcactttgattatcacaatggactgtgatgtcttctcctttgaatccaagttcttctgtgaaacctctcaaccaaattgcttctttaatggcttaagtagcagccatatattcagcctctgtgttagatagagccaccactttctgtaaattcgatttccaactaatgcatccaccaaaggctgtaaatgcataaccagtaattgaccttctggtgtcgatactcccagcataatctgattcaacataccctgcaacttcagtttcaaattttgcattgtctctgtatagcaaaccaacactagttgttccttttaggtatcttagaacccacttcacagcctcccaatgtatcttgcctggatctgatataaacctggtcaccatgctcgaagcatagggtacattgtccatgtatatcctgtcttcttcattatttggcgcttgattttgagcaagtttgaactgtgaggcaagaggagtagtgactgtcttggcctcactcatacaaaacttgtcaataattttctgaatgtaaccttcctgagacaagaaaacataaccaggtctttgtctcttgatttctatcccgagtatccttttagcttcacctagatttttcatttcgaattcagtgctgagttgttctttcagcatgtctatagcctttctatcatttccaattatcaagatgtcatccacatagagtaataaccagataggagtcctgttgtagtaaacacagggatcatactcacttcttgagtatccaatttgcagcatgaattcatggaatctcaggttccattgccttggagcctgtttcaaaccatatagagatttctgcagtaaacacacttgatcagccttcatgttcttaaatccctcaggttcttccatgtagattttctcttctaaa

SEQ ID NO: 25400 - DNA, 2706 bp, Cannabis sativa
agagagagagaggtgaaaatgtttttcccttttcgttttatttatttatttcgtaagttaaattgttgaaacatggatctatactgtcttctcactggacagaacacgtatacaggacccaccatttttcgttctaccatccctaaattaactttaacactaagaattaaacacaactcaaagcgtttatattgtttgtgataaaattaatcacgtgatttaaattatagcattcttattagtattaatagtgtttattatatagatcaaaaatttaaagaaatgttcagagtaacaaaagagaaatacttttatttcttgagatgacgtgttacaataatttttcaatcccttctcacatttgagaaaaaggtatttataggctttaatggcctggagtacactagtagtcccagaggacatggtgacatccatggtttgaaagttgcaagcagtggtattgcaccttgtactcttagtttggtgttagatggtattagattagaggttatgttagttattagttataggaagtttattattattgttggtagctagtcttaaccgtctttatcactctatatgtatatcgtatcattgcctttgtacacttttctcaccaatcaatagaataaattcagtttttaattcaattctcctaatatggtatcagatgaaacaacgtgaagttctaagaactccattacagcttcaagaactcatcaatggcaagaacacgaactactgctaccaccattgtccctcctctgccagtggtagatgccaatctagctccaccatcatcactaccatctgaagaaactcaaattcgaactgatgatccagttccaaattctcgatcacatctgatcgattcaattcaaaatcctcgatcaactccgatcgatctccgatcgatccccttcataatcctcgatcaactccgatcgatactatccataattcttgagctactccaatcgatcgccctgcctacgaagatgttctttcaccctactatctcagcaatgctaatcacccagggttagtcttggccacacttgttctaacagatcgcaacttctagccatggacacgctatttcaaactctccattgacgccagaaacaagactccatttcttgatgcctctctccctcaacctccaccaatagattcattattcagctcctggattcattgcaattagatggtgatgtcatggattctccactctgtctcccctgaaattaaaagcaacattatgtacttggacactgttgtagagatgtggactgtcctcaacaatcgcttcaaccaaggtaatggtcctcgaatctttgaactaaatgaatcacttacctgtcttcatcaaggtgatgactcagttagtgcttatttcactaaactcacgactatgtgggatgagatccatcaactaaggccaagaatcccctgcacttgtgctgctgctgcacaaaatcaagacatattaatcatgatcaaatcttgtagttcctcaaaggactgaatgactcttacctactcattgatccttatctatctctaaacaaggtattttccatggtaattcaccaagaaaggcaaaggacattgggaaattgccatgttccaccaattgttgctgctgcagcaactactcctgttgcatccactgaaccagcatccaatcaagcatccaaaaataaaagacctcgtccacactgtactcgttgccaaaagcaggacattacaaggacaaatgttactttctacatggatttcctcctggatatggcaagcctaggtctactgattccacaaatcaaagtcgaaaaccagatcctggttcaacttctcgacctcagactctccaagtctcactccctacaagtgattcacaattgacaccagctcaatgcgagcaactcatttccatgttgagtcaacaactgcagccctccactgatgcttcaacatcagagaaccctgcaattaacaatctgactggtaaaatcaatcctctctcacctagttcttggatattagacagtggtgctactcaccatgtttgttgtcatatacaatgtttttcttactttactaaaattgtccacaacaagcatgttaccttgcctaatggcacatctgtcaaaatagaaaacattggtagtgtggtcattaatcctcacatcacactacataatgtcctatttgttccttcatttaaattcaaccttctttctgttagtgctctattgcatgatacccttaacacattatcttttacctctaatatctgctatatacatggcccttcaatgacatcgaagattgggacagctaggaaacatggataactctattacattcagcaagatttctttaaactacatctaactgtacttttctttcttgtaatgtacaatctcaaaaccaatggcacacacgccttggtcgcccctctgtactcattacaaataaaataaataaacagttacattctaataagaatcttgccactgtccataattgccatacttgtcatttatccaagcaaaaaaagttaccattcatttctcataacaattttgcttctgtaatatttgatctaattcacctcgataggggaccttatctcttaccttccattgaaggatgcaaatatttttttaccattgttgatgatcattcaagatacacatg

SEQ ID NO: 25401 - DNA, 2183 bp, Cannabis sativa
caaaaattcaatttttgtggttaagtgttacaaaccgtaaagtttaggtggtttagccgccaatatcctttattattaacatagcaaaaatacaataaacaagcactgccaaaagagaaaatcaccgggatgcaccacaccttcccaagcccaagtattgtcaaacaaatgaagttatgaacgcatacccccacggaagatgctatcacggaatagagtatgcagtatgcacaaaaaatgagaattgctaaaagatattaccttgtctagcccttttttttttttttttttgtattataccattttctgtgtaattatgtagcgagtctcatataacttaaaaagataatttttagaaaagatcactaactaatagtagaatgtcacttatgaaaagtgataaatacttttggtacctaataataatgctccacgaagtaaacactacttgttgtgatattttacacacgcaaatgcacgtatcgtcacaagtagtaaactcactaagagtgagatcgatcccacgagcattgtagttaagtacgttaaaattaaacttttacttctatttggttgaataaaaattaagaaaggattaaaagtaaaaaataaaaacagtacaagaataagcaattatttaaaatagatttagataattttaaaaattatttttgaaactaataaattgtcatttaatataataaactactatttttatatactaattattttaaaagtatataccttaggttttgtttaccaaaacatttgttttttttaaagatgataatagatgggctcatacatgtgatcctagagttaaaaagtagtatgaaaaccacacttgaggctagctcaagtagccataagagggtgtgtgttggaggtcctgggttcgagtctcaaattatgtataattgtaatatataaacacttaaataaaaaaataataattaatttacctctggggatcgaaattcatgggcaccgatgcaagcaagaaacttggtccatggagagtagtacttactggtactattaaaacttccattattctcaaccgttgtcttgctcggtggattagcttcattactattggagatgaccaaatccatatattatttctatagtttatcatctatatatatatatttataaaacaccatatagagaccaaacatatatatatacataaatattcagaagtacttggcatgtgataattaaagacaatatcattaagtgtaggaatgcatttaagctacagcaaagatccaaaggcgttgaaaacgaaaaaacagacagattttaatttttttatatggaagcatattcattttatatgcttattggttttgttgattatacaatgaacaatattttaatttatctttttctatttggataattttaactattaatattaactaaccaaagttattttccaatgcttataaattggtaacaaataaacagactcatcattttttcaatatttacagtttcacctctttaattattacttacaaatatgtaaatcaaaatatgttgttgtccttttttatttggagcatataatttacacatacatttacttgttatatataaatttagtaccaatcagatcttatttacattattttgttctaaattttgattaatctatatatatatctataaaagagaagtatgagacggtaacgtggcgatctaaaatctctctaatactatttttcttttttttttttccttaattctctcaattttttaatattttattagagcataaatttataaattaatattttactattattttaataaattttctaataaaaatatctatcttaaattaattatttttttaaaaactaaattaataatatttaatgaaataattattcaattatttatatatatgtattcataaagttttgtagaatataggaaaagtatttttttataaaaaaaaaaaattattatgaattgaacaaaaaaaacaggtgtgagattttgtagaagaagaaacaggtgtgagattatgaattaaattaaactataaatgaagatttatgctactattttttgaattctagtattttttgaattctagtatttattagcaacaaatttaatattttaagtatttatgtcacaaattttttaatagtaaagttaaaatt

SEQ ID NO: 25402 - DNA, 3191 bp, Cannabis sativa
gtataagaaaaattaatcactagcgccaaaattttaaatcttacttttaacattataaacatttcaattttcttaaaaaaattcctgatagttctaaataattatatgcaatcttaaaaaaaaaaaatgaaagactattctaagtgccaaataaaaaattatcggcccgtaattttaaagggtacaatggaatttaatgtccgttgttttacatagcattatgtaggctactagtacagtagcattattagattataattggtcttgtttttatgaaggtgcaaactcagcatgttttaatttatgttgtgtcctttgctagcctcatgcaaaggggcaacaaataaatatctctctactcttgaagtcctcctttaaagaaatgaattgaatggttttaaggccttttcatttcatttaatcagtacgactcagatgatggagacaatgtaaacatctagatcaataattatcgtccacagaatctgttttatttttttagtcatgtccttgtaactcatttaaaacttcctgtccatgggaggaccccaagtttgggtccattcatataaactaaacaaaaatgtttttttaataacaaagtagacaaaaatgttttttttttatttaagcgtgtatatattacaacaatgttttacttgggattcgaacccaaaacctccaacactcacacacccacctatggccacttgagctagcctcaagtagttaaagtagacaaaaatgtcaaacgaaaatataactcaaatttatttcaagccaaaaaactagcaaagtatatgctcacaaaatgtccacattcaagttagaatcttcatatttatatataattttgtctactaaaatgtaagagcatctctaacattaacacgaaatttaatatcatgctaacactaaatttgttgtccatatctctttccactccaattataatactaaatattacaccaaaaataatattctttattattatattatttttctaataaaattgaatatttttttatttatatttatttactaaaattatcacaattgttatatctaattaatattttaaacaaaatttttacttgattacgagacaataatactataaattgtttcatgcccacttttatcagagctttctaattcagcgaagtaaaattatgtaattacaaaagggaaatggaaacaatgcttactttcatacttgtatccaaaagagaagagctattgtctcttttcaaaatgaacaatggcaccttgttgaagattattttgaagttgttaatcatttcaatggttttatgcgaagtgttagctttgcaactaaaatgattaacgttcaatgcattgagatgggaccttgcctaaatattgatatgcaattaggtttaattaggaaatttagtaagtaagatatcaagaagactttgttgagcatttctggtactaaaagtccaagccccaatgagtatggttcagatttttataaagttatttgactggatatttgcaatgaaatcttagatgcggttcttgagttttttgatacagggaagattcctaccgagctaaatgaaacgacaatagccttgatgtcaaaaattgatattcctacttgagcagtggattaccgtcttatttcttgctgcaacactttgtacaagtgtatttctaaaatgacttgtagtaggctttctaaagttttggccagcttaatcaattaaaatcaaggagcctttgtgaagtatagatcacttgctcataacattttaatgttccaagacttgattaagaatacctctccaagatgcgccttgaagattgacttaagcaaagcttatgacagggttgattggatatttctggaaaggtatctattctgcctccgcttcccctctaaaatcatctattaggtcatgatttgcctcaaaggtacttcatactctcttatgatgaatgggagattcagggaggtattcaaggtgtaagaagtgttcatcaaggtgaccccatatcctccttgttgtttatttttgtaatggagtatcttacatggattttacaacttaggactaagcataacagctttagattccacccaacgtgcaggagtcttaagattatcaacttatgctttgcgaatgatattattttttgcaaaactaatgttggatcggttctgtgtgaaggaaactaattttgatgagttctgtgtcagtacttgtcttggggctaactgtagcaaatcccaagtttattttgtggagtgtctaacttggaaaaagagcagttacttccggtgctcctgtttgaagagggatcctttcctctcaagtatatgagggtccctttgaggccaataaagtggaaacctgaagattttggaatcattctcaagaagattaagttgagacttcactcatggacaagttgtcatctttcttatgcaggtagatctcaacttattcttctattcttttggggattggtaattactagatgagcatttttatgctccctcaaagcataattaaagagattgataaactatgtatatttttttatgaagaaataatggaacgagaagtaacttccatttaatttcttgggaaaaagtgtgttgcctaaagcttatggtggattgggatatggtgaaggagctaaatggaataaagttatgattgtcaagtatgtttgggcaattactcatcagaaagaatctctttaggttaaatggctaaacaacattttacttaaaaggctaagatttttggacgtatcaacttaaggtcgatactagttggtattggcagaagttgtgtcatatccgagacactttttctcaggaaaaaatagatggaccttgttaccatgagaagtttgaaatgttgataaagtatacaaaagcttcatcaaacttgacaaggtaaagtaccaacactttgtttggaacagaatgagtgtgcctaagcaccgttttatcatttggcagcttttcaatgcaagacttcttactcgatatcacttacaaagggtgcatattcagctagatatcaccatctgtttgttttgtgaagcagctgaggaagactatggacattactttttgtactgtcagttttctcaacagactcttaggcatttccatgcgtagattggcagtggttggtctctgtctt

SEQ ID NO: 25403 - DNA, 5369 bp, Cannabis sativa
taaaaaatataaataaattataattaaaaaaattacttaaataaattttaaaaatgattttttttaaattttttaaattttgattctcaatttttatatataaaaaaatttaatattacaacatatttttagaaaatacttcaacttttctaattaaatataattaagaaatcacacccttaatttaatgaagttctaaaaaataattttatttgcaattttttaattaaataataatttttttttgataaaataaaatttgataagttatcttcttctttgtttagattgaaaaaaaaaatgataagtgttaaataaatacacaaactaaattgagtgcaacactgcaacaaatattcagatgattaattttacctagcttacacgatttttttgccgggaaaatctcttagataaactgattgaaatttattgaatcattataaagagaagggaaatttggtttggttgtgtgtgatttgttgaatttattggaaacggtgaaagaggcgatgactgaaaagggtcggagcttcccggtggatccgagtgttccacgatgggcttgccagaactgtcgcaatcctctctacatcgtcggagttgatccccattccgaaaagttccttaacgaatcctcatctcgttctggtcaggatttttctaaccctaaagccccttttaatctttttcttgtttccaaccacaaattcgttatattcagcattagccataactaagttaaggaattcgaacttgttgaactcaatttacagtattttttttcatttactttaaggttttgctttaattcgtgaatatgctagcgatttgaatagttttgggttgaagtaaagcaactttgttggctgtgtgtgttatgggtgttcaattcttacctacttaatggcctttgaactaaatggaatgaattctgtttggaaataaaataattgaccatatatattaagaacatttgaacttgtaattttatgtaggcttaattgatatttcagtgtaggagtatctgacaagttaaaatgtggtaatcttatgctgaagggattatatattgattatattgattgttttgttgctcagagagtcactgagtttgacaattaactcttgtaggtatgcagggctcatcaatgcacggcgccagtagtgtgttatcttcaacacgaatggatcattcttttgttgtactaccgcaaagaactcagcctccaggagtccctccgcgccctcgtggtggagctgtccagtcggacataggccacccaggaaaagcaatggatgaatcctttgtggttgtgtataaatctgagtcctcgaccgatgcaggtggaaaccatatgcctgcacctggcggaggatccaattgttcttcacaatcaaacaactttggttttgattccactataactgtcttgaaacgtgcatttgaaattgccaccaatcagacacaggtatgtatatactgatcctgttgttgctgtttttgttttaaatactcacaggtgtggttgttcaacttgattttggacaataaggaattttaatatttatgcttctattaatatctccagattgagcaacccttatgtctcgagtgcatgagggtattgtctgatcaacttgataaggaaattgaagatgtaaatagggacgttgaagcatatgaggcttgtcttaagcgtttggagggggagcctcgtgatgttcttagtgaagcagattttcttaaagagaagctgaaggtaagttctgaaggaagttatcacatttatcagattttatttaatttaagagcaaacaattactcaaaaacaaaaggggactaaaattaccaatgtcgagcatacaattacttcaaaaaaaaaggggggcgctaaaattatcaatctggattctagaaatctactttggtactttatgtacactaacttttccgattacaaatttaaaggagttagttcatgtgatatcccactgaagtgtccttgatcaagtctttcttgcgtgtcagtttacatatgcaacatgcattatatggaataaatttgagcctagcttgcatataaattttgtatatatggttcaaatactaactagatctctgatggtaactaagattgaagaagaagagagacagctcgaagcagctattgaagaaatagagaaacaaaatgcagaagtaaattgtcaactgaaggaacttgatttaaaatcaagcaaatttaaggagctggaggagcggtaattctcttttcctactttttttatttgtctgaatgagcattttgtaaaggtaccatccattattctgttcaaaaggacatggttttttttcccaatgctgagcacttattatatacattacagaattgttaataacattaagtattgcaggtactggcacgagttcaataatttccaataccaattaatatctcaccaggttggttttctctttactacctatatttatttaatttgtttccctcccttcactgctttggaacactatttgtctgtcacaatgtcttcagttttgttagtttgtgcgctttctatgattgtgggtaagcaaatttgtgaactcagatgaacttgatagtagaaagtcaaaaatggttaatcttgccttgtaatattattagtgaggaatgtattctaatgccctatagaattcaattactttatgcagtagtactatgcactcttatggtgtaggttgtagtcttttgttatctttccatgaatatattgaagtctctgtatacctttcttggaaatttttttagcaagctggaagaaacctagttcttctcacatcatttgtgatttgattaaatttcaatctgagcatcataattctgtttataggaagagagagacgcaattctggccaagatagaagtttcacaagcacatctggaattgttgaaaaaaactaatgttttaaatgatgcctttccaattggacatgatggagaattcggaacaattaacaatttccgacttggacgacttcctaaaattccggtgagaaagctaagcgtgttttgattctctaagaattgtgaagaaccagtttcttggatcttttctgcatatcacaagtctctcggtttctcttctttattttttcttgtgcaaatgcaaatgcaaaagaaagagattgtgttttcgtgtcaatttaacaaataatagtgagtttctagattgaacttagtatgctaaattatcagcgtcagtgattacttattgggggatacaaattttttatgtctagtatacttggttctgcttgttgcataagtttatactgaactttttaagctagaatgtgacaggcattgcctcttctcttttctccttttcttttttcttaataaatattgtgacaaagaactgatatgatgtttaccttctcgtccaaacattaaggttgagtgggatgaaataaatgcagcctgggggcaagcttgtctcctccttcataccatgtgccaatatttccggccaagatttcagtatccttttcaatctagagttatcttttacttattgtgctctttgctctttaaatttgtttatttatcttttttgtttaaatggccttaatttacattacgtttagatctcgaataaagataattcctatgggtagctatcctcgaattgtcgacagtaacaacaacacttatgatttgtaagtgtataaattatgtgtacgcatatatgtatatatatatataatatttatatgaatatctcgcaaatatgtagtggtgactgttgtggttagacatgcattataaaacttttttctacatttggcttgaataaatagtggatttatttttttctcattcgattaaaagaaatagttgctttatatgggagaacgtccacaggaaactcctaaagttgtgttttcttttgcaatgctccctttaacaaggtttggtcctgtcaacctgttttggagcactcgatatgacaaagcgatgacaacgtatgtaacctacctcaaggaatttgccgagtttgcctactcaaaggatcaagaaaacaacataccccccgagaaatgtttcaaattgccatacaagtatgctctctttcttctttctgtttctctttcaaatccgtgcttgttttccatggtcttcaatgtttcccattgaaactgcaactatgcatagtagttctgagtggatgataaggtttttttggcaatagcaatgcaatcatcattgtttatccacatttaataaaatgattgctttccaggattgatggggacaaagtggaaagctactctatcacacaaagcttcaacaagccggagacctggacgaaagctctgaagtacactctttgcaacttgaaatgggctctctattggtttgttggtaatacaaacttccagcctctttcagcaatggtgtcttctcatgctgaagtccctgctggaggctctttgtacgcgaagcgtggaaccgactccaaatccatgtttcgtaggtagctttcaaaactcgtggtggatgtggacgaacagtggtacatagcaaaacatgtacatattactcttttgcttttgaagacaaattagatttgttagtataaatgatttgaagcatgtaaagtccgaataaattcaaattgttccttttacacaacagaaatcattgtctagtggtctgtagtctgctcataagagcagcccataacaattaatacctttagctcaagatgtgatttgatttacactttagaactttgggtatccaaatcttatatttactcttagacgacgattgtttggaatgaaagaaaacataagaatataaatgagaatgaaaatagaaatgaaattgaatcaaatttaaagtatataaaaaaattgttaaaaaaaaaaaaaaaaatttttttatcattttatattgcaatggttattttttttttattttaaaatggaataattattcttctaaaattataaaaaaattattttataggaatgatattttaaaatgtaattaaataaaaaaattgaataaaaattattttctttccattctattttattttgttatctccaaccaaacgttactttaactttagtacaggaactaaatgttcaatcagtgttttggtagtgttgttttccagtgctatttttgttgttttctcaactgatattctaaaccattgtttcttgaaattgtggcttatattatattagagatgaaccctatccaagcgggtaagggcttggcttgaccctgtgttttttgggggttgaattttatgttgtttcttcaattatggtttttttttttctttttttt

SEQ ID NO: 25404 - DNA, 1569 bp, Cannabis sativa
ccctaggaaaaatctattaattccactaaaacaaaacctttaggtagaattaccttttgcccttacttcacccttaagtaaactaaaggcttaggggtaaaatagtcaaaactacaaccccaccaaaaccagatattctaaatataaataatacctgcctcactaaatataagattctaaaccatatacatgtgattctaatagctaaaccgtcgcaattctactgttaccgagcataattctcaaaatattaaaatacatgtttatttatcatttataataaatacatacatctagagtttatttaattaaataaatctctaaaattgagaaattataactgaaatgcccatttattaaaaataggtcacatattacacaatacatatataatcacataatacgattacttaatgctaattgtctactaattcatattttaagtatgcagttattatatacgtttacttcaattttttatttcttacgaaaattacaagaaattggctaagtgtggggctcaaatttctagagagagaaagtagagagatgctctgaccttgtggagacttagaaaaatgtataaaatgaaccagaagatttctctttttatatggaaggatatctaattaaataataataaaacattacaaaagaaatgaaaaattattttggctgatcttggacattgatgatcatctaacggtgaaaatttactcttagtgaaaattgtcaatttttttagtttgaatctcatctgtcgtatcattttcaagtaatctattgaaaaaattgtaactatgttgaggatgaattttggacttgaaatctttagaattgtgatatacttgatagagctttgaaatatcttcgaaatgtaagttgaattgcatcaatcagatcaatattgaaggatttctgagtattttactgatgttatttagcaccctgcgaccatgttgacacccagcgcccaggttgacgcccagcgactagttggcatcatgacgtcaacttggacgtcgggtgagtgaaaaaatatcccaaacttatattttttttatgcttaagtgatgttttgacactacttagtcaaattatacattttggtgaagttgtacacctgttctcggagatgtcacttttttgtgaaattgggaagactcgaaactctccaattttgtcgatattccactttgttgaaagggtgaaatatcaaagtgtgaatgttacctgtcgcaagttgaaactcccatttactacaagaaaatagttgaacgctcaaaaaggaatcaaattcttataccaaaacccagcgcaccaagtcatgtgtcaacctgggcgttgggtgcttctcgaggcccgttttgatacatctatagaattagagattgtgaatgaggtcttaccccatttttgaccatgttaagaagaattcttgaattagaatttgtgtttgagtagcgaaaacatgcgaaccaggttgcatgtcaacctgagcatagggcccagtgccatgtcaacctgggcattggggccctattctggctccctagaaatctttttttt

SEQ ID NO: 25405 - DNA, 2588 bp, Cannabis sativa
  modified_base (2486)..(2493): a, c, t, g, unknown or other
aagacggttgtctaagaattctagttgtggtattggataacacaccgcctgagacagttcagccaaaagacatcagagtggttcgggaatttttagatgtttttccggatgaactactaggtttaccaccgtagagagaaattgatttcattatcgatttagcacctggagcagaaccagtttctaaggcaccctaaaaaatggctccagcaaaacttaaggaataaaaaattcagcttcagcggttgcttgacctagggttttcatgacttagtgtgtcaccctggggagctcccgtattatttgtcaagaagaaagatgaatctttgcgtttgtgtattgattaccgggaattgaagaaactggaagtcaataacaattatcctttacctaggatcgatgatcttttcgatcagctacagggtaagagggtcttctcaaagattgatctccgatcattctatcatcagttgagaatctaggaggaggacattccaaaggcggccttttccactaggtatgggcactatgaatttttggttatgtcttttggactaaccaatgctcccacaaattttatggacctgatgaatagggtattcaaggatttcgtcgatattcgtgtaattgtttttatcgacgacatccttgtgtactctcagtcaaaagagtagcacgagcaacatctccggattgttttacagcagctacgaaagcataaatggtatgtgaaattcaagaagtgcgagttttggatatctcaagtgtcttttatttggcacatttacagtaaagatggaatcaaggatgatccaggaaagattgaatcagttaggggttggttgagacaaaagacagttatagaagttacaagtttcccgggtctggtaggttaataccgtcgatttgtagagggattctctaagattgcaacacccttaaccgagctcgcttaaaagaataaactgtttgtgtagatggacaagtgtgaaggaagcttttaggagctgaaacagagattaatcacagctccagtattagccctacaatcagataaggaaaattttgtactttacgccgatgcatccagatagggtctggggtgtgtactgatgcaggttgatcggttcctcacctagacctcccgtcaattgaaagaatatgataaaaaatacctgactctagaaaggctaatgttgtggctgatgccctgagaaggaagggtctcgggcaaatagctaatatgattaagatttcacctcagttagcagaagacatggtcaaatccggcattgagtttgtagtaggcagacttcataacttgacactacaatctgatctgttagaaaaaattagagctactcaattaactcatccagagtaagtaaagatctgagaagaggtttcagcaggtcaaaacaaagattttgcggtgtcagatagtgggatcttgttgtttaagactagggtttatgttccaagtagtgcggaacttagaaataagattcttgaggagtctcatatcactccatattcattgcatcttggttctacgaatatgtatcaagatcttaaaccctacttctggtggtgcgggatgaagaagagtgtggtagaatttatgtcccagtgcctaacttgtcaacagatcaaggctgaatatcaaagaccagcaggtgacatttcctaggatgatatcaccatggactttgtgattgggttaccaagaaccacgggcatgtacgatttgatttgggttgtggtagatcgattcacgaagtctacacatttcctaccggtaaaaacaatctttacagtggatcaatatgtagatttgtaagcgaaagagatagtgagattacatggcgtgccagtccattatatcggataaagatccaaagtttactttgaaattttggcagagtcttcagcgggctatcggtacttaactgaaattcagtactattttccatcctcagactcatggacagtccgaaaggacaattcagatactgaaagacatattacgagcctatgtaaaagattttgagggctcctggagcaagtacctgccactgatagagttctcgtacaataacagctatatcagtacaatagggatggctccctatgagttgttatatggcaggaagtgtaggtctcccattcactaggatgaaacaggtgaaaagaaatatgtgggtctgaaatcagtgcaaatgactaatgaaactatagaaaagatctaaggccagaatgcttgtctctcaaagtaggcaaaagagttatgcagatccgaagcgtagaaatgtagagttatgcatatcatgtgttcctacgggtgtcccaaatgaagggagtcaagcgttttgagaaaagaggcaagttatgccctagatttaaaggatctttcgagattctggagaagtttggactagagtcatatcgtccagctttgcctccagtgttggaatatattttaccannnnnnnnatttactaccatgtatgtttttaacatcctaatatgaatttctaaaacaatgtacttcaaacacatagaagttatgagaaaccttacagtgggtg

SEQ ID NO: 25406 - DNA, 1865 bp, Cannabis sativa
atggtgaaggagcataggtcgttgattctgttttcaatggagactcttttgcctcttggtgctattgataaattcaaattggctttggatttgaagtccttaggaaatattttgggggggggagggacttatgcttttgtggaaagctaatatttatgttaatattctgactctctcttgtaaccatatagactgcaatcttaacttaaatgataagcctatgtttcattttactggtttctacggttctcctatttctaatcagcattccataacttggaatcttttgcataaatttttttataatgctcccaatcttccgtggtttattgttggagattttaattcctatctttttatagtgataaagtaggaagtaatttttactctattgttgacatggaatcctttggtctttttcttgataaatttaacctttccctcatgtcttttattggaagtaaatatacttgaaaacatgggtctactcattagaggttagattgggttgtttgctctgattcttggtctgatttattccccactgatgttcttcatcatttagctttttatgaatcagatcatagggttttgaaaattgttacaactacggatggtagtctcaatccagttttccctagaaagcgttttcagtttgagaatgtttggttggaaaacacggagttctttcgaactgtgaaggattcctggtttaactcttgttctcatcccaataatagtggagctttcccgcgtcttctttccaagcaagactattgtgttgcttctcttaaatcttgtctacttgacatttgttcaaaaatacaattattgcctttagtaaaattattactaatctttaaaactctttccctacggatgagaacattgttgctcaaattaaaaatttgcaatcacaacttgatgcctttttgtataaggaagaggtaggtttattggaggcagagagctcatgtgagttggctcaatgctggtgataaaaataccaagttttttcactgttttgcttctcataggaaaaaaaaactaacactattcgttttcttaaaaactagaatggtgatgttgttagtgactttgatggcatatgtaatcttatctcctcttattttgctaccctctttcaaactcaaggttgtgatacggagtctgttgatcaaatcctctctacccttagccctcctcttgaggatcatgattctgagagtttaggagaaccatttggtgctgctgaggttaaaagggatattttccaattgtttggggataaggttgctgcccttgacgagttgaatgcctttctttaccaacaaaattggcccacttttggcctagatcttgctgatgcagcccttgattgttttaatagtggtgctgatttttccttcattaattctactcctattgtccttattcccaaaaagcagcatgcttgtgctatccaagactatagacctattagtctttgtaacactatttataaactcatttctaaggttcttgttaataggcttaaaactgttttagacaatgttatttccccttctcaaagtgcgtttgtttcaggaagaatcatttttgacaacattcttcttgctcaggaagttgtccatgatatcaattctagaaaacgtggtaaggtaggatgggctactctaaagcttgatatggctaagacctttgatagagtggagtggcattttttgaaaagtatcatgttccattttaacttccctttgcaatttatctcttttataatgaaatgcattactaccactaacatatcttttttgattaatggaaatgttcatggtaatacccagcctactagaggtcttaggcaa

SEQ ID NO: 25407 - DNA, 1632 bp, Cannabis sativa
taagaaaaacttgaatccccttaggcctaggtgccgatcctaggagagagagaaagacttagaatttctattttttttggtgaaaatgcttagtgttatttggaataaaaaatttatgttttattcagttcataccattaattactaaacttaagattattcaaattccactcaaaataaaagataataataatctaggtaaaatgaccttcttaccctttcataaccaagatgtaaacaacacaccaaggggtaaaatggtcctaattcataacccgagatatttccgatattccaaatgtctaactgtagggccctgatatttctaacgtaccaaactatatttaagtgactgtacaggtcatacatcgcatttcactattaccgggcataatatatgaaaattttaaaatttcacatacatcataattaatacacctagaatttaaatatacctccataatttcataaattataataaaaaatttatttctaattataagccctaattctctgctaattctcataataaagctaagcagcaagtacaacagaggtcaaaagaattaaaacagagttgaaagagcataagcggacaagaaaacacgcgaggacatgaatagagttgagtacacgtggaccaatttgaacgagagtagggagtggttcaaacaaccatttttgcctatatataacagacccgtgtgtagggtttatgccctaaaaatcttgtaaagatattttcccattatgaataagagttgaacaatttgatatatacatgaatgttacgttattcgtatttagtattaaataatttatgtataaatatcagaatattccttattcatacatgaggttgtgacttgtattgtatggagaattaagatcacttagccatgaataaaatagccagcaacatatttgttatctgtgttttcaagcgatagacacatgtcatgagtaggggaaaaagtgtattaacttttaggattagcagagtttaatggatacttggtgggggaaagccatccacaatacaagtagtgtatttgggacccaacatagccataataatccccaactctaagaagccctagagcgcaactaaagtaagtggcttccgggaagagatctccacaaactggtcttaggtcataactgctaccttaaggaaaatgaccacgtccgcttcatatggaaattgacctatagacgattacacctctttttggcacgagatcagatcttgtccaatggtagtgctcgtatgttggaacttattttatcaggatctagatttactaacaagtatgttggattatattctataatctaacaccctaaacatgaatttcctaaaataatgaaataaacatatttaaaattttagaaaaccttacattggtggcagtagaatactatggctcatttcgttttgatctctaactcttgttcctttttgtcgcagagtaataacaagatctgaatctggatctccttcaagtattggaattcttcataatcttcaacactctaattgagtactgacttgatatgagcgggaaagatactttatcactatagggagatgtattttaaaatcaattgaaggaggctctctgttgactt

SEQ ID NO: 25408 - DNA, 3407 bp, Cannabis sativa
taagaaggtgttggtgtttccgttcaatgacgaatttttttggggttgttctacacaagagtgatatggaagaacacccttgaagcaaagaaggaatgaagattaagttccttgccgttatcagttcgaacaacctttttggcagagaactgagtgcatatgaaggtaaaaaaatcttgtataatatgttggacatcaaatttttctttgagtagatatgtccaagtgaagcgtgatttatcatcgacaatagttaacaagtatttgtatccttcgacacttatgggattgaaaggtccccaaatatcaaggtgaatcaagtaaaatatggtaggagcaaaattatgatcagaaataaatggtaagcattttttcttgaccaaatgacaagtagagcaatgtgtattgtgagatatagaagtagaaaaattaagctctttattaatttttcttgaaatgtacatataagggtgacctaggcagatatgccaaaggtttggatcagtttgaacattacaatcacgaggtgatttattacatggaaaagtaaatgaaatttgcttgagaatgtaaagatcattatgcttattagcagtcccaatcaccttaaggttcctgaatcatacaacacaaagaggttaaagaaacaagattagttgtatgttgaagatatgcattgatgggaaataaattgaacctgaattgtggaacataaagtacatcaaagatagttatatcaggattgatttgaaccatgccaatattggtgacaggaacttgattgccatcgggcaaagcaacattctcgggaaaaagtttattggtgaaagaattgaaacaagatttgttaaaacatatatgatgtgttgcaccactgttaatgatccaagaaaagtaattggatgaggttttaccagacatgttagaagtggctggtgcgggagtgagatcaactcttggggcctgctgttgtaatgtttggctcaacacggagatgagttgttgacaatgacttgtgatgttggatcagtagtactatcctcggaagaggagatttgattgataataaatttactattcgtagctttcttcttgtcaccatatccatggggaaatccatgtaaaaaatagcacttatcgatgtaatgactaggttttttgcagtaagtgcaagatggtcaaggcttctttgagcgagaagcattatttgaagctgatgatggatgggcagtagaagcaacaggaagaaccaaaccaatggtgcactgtctttcttcttggaccaccatagaaaatactttagaaataaaaggtatagggtcgataaggagggtttgagataggattcattgagtcctgtcaagaactggagaacttgatttcaattgtaatagtccagaagagtgctcatggcgctgcaagtacaggtaatcgcaagttgaaattctttcaattcgtcccagtatgatttcaacttggtgaagtaggagttgatgtcaagatcaccttgttgaagatgagtaagattagtctgaagttgaaagattcttgggtcgttagcttggttgaatcgatcagccaaatcgttccacatatctgctgcaagatcgaagaaaatgatactttgggcaatttctttagagacagcttgagaagccacgacattaccatgttgttgcaacaaacccaaagaccaagaagaggatcgcaagcttggggtcgggtaaaggtactgtcgatgaaaggggttttgttctttgtggcaagagccatggatattgcacatttccaggattagtaattaattccagtcagaacagaggataccaggaggaggcctgggtgatctccgacacttaggaagtaatgacttgaaggatcttcctgaatgggtcgatcagatttggaagaagaagagcaaggaggagctaccggagaatcgacgggggcagattcatcagctgaggtcaaaatttgaggctcaaggatgatctgagaagaagaagcgtcgtcgggattagctcgagtacttcacaccattgttgtgaattgagctatttcgtctgataccatatgggttgttgcagagaaaaagctctgcaattgttttattatctttattgtataaattaatttgttacaaatgatagtttgccttatataggcagagcagggtaagtagcaacctaaccacctaaactaacaataataacagaaccaaaataatcacgtgtctaatatgatcgaaattcagttctttttgagaatagtcagtcataaactaaaatggtagaagccctagctcgaaatattatgcacgaattctaggggttgacaagaattgctcattttcgaggcctagtattagctctgctttcagaataatgctttgtatcaggctgaggatatgttgaagttgttgagctgctggctttgacaatgagtcttcaacattcgtgccgattggggtttcattaaatgtgatgcttctgtggttgtttcatgaatctctaaacttaattgtaatatttgttttcagtagtgtcatcgtaatgtgaatggtgtagccctcacagtccgttacgaattcttttggagaatgtctttggactagttcttctccgcaatttcaaaattctgcaataacaatttatgctctttattaatgaaatgcaagcttttccctaaaaaaaaaggtggaggcacgtctccaaaaactgtactcaataggaaaattagaaagacaagtttcattcttttgtttttaataatgtgtaatatctatgttctcaatcacctcaataaattcctcactttctatttcttccgtactatttttacattactatacactggtcgaactatttgtaaggattaattaaacccatgaaacagtataaaacttttgatagtcaacgcatgaatgcatcatcaggttaacatttacatttttgattccggctattcactcagatcatcatcaaagtaatttacttcaccgtcatcatcttcgtcatcattttcatcatcatcgtctgaaacagcaccagcattagaaggattgacatccgacaaagtgactagttcgacacatcccttctctacagttccatcttcataatcgatcgtctcgtcttcgtatgcattagtcagttccatttccgtacagaggatttcctttaaaagagaaacaagagatctcagttactctgccaaaaccatttctaaatatcgaaaagtctaaggcatgacattcttgtccgtatagttttacttgtgtgcaacacacttgacaacctattttttttgggtgaaatattaaaattttcacatgggctaaatattgttatacattcttttgtcatttcaagttaagtcaagaatctaaaccaccatgaagacgcctc

SEQ ID NO: 25409 - DNA, 1201 bp, Cannabis sativa
tgttttactagtgttttataaaacacagtatttttgtaaagatttctgtgtgacagtatttttataaaaattaacctaaattccagtatttttgtaagtttccctctatttattcactagttagcccaattatgagcccaatccagtaaggtattaagccgaatctcaatagtttttggatgggcctagtccaaaattgctctttaggaagtttctaaatgtggtatttatctaattgcaatttttttttttttttgaggaaaaaaatgagttaactgaaaaattcattgtaaagaaagtatgccaaaataacctctgtatgagtatatagagaagttaattgatcttactcatggattaggcataattaactactaaactacttatgttcatcttcttcttgcttttaattaaagttgactaaaatttatttataaatattagcttatggtatcttgagaataaaaaagaaacaaatagaaataagtataaagattaagacatatttcaatggtatttttactctttgaaaaaaaatgttggaacatatttttagaagtttgtaaaaatatcgtcgtgtcgtatcgtataaatttggaaaaaaaaatatggtacttattgtgtcgtattaatttttataaggtaagctcatgtaaacatccatgccgtgctttaaacgactctagacaaaggcgggataggcttgtgtacaattatttattaaaaaaaataatatgtatattttctagttatttataaaaataccataatttgtctttaataagggccctatataaaaacacacacacacataaattctcactctaaatgatataataagtcctaaaagagttttaacaaaaacttaaattttaaaataatatattttagttcaactctttttgaaacaccaatgttttgttcgttgcttcaaaaattatctatactttgtatgcccacttgttttaacttttatctttatttttatattttttaagatatacccacttttaagttaataaaaattatgtgttagacttaactagagggtgagggtataatacattttaatgaaatataatatgatggtatttttaattaatagatataaaaaaaaggtatttcttaatttaaaatattgtgaagaggcccaatatcatatttttaatatggcccaaaagtaagcttggtcgtaatttag

SEQ ID NO: 25410 - DNA, 3936 bp, Cannabis sativa
  modified_base (3493)..(3508): a, c, t, g, unknown or other
aatttctcataaactaagaatttagttatataggcacactttatatagaatagatatatggcttcgaaaaagttgaatggaactttataaaagccattatggaaaaatttgacttttcttgttgttttataagctttgtttttaaatgtctcacaaccgctacattttaatttaatcttaatggtaatgtctttggcaatgttattcccacaaggggtatttgtcaaggcgatcttttttttccttacttctttttgctgtgttttgaagatttttcctcccttattcatcaacaagaaagaagacatgctctcaatgggtacaaagtagctaggactgcccctattattttccatctcttcttcatggataatagcattctcttttgtcatgcttctattaattcttacaatgctatcaaggaggttctccatctttatgaaaaagccacgggacaacaagtgaacctccaaaaaatttctttatacttctccccaaacacggctgtgagggatcaaaaccttatttcgaattacataggtatcccagtcaaagcctcttttaagaaatacttggggcttcctcaacattttggctgttctaagaagcaagtcttccaatatcttaaagataaggtttggaatcacctcaataatgggaaacaaggttttttcgaaaggtggcaaagaggttttgctcaaatcggtcatccaagtaattcctacttatataatagcttgcttatgtatctcggtagctacttgtcattcattggagtccatcatgactaatttttggtggggtttcaatgctaacaatagacccaaggtccatggcaaagttgacaaaaactttataagtcaagaaaggatggcggattaggttttcgatcactgttcattttaattttaaccaagcaatgcttgctaagcaagcttggcgaattcttaagcatctaaattctcttgtggctatagtctttgcagccatataccaccctcaaacccctttcaccaactgctcccttggcctctctccctcttttgtttgacataacattcactgaagaaaagaattgctgcataaaggtctcatcacaaaaataggtaatggacagaacacatccccaactcatgattgttggattccctctttcaaccaagtccccccaaaccatcctatccctagccttgttgcttcttttataaaggacaacatgacttgggatatcaatcgtctcaactaaagagttatcctccccatattgttcaagatattctttcgattcctctccctctcttacctattgatgacaaccttatctggagattcacgaaattgggaacttactcggtcaaaactggataccacttaagctattcgaccaattcccctcctgacatcccttcgtcctcatccccctctccttactggaaatcacattggcatctcaatctctcctctaaactaaaacactttgtgtatcgagcctccacatccaccctaccaaccaacaagaaccttgcctataggaaaattacctagtcccccttgtgtgtccattgtggtagagatgttgaatcggtttcacatgccctattcttttgcaagaaagttagaagagtttggaaaggtgcaattttctatctttatctttttcaaatattgtttcttttcataaaattgtttttaatatctttactaacatgaaaaaagaagaggtgaaattttttctttgtataacttggtttgtttggcataacaagaacaagaagattaagaaacagacaatggatcaaactcatgctatcctcaacctcgctgaaagttacttggctgaatataaagcaacaactgttgttcacaatgcaccacttccagaagccaagcctgctgccacaatcagctggacacctcctccacaaggcctcctcaagctcaatacagatgcgacttcctcgaagaaccaccttaaagccggtcttagtggaattattcgcaatagtgatggagaagtagtcgctaccatagcttttcctcatataggaggcatgaatgctgcaattcttgaagcaaaatctattcttaaatctcttcactggtgcataaaagaaagcttccctcttcatcaggtagaaaccggatgtaaagctatcacagatgctctcgctgccaccaaagaggacctctctctcttcggagatctcatcaggctaattaagttggttttatctcacttccccaatgtcttgatcactcgtgttaagcgctctgctaacacatttgttcacaagctagcaaaatttactttgaggttagatgaagcttcaatttggattggagatgacccttgtaatcttgctcctcttctcttcccttaagggcatccttcctctctaaaaaaaacacacacacacacacaaagtgtgttaggtgacattttatatatttttttcttttacttttattaattttggaggctttcacattttgtgaacaaataatgtgtacaagtttgatataatatgatgtttattttgaaaagaatttcacatagtttatgcattattttgggtgctatatttgtatatataaataaaatatctatttctttacttttatttatcacaaaattagtatgtggttgaatgattttttatgattaattcaatcttgcttaattacttatattttttattttattgttttatgaacattttaattttataaaaaaaaaagtataaaatattacgaattacgaaatgcatataaagtatttgttatttatactaaataattaattaaataaataaatattatgacaaatcatagaattaaattttttaatttttttaaaaatttaaaatttaaaatatatattacatatttttaaaaaataaagatattttattagctatttttttttatataaatattgtaattatgaattaaaaaaaaaattaatatctaaatctgtaaagataaaggagaagtataagacggtgatgcgacactctaagatctctctaatgagtattatttattctctcttttctttaattttttattagcttcatatatattaattagtaaattaatataaaatatatttattttcaccttaattcgtttatttttttaaaaaaataatattttaattattagttttttttctcatcacttggtcacattttattaagcttatatttttttttttaaaaaaaaaaaaacgataactcaaaaaaattgatattttatttattagcttttttttgctcatcacttggtcacgttttggcttattaagcttattaaaacttattttctaattattttttttaaaaaaaacaatcttcaaaccaaactcttaaattaaattagataacagttatctatatatatacattaattctaaatcataaatcgcatcacttttcttaaaatatgtttatattgttaaacttattttaccgggatctagatttactaacannnnnnnnnnnnnnnnccctaaatatgaattttctaatacaataaaataaacacatataaagttagaaaactttaaattgatggtagcgaaataatatgactttttccgtttagatctcttgcccttgaattctttctttagcagaggattattaagatctgaacctggatcttctctccttcggtttggttaaccaccgtcttccgaactatgattgagtacttggcttgctatgtgtgggcatggtactctatcactaaaggcttgaagattaatgaagaataataataaggattcgaaatcactataacaggagcctctaatctactagttatttgatggagttagaaaactaggtttagtttgattgaaggttggatgagaatgaaagcatcatgttccttttatagtatttcaagtagggtttaggatttaattatatg

SEQ ID NO: 25411 - DNA, 3353 bp, Cannabis sativa
  modified_base (3319)..(3320): a, c, t, g, unknown or other
ttgggtttgggtttggcgctggagtcaggttcgggttttggttaggggaaagattttgggtttaggttcgggttcgagttcagggctgaggtacgggtacgcgttcgaggtatgggtttaagtatggggttgagagttgggtccaggtcggggttgggtccagggcttgggttcgggttcgaggtcgagttcaggttctggtcaaagtttgggtcgaggttctaggctgggtcagggtttgtgtctggggtcatgggcagggtctgggtgcgggtccaagttcgagtgcgaagctgagtctggggccaggctctaggtttagggctaggattcaggtccagatcgaggtctgagtctgagttcgagttaggggtctaggcctgaattcgggttcagggtctaggtaagtgtttgggtccggggtcgggtctgggttggggtcggggtttgggttcgggtcctaaagtccagggagcaaaatattgattaagaaaaataaaattgtttaaccatacacacaataggagtattccaattttgtgcctgtttagccacttcatttaaatcaatttttgtaactcgcttacaagatttcagcataggttcctcatagtgaagcttagcagcaacactactttgttggtcttctttgagcttagcccaatgtctttgagctgaagattggtagtcttccttctctgtttcctcagcccaactcgaatgctgcagatttgtctcatcttttttgatctcaccattgtttgaagtctcatcagatctctgcaattgcggctcaatcaagtccgtcttctcctcttctggcttatcgatattctcagtcgagttcgcagcttgccctgtagcaacatcctgaatcgaatggggctcctcagtcttggatcgagaaactggctttcgagagatcttcttcttcttcatcgagagagagaaagagagagaagaagctcttgcaaacacctttcttgtaaatttttgcaaattttgttcttctttatatctttatatataaaaaatggctatctaactatttttgttggtttaacagaatatactttagaaataaaagaatattccatttaatttaactgatattgttagtaccgtttattttataaatatgaaaatattaatattattttatttaagttttttgaatttatttttactatatgaattattaaaatttaatattttaattcgattacataaccaaatagatataatttagagttcttaccttgctctttaataaatttattatttaattttaattaattcaaataatattttttaaaaaaaaaattagttaaaataaaattttctttgaggtgatattattaaaaaaaaaaaattagtcaaaagttgggaattcattaacattaaaaaggtggattggtttatgacccaaataataataaatataaagtgatgttagtattttattatacatagtagccttaatatattcgacatataaattgtgtttattttaacatatatatatttgtaacattatttaattattgtaatattttaaaaaatatatataacctcgtataaaactaaacattggtgcatcgaaatatatatagatagatatttgtattgaatcatattagtatcaaaaaattaaatttaattgaattagtacattaagaaaaaaaaaatgaattagtactaaatattagcatttaaaaaaattacaaaaaaatcaagtaataattataaataaaagaagaatatagtgtttgggtagtgggatgtacaaagtagaataataaatgaagaacaatcattgtcaaacactaataacatcaccatgatagtttaaaagaagttactagggtactgcatgagacctctaatgccaattatcaatactctaaataaatgtaaaaataaaagtgaaagtatactaagtccgagttggtaattcaaaacgacatattgggcaagtgtgtcttttctccaaccacttaaggatacaatgagtgtgaaataagtgagaacaaggcaaccgactcagctcagtcccactcaacacctcacaaaagcaaatcgaacacgtcatcttttcaccactcgacgaaacgacgtcgtcgcttttaagtttctccaaatcctccaccgacgcgcccaccccaaccggactctcgggctgcaccactatgattaccgggctttcgcgttcgggttcgggttcgggttcggcaacgggtacgggtaggggccgtacatggttctctatcgtgatctcaatcgcccgattacccgaacagaatccggattcaagcattcgggtgagaacactgccaattttgttcaaaactccctccatgctcatcggttttgatatatagtttccttcggaactcgcgattttccagtgcatatttgataagacgaaaggaatgttgggcttaaatatcatattccaaacgaatacgcgcggtgattgtgaatctaagaggtctaacgggtattgatatcggtgattgtattctcgatcgattatgggggttctgccacctttgaagacctttcgtaaaattttgaagtaaacgattagtgagggaggaagagcttgaattcgagggtttggagttggggaacagtagatttctcttgcgctaacataaaccctagactcaccaggaattattggatccataattacgttatggttattcgatgctattatatccctatatatagagagagtgttatattctaattttaatttaaataggatatctttttcaaaaaaaaaataaaaattgtgagggtttaaattttaaatatttctcttttaaaaaagattaatatttcttatttaaatttctataatattttaaagattaatatttattgttttaggtttaaaaataactacgaacaattttatagtcttctctcgtatatcttttttctcaaaatttttattctattttcttttaagaaaaaaaaaaaaaagaaaaacctacactatgaagatttttggggaaaatagtcaaaatacggttatatagattttatgaacgggaacattgattttgtatacttacatatatttactatgggattattatgataggaattggtattttacctattaatagggatagtaatttatagttcttgatttaatctaataattcaaatcaactcttgaaaactacaccaaaattaatatatttgttttatttataaataaactttaatattatttattgtaggttcaactaacaaactccaaacttaatatttttatctttctattttatttctatttaaaatnnagttttaattatatttttttatttcaaatttac

SEQ ID NO: 25412 - DNA, 10584 bp, Cannabis sativa
tccaatcgctggaatcaaaatccatgctttgaatcgagatctccaaatgctgccaatgaacatcctgtcaacgaatgttttcttcacttcttgtaaaattaccatatccggattgaccttgctaattgtagctttgatcgctttcctcttcatcttatctccacttcctctaacattccatgtcaagattctcataatgatcctttgggaggtccctcttttttctcacttttctcataattgatgttaaaagccaaattttttagttctctatttctcttccttccacccttggaactcggactcttttgtttctcttcattcccattaagtattagctgcatgcccatttcggccatggaactaacgatatcaatttcagatagcgtcagattccttctctcctctgatttgtctacttccaccgctggtaattcttcgacttgctcaatggactccgagccttttttgggccttccatcttcttgccaaagctccttgatatcatctatgatgtcttcataattttcttcctcttcttctgtgcaatagccaccttcttcttctgaattatcatcatctgaactgaagtcatggaggtcttccaaatgtggttcctcaatctgttccatctcctcccaaaggacgtccccatctaacctctcaattgctccgccattgttcttggggctgtcttttctcctcctaagatatactttcagcttctttttactgacaacttcttcttcaattatcgtttgttccgattctcgtattactgaatttaacttaaggctgccacgagggttaaattcctcccaataattgatcaccgcaatattaaattcttctcttctcttaggctttactggtttgagaatgccttcaaacactttaattgaagtgttgtttttgctccaatgcccctgatccagcaccaaagtgtaaggccccaagtgcttataaattaaatggcccaaaagcctgctcacctcctccaatcccacgggctgaacacaatttctggccatcccatttaaaccgtggcccaccaagcagtttggcccactaagactccattcattattttccccaaactgcccattgtacattcggcccaatcttgatacgggcccatctcttttcctaacccatttaacttggcccattatccttccttcttcatagggctgccatatattatttaaattaagaaagttaattggcattaaatgagcccgcacacgtggctcctttagatctctccacaatctcttgaatatactatgaatagtaaccgactcccttgattctcgcactcttttgttggaactcccaatcgccgccgaaccataatttgtggaataatgatcgttctcaatcatcgcacgtatactgctgcagcgtgatgtcttccttggaaattcctcgatcgccgtgtcatcaaaaatgactgcagccgccggcactgtgtccgccgaccgagaaagcccaatcaatggatttttgacgtttctgattccgctgtcttccttgtgtcgcaccagatcatcccgtacatcactgctcccaatagtgtcttcctctaccgttatttcttccttgtcccttcttgttccgacctcttcgattacccccctgtcttctgcaacatacccttcttctaaccctgttccttcctcgacgccagccatttagttatggtcgaaatcttggtaccaacaggtcctgaaatacccatggaatctataatttaaatcattcagcttaaatagtttcagttcaaccttgctgtcttcatgttccagattcaatgactccggtacgaagccgttttcgtctcccatcaactgaagcctgacatgtgaaagcagggaagcttcggctgactccttatccacatccagaagtccaccacaacactcacctattctcctgaaagttttcatgttccatagactcaaaggcaagccatatatgccaatccaagagtccttgcattcaactttaatgctttccatttgtgcttcccaactccattgagagaaagagacaaccgtttgtgccccaggaactctcaattgttgaatttgggttaatacatctctttccttctcatctttgcaccagacaatgcatctatcatcgaacagttggctgaccatcaatttccttcctagctccctggatagattataaaaaataacactccatgaaacatggctgttatctcgggtgagaatgatggccagcttccaattcctcttttgtgctttcgatcgcatgtattcatagagttttggttgctggaatctcttttctgggtatggattttttggtttaaagctaggatttatggctggatatagatccagcccctcaatatcactttttcttcggcctgaaggtttcgaaaggaacttcctcaatgtaccagcttgtttgtccatcggcttcttaacttccgagttgccttgctctattgccttacaatctctattacgttggtcgtttttgggaacattcttcattgagttctttactacatttgcccaggtttgtttttttgttgcattcctcacctctttctcattcacatattgccttggagatacctgttggctctcagattttcttcccataactccattgagacatcgcctaagatcactccatcctgtagctgattcctcctctgggatgattactgcctttatcttgttatttctcagcaccgaaagtttgaggaactccccttttctgtttgaaaagcattccaagaaatagctagctgtgctgttcctaaatgatcttttaaagtcagtcaacagcactcttttcttccctttcatttcctgcaatgtgtctaagatccatgccaccgcatcaatggtcacagttacttcgaaaccgaaatgtctagtacgttcacacactcttacagctcccccgtcccccgtcaaggtggtcataaaaaccttatgtttagtttgaaaactccagtatttgtggagtcctatattgtctatatgtttagacaagttttgccagccaaaaccagtggggtgttgaccttttttcttctcaaaaccagtggggtttcggtgccagccatggccagaagggccatgggaaccccccctatgcatggagacttctttcagaaagaggagagagaagagagcataggagagaggataaaataataatttttattattcattgactagccaattttttttttgaaaagagagaagaagatcacttggcaggcctcccccgatgttattaaagtctcacttgtggcggaggaaaaccttggtacataaaatgtaaaacaatacaatgaattagcacattgagtgaccaatcaaacaaaaagagagaattcccgagttttaccacaaaccactccaatccctgcttaaatctaggatagaaaaagcctcaaagtatttggttttaaagatccatgtggctgtccaaaattttattctctcccaaacaaagtttgctgatctctcttgccctttgaaaattctgctatttttctcattccacacagcccatagcagtgctaacatcgtagtcctccaaagtttaacttttcttttgcttcccaccagtttacttagtagggcctgtgtcaccaaacaaggcataatccagtccagactaaattctttataaagtaatgaccagattttttgagtgtatgtgcaatgaaggaacatatgctcggtcgtttcattactggacttgcaacagatacaccatcccggagatatgttgtaacaactcagaataaaaaaaatcttttcctttctatttttattagatcctaaggctttattttgttgtgtattcttttattttttctttctgttccattattaccacgactttcctccgccataagtgaggttatctatgcataacggtgggaggtcagtctaagacaatgacctatttcactttataaaaagaataaaaaaagtctaaaaaataggaaactaactaacaactatttttaaatataagataacaaactaagattaagttacatataatttttacacgttattttacacaaccaaatataccaatcgctattctaataagaaaatggcaacgtcttttacctacttagcattaaaattccaccatcattagttttctaaattcttcatcgtatttcaaatatgagttatacatatggtattttgaggttcacattaactgaattgaaagttatgttatccaggtcagctttgtacttcatttcatgctacttcacaaggaaatgctcccaagtaagtggtgcaattagtatactctcactattagtaggagatatgctgctgttgttcacatagacctgaatttaattagaattagtctaacatgtcatgtatttacatttagacagacacttgttagatagaactgaatgattcatgattgggcgtggtcttagtgcctcctttccaaagtgaatcctttttttttttggttgggtagttaggatatcaataccatgatacaaggcacttccatttccaaagaaagaagacatcaataccaagacatgctaatagttacaggtcatataaagcttgatacaagcaacagaggctgtatgtataatttgttaaatcaacttccttcatgttgatgcagggggattcccgagacattttgcatcttagaaaaggcctcctgaaagcagttttgggtcatcttgagtggcaggtctgtctgttggtttgtttctttttcccttatgttttgcctgggatgattttcaaggggttaagcgcgcgcacacacacacaaaataaaaaaagatttataattaactagagaattataatctttgaggaaattgatctatggaatttttcagttccggctgtttaattagggcgtcttttctctcaaaataatctttgaagtttttggttagttttatgggtgaatgatattgaggtaatacttttctttattgtagtttgtgattgttactctggaggacttttggttctcctcttcctgtatgatactatctcataattaattgcattttttctctgaaaatgggtaaacaaaaaaagtggaacattgaacagagactcttctatcaatttaaaaacagaatggtactaatacactcttatcacttatctattgtgtccttacttgttgattaagtagatactggtttcgttgagaagatgatgagagagaaagtgacagcaaaacactgatgaaaaatatcaacaaaaaaaattgtttttaaaaaacacagaagacaatttttttattgctccgttttctttttctttttctttttttttttaaaaattgtttcaaaaattgttcttcgtgcaaaacccttgtttacttgtttttagaggattattttgtatttttaaaaatagaacacaggtgtttcgtatcaatgccaaacgtcccctaagatttgatgagccacagaactttttgtaaaatactcatcacactactgttttagtttgttttttagaaagagctatctcagttcatagttctatatgctcgtttggcctttagttgatgaaatcgaaagtttcaatattatttttatgtagatatctattgtaaaatatttatactatttataatttcacatgcttcctttgcatacatatttatacttcccttacaggtatgtcattcaatctttttcgtgttttactccactttactcatctgtatcctgatagattttgttgttagaaacattatgatcaattgctttatattagctccctttgttacattaactggtttctttacatgcaggagtcttccattttaaatgagcacatggttgtgctgttgcctgcagctgtttatgctctttctgctggttgcacccctttccaaaaatgttatagtggactttctatattcaatgcttctgaagatgctaataaggctatgcctatggatgactgggttaaggtatttggtgatctatcatagtactagcaggctataattttatacatccggttatcactacaaaactaaaactagataattgtggttgtagacggaagaacttgagcaagactctatgcacgaactttttgaatgctccattgatgtacttgcgaatattgatcaggtttcctctgttaaggtactgggttttgtatcatttagtaccatctgtattgtatttcagttgtatttacttattactatttctttcttgtaaatcttgtaaggtttcctcatttgcaaatgatctgagtgtgcatcttcctcgcttgatgagagactcactgcttcttgaaatggagaactttgctcatggatatctagtagacaaggaaatcaagactaggcctctatctgatatactgtttctctgtactctattatcaaatttcatctatggttcctactttgtgaggtttgtcttatcttgccatgtttttcatttagtttttttggaatctctttccccttaaatcaccttgtttcctgttaggtagctttatgcataagtcttgtgtttcgtcatctgttctttgataactattgttctgcaaaaatggtgatcaacctcaacatgtttcaaaaaaaatcatgatttacaaagattacgagagatgctgatggcagctttgctgtcacagtacaactttatcttgattttaaggctaggggaagaaacatcaacaaaagcttctatattgcatacctgtgtgggaggttttttttagtttaatgtactaattgactactcttcctctagctagtttcaactctgacaccatgaagtcatatttgcttgattgaaactttaactcccatttacttgtataggacctgactagaaaatcctgcagatctaggatatataacagaaaataaagcttttcaatatatctcttataaatcataatttaaattttgatatgtaagaaatttaatcctatcaataatagggtggaagaaaacataataaccatctgtagaattttgcaacatctgacatatttttaatatttatgagaaaaatactttgaagacctggtttttttttcttttttttcttttatttataaatgattcacaacgactaacttttcatattctggtttggaattttatatgtttattgaatttgtttcttattggtttatctgcaagcgaaatgtgttctttttcatgccaggaaaggagagggagtctcatcattcccctctgaattgggccagtgcttattagaattgttgggtcatgctgtggatgtaattcagggaatcccaaatgatctttcatctggctgcccaagctatgacttcatcgtcagtgatcgcactcttgttgcttcatttaggagtttcgtttcctcttctctgtttgctgagcagagagatcgtaactctactgatattgcactgtatgatgcagttattcaatctatggagaggcttcttaaagcccttactaaagtatatgaggaatactgtaatagtttaacaagtcttcagtctgaaaggttcctgcaagatttgactgcatctgtaattcctgctcaggatatttcccaagttgattgtaataaaagcaggattttggacctagaattggatgtgagtgttgattctggagatgtagaggttttatctgttggtgggaaaattggcactggtgtctcttctgttgagaaatggaagatggacatggtatcgcttatttcaggatttttctctgttccagttattgttacatgggatattctgtttaaactcatggagaaagaatgtgatttaaaggtaaagtgcttagttattcttaagttatgcattgcgaaattctactggtttaatttaatttttttcatcttaaaatgtactcttacatttgttattaaatccaggtgcatgaaacaattctttacaacctttgtcagcatccttactggtcatctccttcaaatatttcagatttggtatatgaaaataaatctggaaccaaatcactttaaaattaatagatgcatgtttttttttcctcaggtattattaatatgaagaaataacaggcatatacatttctctattgcaggtcaattttatggatgaaatgtttatgatgcaatccagtcttaagcttgattgcgttagcacattagctgcaatacgtgctttggtaggaactttactatccttggaagatatttggaatgataaattatgttgttcttcgaaggatatgacatctgagcaggtatttattattctccttgttcttcgtttgactaatggggatgattagggaggtggcaactgttagaccctaggatccaagggcaggttcatatcaacaacttttttagggctgagtaattgcattgaaaatctagtcccatttattctaatttgaaatatcaaaacaattaaattcagacactcatatattgtcacctcatatctctttttgcctggtatttgattttaatttaatgcttgaagttcgaatttgaatttatgatttagtttaattcatattttgttgttaagtaagataatcttagacatatctaattagctgcattagtttttagtgctagagtaattagttgtatagttgaatatttataaatatgtcctgattagtgcttacacaactaaggcgtgtcttcaggtccttaaccattcaaggaggttttaatgcatctattttctttatgcataaagtaaataattgcaattatgtgctgtggtgaccttggcaccaatttgatatatttacattgattagctgacatgattgattcatttgcactaacatttgggagagatttggcatgtttttctttattttcttcttcatgtgtgtcagcagaatctctgttctcaagttcacgctctcttttttaacttttcaaaagatagcatgtgtcctttgttttcttttttattctgtcccgttgatttgatacaatgttctgttacttgttcggaaaaaaacaaaagaaaaaaaagagggaaaattagggagggctttcatttaagtttctttcaaaatttattgttataccatctaagttgttacttgttgtatgtcttattttttctgttaggatcaatcattatcatgtttttatctttaggtttgtttgataaaataagctaggattttcttttttcatatattgtaaccctggttttagagagaactccgaaacaatgtataacggggaggatcctgtctaagacaagaggatctcttctcttttttttttttttttaaaaaagaactccgaaacaatgagttcctttcatttctagtttcactttgtgtttggtgttgtagttaccttttttttttgctcaagctggtgttgtacttatttgtttgtttgtccttttcttttaatttttctttttgaaatatggaacaagattttttttttttgaaaaaagagaagagatcctccccataatatggaacaagatttgtactaaaaaggattgtaacctatcactgtattacagtctaggcagtagccaatggttactcctaaaaggcataatctttatttctttctttctttctgtgcatgtaatttttttgccatgattggtagaagagtgcacaatgaaaattatatcatgtttttcttttttaatcttttcaaaaaaatttgatacttccctcttcttttttccagagcttgatgcatcttggagctctggtaaataaaatttcggaatttgatcatctggagtggtctggacgtgttaagctgattgactgcatatgtgattttgttgtactcagtcctcaaattggtcaggtgatttttaacgaggatgcaaattaatttgtttgtattgtactttttgtttctttctcttttgggctctgagcatacaaagcatgattgtgtgctaaacctgaagtgcttttatttctttaattcaatataatgcaggacaaggtaagctgtacattgcattttcgtaacatgtatttgtgatgagtttcattaatgtaagaatgaagagctttcagccagttggtaaaaggtcgtggttatgttcccctatagtttactagtttggtcttataacttttttgggtgcatgctctctcctctctcttcgtcttgagaattgtgcccatgctaacgagggggttccatggcccctctggccatggaaggcaccagaaccccactggttttgggaagaaacaaggccattatcctactggttttggctggaaaaatactcttggtacctctgtgaatcagaatatccataagtactggagttttcgaactaaacacaaagtgtttatgttaactttgacaaatgatggaggatctgtccgcatatgtgaaagaactagacagttcggatatgaagttgcagtaactatagatgcagtggactggatggttgtcactttggaggagctttatcaaaaaacagggacacaaagagtcaatctcaagcgttttttcagaaacagcactataagttgtctactggaatgctttgcaaatgttaaagg

SEQ ID NO: 25413 - DNA, 3944 bp, Cannabis sativa
  modified_base (38)..(44): a, c, t, g, unknown or other
agtttttctaccgtatttttgtaaataacaaactttannnnnnntatatttgaaattaataaacaatataaatatttattttatttttagtagtataaatttttatttaaagtaatattaaccaaaaatagaaaaaatctcattttaatatctatgcttaatttagctacttaactaaaaaaatatcaaaaaatatttatttttacactatataaaaaatatatttataatctataatctttaaatttttattttgattatattattttcttttagtttgtcgattttttctacgggtgactcatcttttaaaaaataaaaacaataatttcttaaatctaaaaattaatatttatttttaatcttgtagcttattaattatttttaactaataaatttatactaatctatcttttaaaaaaaatatttaataaatttaaatattttgatattttaaaaaataaattaaaagattaaaaaaataattaaattttatttgtataatgtaatatttacttttaattttgtggcttattgattatttttcacatattaaatttatactcatttattattcaaaaaaattattttgtaattttaaatattttgttatttttaaaaataaatcaaaagattaaaaaacaataattacattttctttgttataattaaaaatatatatattttttttttgaaaaagaaagagatctgtagccaaaagcaatctcaagtaaaggactgaatgaatagatcttgtaatcaagagcctactgatataggcctaaagcttgctttgctagctgatgagcggcggagttggcctcacgtcggatgtagccaatcgaagcttgaggaagagaagacagtaagctaataattttgtcacgaagctcctgtagatggatcttaattgtgcaacctgaatggattgtatgaatgagagtttaacaattagattcaatatagtttactccaagtaagttcttttgacaccaatcaagagcgagttgaagagcatgtgcttccattataagcggttggtgtattcctctccaagggatagccaaggccgcaacaacctctaccttatggttgcaaactatcattccaaaccccattttgttatagtgtgtgttttgggctgcatcaacattgagttttaggtgaacgattggcggtggttgccattaaaatgggggctgactaccatcttgaaacttgagtggagctgtgtcgtcgctgtgctggtgatactagtagagataatcttccgtccattggataagagttgaggcatcttggtctggttgatggtgtaaaacttgtttcctggaatgccaaactttccaaagaagacagacaaagaactgaaattctttgggtgtcataatatcagtacatatatagaaaaaatcatgacaaggtaaagattttaatttaacaatgttatcatagaatgtagttaatttccaaaccttctggacggagtgacaaccaaacaaagcatgtgctaaagtttcctcgtgattattgcagcggcagcaagttggggacctcactacatgacggtggtagaggttcacactagtgggaagagcatcatggtaagctcgtcagatgaagtaatttattttcaggggtatcttcatgttccaagtcatcttccaccatttttcttggtgagttgtgatagagggagagggctcaagttagtgtataatgtcatgggcaaggtggtatcccgaattgacagtgtatgttccatgggggatacgagaccagtataagcggtcttggccagggggctgtaggagtgggatggattgtatagcttgggagatatcggtcgggaagaggtgttgaagttgctaagaatcccaatctccattaggggttatgagaatggaaactttattatcaagggtagttggcgtttgaagatagacaagtttcccatatccaggaatccaggcgtccttgtaaatagagatggaggtaccattacccacaagaccgcgtaacctagatcagagaagtgttttgccccaggagatgctattccagacaagagaagggcgatgccctctactagagtcaaggaaggatgagtgggggtagtatcgggctttgagaagttgggcaacaagagaggaaagagcctgaagaatacgccaagcttgttttgccaacaaggcttggttgaaagctttcataaaacggaatccaagaccaccatgaaacttggatttacacagggaggacaaactcttccaatggattttcctgctttgatttgtacctccccaccaaaattgagccatcatggattccaccttttgatggaagtagtggggtaacttaaagcaagtcattgcatcagacggaatcgcttgaaccactgatttgagaagaatttctttgcctccttttgagaaaaaagttgagttccacctgtttaggtgggtccacacacggtcttggaggtaaacaaaggcttctttttttgaacgcccaaaagattgaggtaaacccaggtatttttctatagaagtacgaataggcactttgagccaaggtgtgatctgatccttcacagaggcagtggtattgggtgagaaatagagggatgatttgtcataattgacaagttgacccgaggccaagctataagtgtgaaggatatccttgatttgtgcggctgcattaggggagacagcactgaaaaggatgctatcatcagcgaaaaaaagattggagatgataggctcattccaggagatcttgagtccaagggcatgcttctggggaatgcgttgatggacatgttgggttatgagcgaagagaggccctcgaagcatagaagaaaaaggtagggggagagagggtcgccttggcaaattccaagggatggggttacagaaccattaagctgctggttaattgaaaaggtgaatgaggtagtggagataaaggacataataaggttggtgaaattgggcgtgaattgaaatttttccatgaccctcttcaggaaattccattcaacacgatcaaaaggattggccatgtcgagttttaaggccatccaaccaacctttcaatgcttgcgatggtttagagagtgagtgacttcttgtccaataattatgttatcagagatcaagcaattgggcaagaaggcgctttgggccggagagataaatcagcaaagaactggtttgagacgattgaccaaggtgcgggaaataattttgtaaattgtagattataaaatctcataattcaatatattatctatattcatggatgcctgatgcatggcaatcacgaaagggtgctattttggaggatccgtgatcagtataaggagattattatattccagaagccaatcaaaggtctccaatattagcgagtaaggatagggatccaagactcatactatcaatacgcaagtggagagaattagaattatctggtgcatcaagtattctagaaaggtagtagattagtgtggttcaagaaggctttggctcatggatccctaagctcattcgacaatatcctatccggaacctgaagtgacagttatccactctctgacactgaatcagatcttgtcccatgcgtcacatcatggtagggtgcatacatgccactaaaaccctctttttattcaacggcttgtgaaggcaataacctttcaaggtgaaacctttgagtgacgcgtgtccttattcgcatggaatccttcactacagtcgtacaccgcacgatgggaagtttcctaccaaccaacggtcagatcttcatgttatagtgcttgcccttgcaatatatttttaatatgaacttgtttggttttgtgccctaaataaaactcatttcaatataatcacatttactaattaataaagatcagaaataacagatcggaagagcg

SEQ ID NO: 25414 - DNA, 1587 bp, Cannabis sativa
  modified_base (1003)..(1007): a, c, t, g, unknown or other
gataatgaacagaaagttctaaatgagtcttatattgtaccatactctttacacccaggagcaactaatatatatcatgatgtttaagccctctgctaagagtgaaaggtgagattgtggagtatatgtcaaatatccaacttgtcaacaaatcaaggtagagcgtcagcaaccagtaagaatattttaacctttaaaatacttgagtggaaatgggaagaggtaaccatagacttcgtggatggattaccaagaacagtagggttccatgattttttctaggtaagaaggaaccggtgtacaaagtcaatacagttttctttatcggaacataatatgattaaagcagattactgtgctaatctatttttcaaggaaatagttcaaccctgtgatgctccaaaagtaattatctcagattgagatttaaagtttacttccaaatgctgaatgagcctgtaacaagcacgtctaatatattttgggggttcttgaaataagcatcttccatttcatataataacagttattagagtactgttgatttggcaccatataatatgctttatggaagtaaaggtcgttcacccattcatttgaatgcagtcagtgaacggaggaaccttggacctgatacggtctaaggaatgagtgaggccataggaaagattcgagtttatacgtttgctttatagagtggatgggagagctatgttgatccaaagtctacaaacatgaaattcgaagttaggaagaaaggaaagttaatctcaaatctattggtctatttgggtttctggaaacagggaggttagatagcctatcagttagccatactcccagccttacctagagttaatattttgtatatcaatattcagaagtatcaggcagatacgattcctatactgagttacaaaatatggaatttgaaaagacttgtcatatgtgaaatagttgatttaggtttataaaaggagaaagagagagagagatagagagnnnnngagagagagagagagagaaagtgctgcgaaacaaagaatatctcgttagctaagtactatggatgaacaacaagattaaagatgacttagaaattaaagtcgcagctacgggaacgatgtcccaaattgtttcgataaattttgaggacgaaatttatataaggagggaatagttgtaatatcccggaaaattattatgataattaattgggcatattttattaaatatgtgattgaattaatgttggggtaagattatgatcttacttaggctaattgtgtgataattagtgaaaatttaatatgtgaataaataaagcgtaatttagtaattacggagattttattagattaagtgggtattagtagataccacttttgaaataaaatatttttgggcccggcgaccgtgggagctcgacggagtggtcaaagatgtcacgacaatattaaatagattgaattggaaatataccagactagtttagggttctaagttattgatttggtgggtttagctagaaagaccattatgccctaggttattctatagcttatgttcttggaagaggggtaaaat

SEQ ID NO: 25415 - DNA, 4012 bp, Cannabis sativa
atggaagtgtggtttagaaagtaggatgtagtgaggtgtatagtaagatgtatgggattcttatctcaaaattaattggttaggagtattatatatcatgttaagtttccacatattattaatgagactctctaacatcttctttcatgatagtgattattttagctcactaattttggacgactcgatcacaagtggttctttttgacttactatttccgaatcacaagtagttttttcgactctaatttttaaagtggtttttggatttttaaatcggatactcgttaaagtttttgtttggatctgatactatattaaaatatgaaagtgtggtttggaaagtaggggatggagtgaagtgtatggtaaggtgtatgaggttcttttttaaaaccaattagctacgagtagagtagtactactctattccattgttcattgcttggtggggaaatgaataatactactctattcaatcaatgatgtgttgtaccatgcaataaaagttcattgtttaagtttaacacattggtggccatttttcttgctaaacccactttttggacaccaactcttcattctcttatgattgattgtattatcttactttgttatttatggtggaaagtcatgcttgatgcattcttaactgtactttctttaggttggtgacttcgctatcgataatcgagcaggcatcagcaggactttgcatcgaattagtgctgtcagaaatagaaagggtgccattattggtttgacttgtcgtgttggtcgagctatatcgggaagtgctaatttgctgcgatatttggtccaggatggttcttctttgttgctcatcgggcctccaggtgtagggaaaaccacaattatcaggttggtgattttatcccaattcaatagctgcaattcaccaatgatgtgaaatcttagaatattgttgtgtatgcatattacccgaaattgcatttcttagttgtgtgtatggataagtaatctacctatgtagtgagctctaatttgcagggaaatagctcgaatgcttgcaaatgattacaacaagcgtgttatgattgttgacacctccaacgagattggtggcgatggtgatatacctcatgctggaataggtaatgcacgtcggatgcaagtgccaaactcagatttgcaacatgaggtatgattcaaaagcttaggatatcggctacatagttaaaatcaggcattggaatgttctccatcttctggatgtttattcatgtccattatattgatttgttcaggtactgattgaagcggttgaaaatcatatgcctcaagtgattgtaattgatgaaatcggcacaaaacttgaagctatggccgctagtacgattgcccaacgtggtattcaactagttgctacagctcatggagtgacaatcaagaatttgattatgaatccttccctagaaatgcttgttgggggaatacaggtgagttttcattacaagaatctcaatggaaataagtaaagtatgaattttgataaccaattatttgcagaaaaaaaaagctcaaatttgacttgaaagttagcatttggtttccttggggtcccttataattttatggtcttttattgaacataattagctggggtcccttgtaatttaccatagaatgtgtaccttcatgattatcggtttctttaatagaattatgtttcagagtgtgactctaggagatgaagaggcaagccgacggggtgtccagaaatcagtgttggaaaggaaaggtcctgcaacatttagttgtgccgttgaaatagtttctaagagagagttgagagttcatcgcagcttagattcaaccgtggatgcaattctcgcaggtaaactttcttcctcatcagttataaatcttcattacgagattcgaagtgtatagtcttgttcatgttactctcttttctagtaaaggtcgtcaaccatacgttgaagttcgcaagataaactctgatgaatccggtgaaactttagaaaccgagccttcaattggcacttcatctgatacagaaagtgatcttatggatgaagaagatccagagctgatcgaaaatggaactccttacaatgactttgtttacgagccctcccaaaacacgagagacgactcaggggatggaaggatgccacttcacctttttgtttacggggtaatgagtaattttagcatttgaaattttacatacaaattagtatttgcaatttgtgagggtcgttctaactacatatgaaattcttgaactccataaaatatagaatatagattcattgaaccggtaagctcgtaagcagtagagccgaacttattccaattcaatgagcattcttaatattcaatattatgccttaaatgaggacttgaacctccacactcttcagcacgagattttgagtctcgggtctctaagttgctgttcttgccatttttacttctaatatagtgactcacacaacaagtggttattctagatcctcgaggcgagtgtgatacaagggattaagcagttaaagattgaagataataccagtattagcttaaccaacaatatcagcgaagcagacgcagttcttgccttgcaatcgaagctgaagaagaatccccgaattcaagctgcttttaaatctcataatataccaatctatatgacaaaggtaacaaatacattgctttgttcatcttatagtcttgatcccatatcaccagctttctctattgaattctcctgtcatttctagactagctcattggtgcaaataaggaaggtgattcgggcattactcggtgatcatgaagagggtttaaaggattttggatcagttgaaaaggtgaaaccatctgagaaaactgatgcattagaggtaacaataaatcccttatgttatttttgttgttcaaactagttttgtcatttaatctttgtcaagatgcctagaatgttatcgagttttggttaccgttagtaggatagaatgccgaattctcgggatctcatgacgtcatgttagttcactttgttcaaactcggctctaactgaaagggttctgttatgatctcccattgaccaagtatgagagtagttagtagtatataacttcttcggtgtcctccctcagcctagctttgataacactcgatctacttggatagaactcactctcgaaaactagcctgaggccgaagtagttatatatatactactaactaattccatacttgatcaatctggtatcctaacaggttccaaatcaatttttttcctaatacaaaagactcccaaatatcgaaaactatcattttatgtatcttgttagttcaatttagttttaaagttaacaaagcaataggatttgaagaactaaaatggattgtatttacaggaggcaagattagccattgagcaagttgttattccaaaaggcgaaccggttgaactactaccaaggtcaccgcgcatcatgtctcttcagcttgaccttattcggaaataccaactggaagcagaacaaataggctcgggcacagatacgcagcttcgcatccttcctttcggtgctcagacaactgaattcgaggaggaaaacggcgaacaaaatcccattttcgatgatgatgatgatgtaggcgagtttgtcgatgatgatgatggtggtaactctaatggatctccctacttggtggacagactaccattactaccagagtaataatcatacaagttaaattgtagagatttgagtcattgcatacacttttattataattgttttagtttgattttggtcatgatgtagctttttatatttattgatgtaatgtatatagggacattgataattttcaattgtaaaaaaaaatttaaaaaatatccttgggcacacaaaagaccgagtattcttcttttatgataaaaaaaatagtaaatgtcatatatataatgatattcttttaagaataatt

SEQ ID NO: 25416 - DNA, 4753 bp, Cannabis sativa
tctctctctctctctctcaaaacaaatatatgcatatttacacagcacaataagccttgagctaaatagccaaatatagctatatatacactgttcaaacctcttaacttgttgtactataacagtcttcctattcccatggcagagcattattataccaaattcttctttctcatcatattctatgtttattacattcttttatcttctgaagctgctccttcaggctctcttgtcacaaaacttcctggctttgctggtacttttccatcaaaacattactcagggtaagtttctttacatatgtatatatcaacaaaagattgcatttttacaacaatatatgtaaatagataagttttggtatgtgggatttgcagatacataaacatagatgggaatccaagtggtaaaaacattttctattactttgtttcttctgagagaaacccaacaagtgatgcagtcgttttgtggttaaatggaggacctggttgctctagttttgatggttttgtctatgaacatggtacggtcattttggtacagtttgtagctttggtatctcagccattaatctttttagctctgttttctgtttcaaattcagatatgactgtactatttcaatgttgcattgttctgttcacaagacatactttctaaaagtctactttttactttatgcgtttttcattgtttaattaattaattaattaaaatggtatattttattactatgaggtttgtcaattattagagtagaacaagggaagaaagaaaagaagagaaaagaagtttctttttagatgggttgggttggggttagtttagatatagatagaacatgaagatagctaggctcttcttttttcaaaaaaattggtttaatttttttattaatttcatagaaaagctcctgtcttttccatttgttttatgtgcactagacaaaggctgtttttttgttttcattttttttcttgttttgaataaaattgtctatgtataagtaaagtgcgatgaaaaggaatgattcttcacttttcatattcatctatttaatagtgcactcatcttatatgtgtgccacatcatgccacatcatctaatctatgctttgtttgtcattattttactatttttcattcccaaatatcattttgagtagagattaatgatcttatttcattaacattatcaataattaataatgcaggaccattcagttttgaagttggaaaggcaaaaggaagcctgcccaagttacatctaaatccatttagttggtcgaaggtcaaaattattaagaatatatgcacggaaattattaatatttttcttattttagtttattctttatataaacaaaccacacaatttaattattccaggtttcaaatattatatatttggattctccaactggtgttggcttttcttattctaaagatccaaccaaatacacaactggagatctacaaactgcttctgatacacacacttttctcctcaaggtagttaattagttacttaagaatttagaaagaataattaaactgtaattaaaaataattttaatagatcaatcaacttttacatgctatttttactaccagtggtttgagcaattcccagagttcatttcaaacccattttacattgctggagaatcatatgctggaatatatgtgcccacacttgcttctgaaattgcaaaaggtattaattaaatacatttcttaagtttgtaatttgtaatttgtgggattttaaatttaagtttgtttctcttatgtataggaattaaaaatggagacaaacctgtcatcaatcttaaggtacatatctataaattgagggcaatcaatcgaattaaagaaaaaaaaaatagaactaattaaattgagctacttgattaattgttgtgagtagggttacatggtgggaaatggagtgactgacccatattttgatggcaatgctcttgtcccatttgcccatggtatggccctcatctcagatgaaatctatgaggtatgacttttttggttttttggtcacatgggcaaaatttcgattgtatttcacatcaaaagttacatgtttctggaattagactgattttagcacttcaaaagtttcatgttttcatatctatgaggtatgaaattatttgttattttctatttttttggtcacatggtttaattatatttttcacttcaaaagttgcatgctttcatatctatgaggtataaaattattgatttttttttttgttaatcttttgtgttttggtgtcatgggaaattgaaatttgaaaattttgattgtatttcacttcaaaagttagatactttctcatgtttatatttttggaattgactgattttaaaaccttgtgacaaataggcagccagagttgcttgtaaaggaaattactatgctaactatgatgaagccaattgcaaccagaaacttcagagagtaagccaggtatatacaaacatatatatatgtgatgaaatgaaaggaaaaagatgctaatatgtacatcattgtaatgagttgtctttttgttttttgatttgagggactaataggctattgatggactaaacatatacgacgtattggagccatgttaccacagtccagatactgccaaacaaaaggccaaaggaaactcaagcttaccactgagtttccagcaactgggaatgactgataagcctctcccagtcagaaaaaggatatttggacgtgcttggcctttcgaggcaccagtaagagatggcattgtccctttgtggcatacacttgctgcctcttctgctactacttcaagaatcactgttccctgttttgtaagtttatttacttctacctacttactttagcttacaacactttcagtaactgtaaaaatagaccatattttaatgtacattatcaaaacaaagttactgtacaagttcaacgggtcaaacacgctaacacgattcgaaacccgcataaaataaactagtttgggtttgcctttaaataggtttggatcatttttcgggttgacacggataattcgtttattaaacggatcgggttgacacacttaacccgaaaatgacacaataattacgtatataagagtatacactcttaaatttattatatttattgcatgtaaattatattcttagttaaatatgacataatcatgttaaattactcataaatgtgtcatagcgagattttaaacatgttaaacttgttataaacatgttaatgagttgataagttaaacaagtcagtcgggtcaacccatttataaacgggtcgggacgggttgggtttgctttttatagtttttgtcgatactaataaatggatggggtttgggtttgatagttgcttgtaatacttaagcttctacacgactcacgaacacgaattaaccccctaccccttactacatactattctactattctctctttttcacatgaatgaccacttgaatcttgattagctaagcttaaattgttttctttttttccttctttttttatgtattctcaaactcctcttattttctcatcaaaccaccaaaaatgcatgtatcatttagtagttttttctttcttttttgtctttgtccaagttttgtttttcttctgtattgctgtgttttgattagtcaagagtggtactttagagactaatgactctataatactattactgttgtttttggatgtttcgatgtgccaagtttcaggtcatgcattttctgtcccatgccaaagaaatgtcagcagaaaaaaaaaaacgaaacaaaatcacttacaagttgtggcctttaaagggtatcatccctttaaaaatgtatacattaatatatatttttattacaatttttcgaactgtaggatgatgaagttgcaacatcatggttgaataacaaagcagtaaggaaagctatacatgcagcaccagtaagagcttcacttatctgctacttttaagtaacttgttttacatactgtaagtttgaagttttaactttttgataattttgctaatgttattaggaaagtgtgagtggtccttgggatttatgtacaagcagaataagttataatcatgattctggaagtatgattccttaccacaaaaacctcacaatgcaaggttaccaagccctcattttcaggtgcttatataagtgcttccttttgtagtctatccatgtatatatatgaagagattttttatccaaattgaaaatattattagtgtttttttttaactattgtgcttttcgatggcagtggagaccatgatatgtgtgtgccatttactggaagccagtcatggacaagatcaattggatataagattatagacgagtggaggccttggatttccaattctcaagttgcagggtaacttttttttccgtttctttctcttttcatattcagcaatctcctctagccacttacttattactccttttatactattactcaccttcactcaatcataaaattgacatatatgcatttatatatatagtaagacaatatggacaacactatgtgctactttaaaatgaatgttcttattggttggttgcagatacgtacaagggtatgaccacaacctcacctatctcaccatcaaggtttgtatttatcccctaaaatgctttacacaagttttattttttcatcaagttctgaattca

SEQ ID NO: 25417 - DNA, 1903 bp, Cannabis sativa
cgtttaaagaaaaactcaaaaacaaacatagatgaaatcgaaaccccatataaaatttttttagaagacaattggggtaacatggaggagttttgtttgttgaggcaacaaaaaccaaagtgatagaataagaagaggaaaaacaagaagtgaaagaaaatgatggagttttttctgtgtttttgtgccaattggtgattttctagtttaccatgttatgaaaaaattgattggatcattttgtagttccttttaggggtggtaaaatggattttaatttgcacacaaattttatggattagagtcggttaaatttgatatggatagaaaacatatttacataatttgacacgaaataaaaatagaggaaacacgacaccaccagcttaatataaatgtgacacggtttttttaataaaataaaataaaaaattaattaaaataatataactatatcaaataatttttaaaatatatataaaaacaacttcaaccgcactaataacaaatcaatttaaagtggataaacacaaaaaatgacacgagaattagtattgagaaaattaaacataagttaaaagcaggtcaatagtcttgacacaaactataaaaataggtcaaataaaatatgacacaaacacgataacacgttttaccattcctacttctatttttttattgaattccctacttttatctatattctttataaacatcctcatacatccctttcgaattaatgcaatactataattatattttgtcaatatatatataaaaattgtatgttttccactttgtaactacagggccaatatagtactaattctatgttccccaataaaaaatgggcattattcaaaaaactatttttatcacttattttttgtgggattgatgggtccataagcataaaatgatcaaaacaaaagtgtggaatttattatggtaccaattaaattaaaatctttaattactattatatatgactgcttttttggatttggagggcgagtcgtgacactaatatatgtttcttctgtctcttttatttgtccaaatataggctgaagaattattctaatatgtttttgaccagaaagtctactatggttcacaaagttctataatagtagtagtttttgatatgtttgtagattcttaagaagattttgtcaagtgttttatcctaaaaaatacagcaagtgtttgatcacttacaacccctaaaaatcaccaaatatatatctatatgacatttgagttatgcataaatcaataaagaaagaactatttttattttagtcattgagctcaaatttacctacttccaattttagcactacttattgtctctcccacacttctcttttacaaaagtgttctttttcatttggggactaattttgtggagaagcaacaaaagtgaaaacccaaaagggaaaatatcaatatggtcataaagttattgtttctttttcctctctttgatgggaatttgatcaaagctctcccaaaaatttctcacgcgtattcatatatattttctcacatcaaaattgcaaagctcccaaatattccaaatcaaaactaaaagctttttatattcttataatatgttataaggatactattattactactattagaattgtttattggactacatctaatatttttagacttattcagatccgatccaattatatatattagatgttatattttattaaccaagatccaattattaatttcagtcatctaatcgattcaatacccaatgaatgttggattagattgattttatcaattagttatatttcatgaatatctattgatttaatttgagtttatctaatattttagacttagtatttagtggatcagatcggatccatccaat

SEQ ID NO: 25418 - DNA, 1283 bp, Cannabis sativa
tgttccaaaatagagttcatatttagtcaagacaaacatgtcacagtgagtaaaaactttaatcttttatgggtttcaaaccttcccaacttgacagatttgtacatcaagaacgtggaagatgatcagatcaagaaccttaagcagttgtatctagactgctgccctaagcttcaacatctcttcaccaatccagaccaactaccagaaagccttgagaagctccaagtcaagttctgtgacaagttggagaatttgtttaaatttgattcttttgaggataaagaattgaagaacttgaaggaattgcatctcctagaacttcctgagttgattggtgttgggattaagtttccttgtttgaaaaaggcaaaagtcaaaggttgcccaaagctagagcaatctaagttcataaatggccttggactggatataactaaaacaatcggacttactcatgtcatggaagatcctaaaactgggaagattactaaagagacaaccaagtatcggagatctgagggagaaacaagtcgtgcaaataagtaatttacttgtgtgcttggataggaaataagactatctgatggattgagtgtgtgaaaaataagtgaagatttggtgttattgggtgttttgaaagtgtgtgtgtgagacttgtgtgaaataagataagagtgtgatcattaccattggtttgctcaaagtgttttaatatttgttgtttgtgtaatatagttaggctagctaatttgtctagttcagtatttgggcatgatggaagtttggataattaatccaactaatcccatctgtctagaattatttatcccatttggcagggtgggataaataataccatattggtgaaaaaaaatttatcgtttttttttatattgattttgttaatacattttaaatttaataagaatttaaatgaaaggatttttataaatttatttatagatttttttataaaaaaaacttattcattaaaattactgaaaatatataatttcgaattattatatataagatttcaaaatttaaaataatattaattaaataataattacctaaattgattataaaaaaatatgataataaatatattcttcttaaattattagaaaatttatatcaatattttagaaaattaatatttctattaaattagtgattaaattattatttagcataaataattttgtattcttcaagtatttttgctttactattttaattatttatttaataaaaatatgataaattattttattata

SEQ ID NO: 25419 - DNA, 2768 bp, Cannabis sativa
tctcttgcttattttataaaatactaaatttataaaaagagaaataaaaactcttatgtcataaagtcatattatacttactataatcaccataataaataaaaaaaaatgctaacgataaaatataaatcaagtcttttggtgtctaatttagatatccctactaagtattatactgctattagtgtaatcaaatctaaaaaatcgctaactattcacaaactaccacttcatagtagtgatgcaggtgtccaataacaatgtttctaagtatacgagacgcccgattaagacaagacgaattattaagggattattattaaggaaacccttatagaatgaggcacttatgactcaaaacttgagccaacaaaataggtaagaacataaaagttttatcttttagtgtatccacaaaaccctccttttactagtcttaaatcacatttgtattgcttcttagctgtgttcaacggttacaatttcacaaaaaaacaaaacgaaaaaactaagaacaagaaatcttcagcaaagaatctgtctaccatcaaaagtagaaagaatatacacaaagcgattttcattcgaaatagaacgatggtttcgagcttaccttctttagaaatgtttctcggttgcttgtcaactgcgaaaacaaaatttaaaaatacctgaaagaagaaagaacacacacacagctgctacactttggcctcctcatgagtaaaagctctcttcggttttcgaatgaagatctcctgtatataataatgcctaacaattttgagtaactacttctcccaatatataatctttgaatatgaacacaacaataccagatccctgcttatgaaaaatgatatattatatatatatatatgccatgaaatgaagaaatttaataaaccctaacacagaataatgatgtgttgagaaaaacaatatgtgtacatagaaaggtggggcaagtctaaatgttaaaatgtacagaggagttaattcgatatgaaaaacaaaatcagacccgatctgcagcaataagttgaggcgggtttcacaacatacagacaaatgcacgtcttgaaatttaacaaaaaagatatagagctagctagcatggtaacatgaccgaaatggtatgtcgattgatgccactaatgtgaattcatttcatttgcatgagtagtaggagaaatgtttaatgatgatgacttgatatgaaatgggatggatgcatgcaacagctgcaagatgagtagtagtagtatttgtattttgtcgaagcataaggaacagagtacaccccgttcgagctagctactgatatgtcatagccggtggagctccattggcagcagcagccggtacacccattgggaagccatctttcctcttcccaaatggatttttcgaatatgtactcaggtgttaaggaaaagtatagaaaacaattgtaagatagataccaaaagatgaaagtaaatataagatcaaactcctcatgagatcgcattcacagtatagatttaagtctaactcccagttataaaaattacccaagtctaatttttaacgtttaagtgtcaagtcaatgaccacatggcaatttctgattggtctaggttattaaatttttattttttaattgataattcatttaaatataccaacaagaaaatgacacatgaatttatctgcaatcgagagttaaatttaaatatttacgccgcaagttactcaaaaagaaatattatgcagtgaacaagttaaaggatattgtattctcatgccaacagaacctgaactaggaatcactgcaccctgcaaattgtggtgcacatgggttgcagtgttcaaatcctgcaacgaagacagaaaccacatcgttacacaatagaaagataaacatgcaactaacaatcaaataacaagtttatagcagagaacagataatcgaaacttacttcaaactcgatgaaacagacagtatgccgctcctgtctcaagattttcatttgcttaaaacctggctgcctgtgtaccgaaatttatgacagaaaaaattaagattactaggttaccaaatgacacagataaaattagcagactttaaggaagcccgtacacgctgaacaagcctctcagttcttcttcgtttatgttctctccgagattgccaataaacaaagtattacatggtggattatcttttgtgttctgcaataaattggcaacaaaaagacatttatcaagaatgagaaagcaaactgattctctcaataaaccattcctgaaagaacaaccggaaagtctagtcgaggttaagaaaaacatggggacattaagaaaacaaagaagacagaggaagcagccgcagaagacagatggcatctacttttctctatgatcataaattcagaaatcaaattgcttttatttaagagttatattaacttcaataactttccaagatcaaagaagaaaggttagacgacgggcacatatgatcatcagttaaacaagaacaaaatattcgtcaaatctctatactatgcagtcatggtactattgacatataattcgctaaattatacaaccaattggaaaacatgtcccaaaagaccaacagaattttttttaatgaaagcagaaataaaacagagaatcacctgaacgggtacatagctgctaggtgctggcacaggagcgggagcagacattggtacgggaggaacaggatagcctccgtaaggatcaaaaggaggagg

SEQ ID NO: 25420 - DNA, 1645 bp, Cannabis sativa
ggtaaacacagtatcatctattctatcatgacatgtgattaaatttaaatttggacaagaagtagtggttaacaaagagagaacttgaaatatcatgtctctcaaccctaaaaattttaataccctaagaatccagtactaaaaaaattccaaatctatgtctgatactctgacttagaaggctttaaaaccccagatatcgattaaaagcaaattggcatttaagcaaacagtgtatattcaataaggtttaccaagagacaaaacttagcttctatcgcaaatgaaacaaagacttacacgttcaatggcttcccgctcctcaggggtgacagttacagactgtggcatgttcccagcaagctgcccaagtacgtttctggaatcatagaagcagcgcatctcacaattagtcaagataaatgaatggatgtttgcaaattatgtacataaaagaaagactcacccctctccaccttctacaggttcatttatcaagcgaagaaagtcggcctgatgctcctggattagcctcatgagatgaggattttgcttccctagttcttgaagcattggctgtcataggaagtcaatcatgacacaagagtctaaaaaataagagagagagaaaatcatatatcaaaaaagagaaaagaaacctgcaaaatttgtgggttagcttgcaccattgccctcaaagcgttgaactgagaaaataacacaaacaaaaaaaaaaagttagacaaatagtacacatatccaacagagagaagcttaatataaagtgtccaaatcttaatagagaaagagttacctgttggctgttccgtagaaaatctagggtcccagcactggcagcaccagttgcaccagagccaccaatgtttggaagtccctgtttaagacattcaaattagcatattattaaatcaaaacacttatgttagcacattacgatctcgaacgaaactgatcataaaacaaactcggtaactacctggggaaaaaggtctaaaggacttgcattaggcccggttgaaggggcagctgttggttgtactgactgcaaaggttgggatgaaggatctgtggctggtgcatttgcagggcttcgggccactggtggaatgtcagcttgctcaggaatgccctgattttgggtcatcaaggataacatcaaattgaaatattttattcaaaagcctaattaagcacaataaatttacatatgaacactgagatgagtaagaagaccccaggtttttatttgcagctacatcaaaaaaaaatattttctttcttactcctaatagtgtttggtaacgaatgtgacaacaatacaaactttcaaggaacaaaatgaaagataaagtatacaagttaatctgaatcatccatgctcatataatcaacaagattaacttcagaataagtgatcaaaatatattacttacagaatagagatattcaacagctctctcagggttgttgaaagcagcacgcaaagctcggataacagtatctctatcccaggttcctccacccatatccaaaatttgctgaattgttccttctaagctgtttccagcaacaaggttagatgctgcttggccatacacatcagcatctggcctgctcaatcaaa

SEQ ID NO: 25421 - DNA, 1907 bp, Cannabis sativa
cttttaattcaacaaattaaatttatagaaatagtgtattatattaattataaactaaatattgacttgtaattattttgttgagatgcaataaaattcagcttacttaccaaaaaaaataaaactaaatattgagtttaaataaaaattaattataattaatttaattatccattctaaaatatcgataatattcttacagcagtactgtaacttatagcaattgtcactagttagataataccactaaaatttgtatatcatatatacacagattataaatttattattatctgggctagctgtttctatttttcactcattttttttaaaaaaaatcaaataatttacatattatcaaaatcaagattcaaataattaactatatattttcttttttactagtataatttaacattttgaatagttattaattaatacagagaactgttcatatacagtatatatatatattttttattatattgatgatgattagttacatacatgcatgcattgactatacttgtaggtcaagtaacagcttctcaagaggaaaatccaggtttcgtggtgttgtaaagtaattattcatatttccatatctctctctatacatgtatatatatacacatacatattatacatatatttatacaaaattaagtaagttgatttggtacataacaggcatgcaaatagtgggaaatggcaagctagaaagggacctggcaaagagagcttcttgggaacttttggttaagtcattattaatattatataaatttttataattataaaatgaaacttaattatatataatacttattaacttaattaatcaaataattaagtgcagagagtgaagaagaagctgccatagcttttgatgttgcgagcattaagttgaaaggagacaaggccatcacaaatttcaacataaaaagctacaatgtcaaagctatattggatggaatgaaatcttcagttgatgatgatgatgagagtactacttctaatactttatcatcttcattaatggagggaaataataagagaaggaataagaagagaaacttgacatttcatgatcataccattaataatattctcgggaaccaaactgatcatgcagaatatttctcatcaggaataaacatggccaacatgttaagagaaaactcatcatcaccatcatcagcaaataatgatttgttaatgatgatgtcatcaagagaagaagatgggaaaagcttaagtttaggtttgggattgggattgggatttcaacactcaagttcaagtgcatttaaatcttataatggtggtgatgaagaatctgatgatccagtgactactacagtcttcaaaattatggggtcaagtgtttatttaccaccggacgatcatgatcatgatcatgatgagattgatggagcaattttcaatgatcatgttgttactaataagtctgagtttaatcatgctagttcaagttgctttaagccctttaagaaaccatgaagatgatggtcatattccccatgcatatccataaatacatatattactgttattgtttctttatttctttatctaaacttgaacttagtaggtagtagttatataattactacttaataattgtatttatatgttttgtggcatgaaagtaactagctaagctagctatactatccattttcatatgtgaaacttaaaaggacagtgtcaagtcaattgcttgttttgttttaagaaaagctttcgtaataagttatattttcttcaaaattatgcttctttattaaatatgttcaaatgcaagtaattatggaaccattgggccttaatgtggaatttccgaaaatgcttaagattttgaaaggaaaaagaatacacaatat

SEQ ID NO: 25422 - DNA, 1772 bp, Cannabis sativa
tcttaaaattttacaagatgtctcttaaagatctataatgtacatgagcatgagaaaaaatttaattaaaaatttatttcaaataccaaattagataagactacatcaatacatttcttttaagggctacattataaaattttcctatagcatatgcacaaatatatgtatctatatatatttggcttttcacttattacaatgccctaataatagaaaaatggttagtactattttggattatattttttataaaaattacctattagactctttattttattgaattacaaaataaacactgtattttttaaaatacgatcacgagctcaattttttttttaatataactaacttaaaaaaaaattctaacacgaacagatgtgaaaaaaatgtgatttataataatacttctaaatcgactaattattaaattttattttagtaaaaaaacaattcaaaatattatttagtactattttaaaaaacataaaatataatcattagtaatatgtgttaatgtaatgtacttctgccttaatgtcattggtgacctatcaatatattcatatttattatattatatattttttcttttttcaaaagaagaaaacccactgatctgctaacgtgcttaccgaacataattagatatgctcactaacttatcgtctttatttttatttattgtttattatatttttgtactattttcttttcttttagcttttgagcccactaaattagatatataatttactttagtgctaaaaaaaacttattaatttagtaagatatactgtcaaaaatatatgcaatatattataagtattaatatattatttctaataagttaataatttttacttaatttggttgataatatactaatatatacttacaaaaaagtatgtgtattgtgaagaatgtataatataagcaaatatgtattaatgtaagctccactaataattttgtaactaatatcattttattaggacgtgtgagcggattccacttaattatatatataatttgtgaagattaatcttaattattttttaaactaattaatacctttttatctttttttaataaaccatgcaattttgtcaatagtaattaactaaaataagtctctctttccagacatgattataattagattaaaaaaacgagtcaaataatcgcttgatagtttgataaaaacactaaaaataaaatcagataaaaaagactgaagtatcattaacattaagaaaacctatatccagttttatctagcgctcaaaagacacgacagtaaaattgttgcagcagattcattcaaccttataacttgagcactctactattgtgcaaggtgcgtaactgaactactaatagttgtttcagtcacgaaaaacttgttattctcaacaactaatagcgatttgatgacgagtcatcgaaataaagaaacaaaacaaaatcatgttacacagacaatactaaaatattaaaaccgtgtgagagagacaacaataaagcactcaaaagtaccatgttatagagataagagtaatcgcaattaataataaaaattgaatctcttactagctagagaaaaagacaacttcctgtagctatatttattttaagaataaaaacccttattttttttaattatactatatgtagcgtatatgaatccttttaatcaatacgcatgtatacttttagtttaatataactaataatatgatcaaccacaagcatccatctctccttct

SEQ ID NO: 25423 - DNA, 2724 bp, Cannabis sativa
  modified_base (1394)..(1395): a, c, t, g, unknown or other
ctaaaggtgtctagtgaagacaaggctttatgattatggaacaaactcagtaccatatacatgaagaagtccctggccaataagctatacttgaagaagagaatatacactcttagaatggatgaagggaaaaatttgaggaatcacttagatgaattcaacaaaatcactcttgatctcagcaacattggagtgaaattagaagaagaagaagaagaagatctagccattattctgctgagttctttgccaaaatcctatgagcactttgcttatgcaatgctctatggcaaagaaactcttacaatgttcgaagtcaagacagctctaaatttgaaggaaattaagaagaaaacagaggacaatcaaggtgacaatggagaaagcttatttgttagaggaaaatcacaaaagaaagatttcaataaccatgtgtatacttaaatggtacactctttcttcttctctatgttgatgacatattgttgatagggaaaagtaagagtgagattggagaaatgatgtcactattgaagtcttaattcaagatgaaagacctaggtgaagctaagaaattacaaggcattgaaattagaagaaacaaacctgaatctctgactttgacaataggaaactaccttagaaaggtactacagaagttcaaaatggacaactcaaaacctgtgtcaactcccttagatgcccatttcaaactgtccaaagaccaagctcccaagatagaacaagaaagagaagtcatgaactcagtactctatgctaatggggttggaagtttggtgtatgctatggtctgtacaaggttagacatagcatatgcaatgagcattattagcaggtttattgcaaaccctggagagaagcactgggatgcttttaagtaggttatgagatacatcaaaggcacttttgatctaggtcttacctacagcaaatgctacaaaacacgggttaatgtctcaaattatgtagactcagactatgcaggctacataggcacaagaagatctatcataggatatgtgttcacaatgcaaggaagatgtgtgagttggaaggtaaatctacaaaaggcgatagctctattcttaacagaagttgagtacatggcaactactaaggcaattgatgcatgtcgtatgccatatcaaatttaatatatatattttttttaattctaatatctccaattattttagtataattgtaagtaagggtcgatcccacgaggactatgtttattcaattattcacaaattagtaactagaattagagaagggattttgatgattagaataaaatagcaatgataaaaataaaaagaaaacaagtttaaagagagactatgatatgagaaactagttaaaggttattnnccaccctcaacaatcattcctaattcctattaataaatgtaatttcagtttccaatcaaactattaatcttgtagataaagctgaagtagtcaattatcctgatctccctattgtacgtaatcaaagcgaagcgcttaataattaactattttacctaagcagtaaatccatgaaacatgcaatttatttaacttagataaagctttaaaatttatggagatagactaatctaggcaacttacaaacattcattctaagggaatattttttcaattttttttcttaactcatacataaccaaatactatttttccacaaaatccacacaccgttaccaataccaaaaatcattcatagactatggtgtgaaaatggatgaataaggaaaagaaaacttttaggctcaaaggttattgtatagggtcaaaaagaaaaaaacaaagtttcaacatttaggctcaactttggtaaaactagggaattcacaaatagggtgggcttgaaaggttcaatcgatctaaaaaaattgtctatatcatatctcaaaattatatgtaattaatcgattttacctcaaatgattatcgaacaagttttagagtggctgagatgaaaaattaataattatccatgcacttatcttctcaaatattagcaaattttgataattcaattatcgtgatttttttttttttaaaaaaaaaaactaatcttgagcaatcattaaccacagttttttttttttttttaatgaattaaccacagttaagcacacaattcataggaatttatcatcttcctagcattatttttagatcaatttaaagtctcacaattgactcattacagttaactaaagacattgctcaaatttaatcacataaatagtcataatttgtgtgagctggctttgtatcttgttcaatgtatttgctatgtaagctctagtctctgtcttttacagagattgggcaatcatttcaccaagtctacacttcctccatctcccttttctctcgttctcattttcttgttttttgcttaagaactctgttttatagtcttttaggaggcaataattccttcttagcgtctggacgaggttcgctttctgagcccgacaacttcgcgtactcagaatgggcttgaggtcccatatctctatgcaatttgggcccatctccttggatgacttttatatgggctttaaccactcggtcttaggctggaaatgtcacgtggcggataagttggggtttggaatcacgaattgtatagggaaatttacatggtatactaatttttactatttttttacaaaaatactg

SEQ ID NO: 25424 - DNA, 1715 bp, Cannabis sativa
taataataataataatatcaatggaaacttaattaatagtagcttaccaaaccctaatattattaatcacgaggctaccactttattaacccatgatcaaaatgttctcattagccaacaacaacaagatgatcatcaactagggttaagtagtagtttcttccatgatttccaaaacatttcatgcaatgttattggggaaaccctaatctcgtccgaacagatgattcagcctcgtccggctgccactgccacgtcagccctaggcctcttgcttcaatcatctaagtttaaggagatgatggagatgacttcaacgggtaatgataattgcccgcctttgtcttcatctcctccaacgtcgtctgttttgctgcctgagtctgatgatcgtcacgatcatgtacaactctcttgcgcattttctgacgagatgcaagcatattatgaggatcaacaatgccaagattcttcgagcataagctttgtgaatggggatgatagcatattcagtgagctcaactcattcatgcagcctatgtttccctgcgatttcatttgattaattaattacgtacgattagagcctcaataaatgcatggagatcgcttaattatattttttataattattatttgttgttaatttattattttcaattgttaatatgcaatcgatcagttgagagattgacctagctatattggccaaattaataatataaggccttagagagaagggtatgaggattgtttacaagtgatcatcattctcatatgtttcactcttatgtagtcattattgtgggagagtttataggctagctaactcaatatttgggtcatttatattgtttgtagatgcatagagaaataagcaataatatgataatttatttctataaataataaacaagttctctccttgtgatgatcaattcaataaattaattccttcattttcttttctttatttatgaatcattcatattacatgtacgaaagaatatacgtaaagacatgaaaattaacaaatataattagcagattattggtaatatataattattatttataattatatgtgtattaattaaaaaaaataagtacatttaatatataatttctcattaacggagacattacaagaattatatgttttaatgaggacaaatatttcgtcagtggaggatgccttattcgtcagtaatgattatcaacagtgatgtcacttccaatttaatattttataagagtgtgattggaattcctcaatcactttcaattacacggttaaagtgtaattacatagtcagacaaacatgttaaattgtgtaattacctccaattacacacaaatcaaataacactgtaactctctaaatgtaccattataagcactccaaccttcttattctagttaattgaaaaaaaaaaacactttaccaatttaattgattattttaatgtagatggtagtacaataaagatgaattcctaagatgtttgtgtttttgcatctctcataatataccaattgacgttttacataattggcaaattatgaataatttatcgttcaaacaatttcttattacatgtataagaaaatataattatgcatgtaacaaaatatttaaagtttatttttaatactaaaaattattcaaaattttcattgcaaaaaaaagaaactaattaaaattttaaaaatt

SEQ ID NO: 25425 - DNA, 969 bp, Cannabis sativa
catttgtgaaattaaccctattatttataagagaaatactaagaaacattattagtgcctaatatatcgctaattatttacaaagtgtcactttgtgataatattaaatactactggtaactaatagcaatgctatatttataatgcaatgatgtgtatgatggtggtagagtatttaattaagattttatttttttttaaaagggattaagatttgtttagaggcattttttttttttggaatattaggtccatttttatagtcattataaattacatttttttttttaatatttcaaaaaataatgaaaaattcttttatagaaaatgcttgtaactttttgtcaagctcgcacatgtaatatttttgctacaaatcatcaaagaagtggaggacgtggttattggagattgagatattaaaatgatttcaaatagatatgaagaaatatattacattttattccatttaatataaagattatggaaatttaagtacaattaacttaattaaaaaaaataacccacccaataagttagtccattactaatatatttttatattttaattaattgtaataataagagaaataatataaattaaattaaaattcaaatcaaccactaaacaaaactttatcttaattatatttgggcccatgtaaggtcctctcatggggttttgggcttcaatggggagagtccaatgcaccgttaggcccatcatatttaagagacgaaaaaggaccgatcagcttaagaatgagatgatctgaagctctgaactactgagaattgagaaaaaggaagccatagccatagccatggaatcatcgtctctaacttcgttacctgaagaaactacagaacatcaacaacatcctcaatctctctccgcctttgcctccattccagctcgacctcccactcagtcagtactcaactcgatcaccttcctcacttttataa

SEQ ID NO: 25426 - DNA, 1512 bp, Cannabis sativa
  modified_base (1234)..(1246): a, c, t, g, unknown or other
tatacataattattagcttgtaactagtacaatttggttacttattttgcgtctctaggtgtgtacgcagataataccttcttaaacaattttgctgttaaacattaatggtcaactcagcaatatataatggttaccccaagtatagctagtgacaatcacgtacttaaggaaaaaaatatataaaatatacaaatatggaattagcacatacattatatattgtaataagaggtaagcagtacgcgtttagaaagaaaaaaaaatcttgtggtttttaattaattgactcgaataaataagtcacattgaaacttagaatagttacggttcctctcatctaggtgtcaaaggaaaaaacaacttgctctgaatattaacaaaaatcatatacaagctacttgtttagtaataaaaaaagaaaaggagagggcattgactagactctagaggaattctaaagacaaatatacataaatatatgtatatataatgtgtgtctgtgtcagtccaaaatccaaatccgggtgcttcgttaatcattcaaaaaacctagctagcctcaagttaataagacgatgtccccagtggggaaaatttaataattaataatgtctaaatctatagggaagtcaatttaattcattgtacgtttatatgtgtggaaacatgtatatttaattggtttaaacatattcccataatcactgcaaaaaattaggtacgttttaggtaataataaaccacggcttgaattaaggcaagtaggcttaatagtggtagttatactccatgctactgtatataggtttggtacattcaccatcgaactcctcacattttatacatccttatttcttctgtgttcttattcccacaatatatattcaccgtagatgtatatttattccattttataaaccctatttttaattattattaatatcaacattaatttattttcttcttttttttttttgttgcataaaagatatattaatttattttcctacattatacgcactcaaagtaatttaaacttagtttataattgcatgcaaggtcattgatcgattgagattgagtcaattaatatgtaaatgggtattgcataaggaaaggaaccatgcaaatggccttaaataaaagagtattgctattaggcaccagtggtgcctaacaccttcttgatatgtcgcgttgcaattggctagcgatactccctaaaagctannnnnnnnnnnnntatgggacccgatacttaattggaccaatagtgatattgacacattggagagtgctaggcaccactagtgccgtttagcatttctctaaataaataataatcaatagttatagtcaagtcaaccgcccaatattctgtcatgaccatacgtgcacgaagaaaggaggggataaaggggccaataaggttacgaagttgtaaataatattaatcttttctctttttcttttttggggcgtaagacaaagtaatgaaacatacaaata

SEQ ID NO: 25427 - DNA, 4273 bp, Cannabis sativa
  modified_base (4063)..(4063): a, c, t, g, unknown or other
cttctctaatcgaaaacctcggtcaacaataactgtgaacaattaatagccaataaagtttaaaaaaaaagtcatttttaaagtatttggatattaattaaaaaactatgtccttcatgaataaattaaaaaatattttaatttagaaaatagctttctcaaaatttaatttagaaaaactgcaaattttagcttctctcaattttttattttattttattttatcgaaactcttccaaaagaacctttttaatctcaaaatttaaaaaagagcctgaaaaaacttagccaacaaaactaaaattaatgtaaaattaagaaaccacactttgtcgagaaaataatgtcacatacatataagcaaaaggacacgtaactacttgaggctagttcaagtggtcataggtgggtgtgtgtgtcttggaggtcttgggttattcaaacgcttaaatcaaaaaaaaaaaaaagcaaaaggacacgtagttacaaatacgtactcttttatcttttatggaaagttgagaaaactaagttagacctaattcattgtcctaaaaaatatacgaaaaaggagattcatttggttttagctttccaaacatgcatgtatattatgtatgggcacaaagtagtgaatgcattatcaaataaaggttcattaggtttgtctcttatactcttgaatgacactttatgtgtggatactatataatcaactcaaattgggtaaattgattatatcgacagagttgctttacttaagataacgaaatataattagaactagcaatatattttatattttaataggagcaattatatattgtagaaaaactataactaatctgtagaattaaaataattaaaatttaatcaacaaataattatgataagattaataagttacaaataataattgaggattaaaataaggatgaatactgtattaaaacataaacaattaaagtagtaaaataataaaatcaacactaagatatatactagttcaaattctatagatttatgatctatgtctctactccagttttggaacaccaccaagttttctctattgattgagcaagaacaggatacaatacagtcgagatcgattctttgttggatccactcaaagtgttaatctctcacactcttacccaaaaatcttcttcatctacagaaagattcttcatacaaaactcaaacacaatctctctcttttctttgtacctctcaatctttctctctcaaaattacctcttgaaacccgtatgaactcattctcttaaaaaagataagtgtggtggtacttatagatttgggatatggattccaaagtcgttgactgcaaatgccaaattgttaagttagttacgacttaatgaacttaacaaactcattgtgataatatctttacgtcagtttaagttgtgcttccggaagagatgtacacttcctgaaagaaagaccaaagcacgctgaagggactttccgaataggacagtcaacagttagagtcaactatcgggactccattctaggagggaacaactaaccatcttgaactctttctcgggggaatactagctttcttgaagactccttccagagtggacaagatagactttcgagaacaccttttcggaggatatctaaccttccacgagacttcttctggatggacaagttagacttttgggaacgtccttccggatttcatctaactagaacaacttttggagatcttttcatttggaggaactgtactacaaatccaacctagtttcttcaaattaaaatatgatgatgataaagaaagaagtgatcatggttggtgttccagatatctcagtatactaacttctgagattaatcaagtccaagcaatgcttaaacttgtttactgttaagaccttagtcccaacatcaacaggattatcttctgttcatttggaggaactatactacaaatccaacctagtttcttcaaattaaaatatgatgatgatgaagaaagaagtgatcatggttggtgttccagatatctcagtatactgacttctgagattaatcaagtccaagcaatgcttaaacttgtttactgttaagaccttagtcccaacatcaacaggattatcttctgatcttttctaattcaaccaattcttcttctatcttctccctaatccaataaagtcttatatcgatatgtttgctcttttcatgataaatcgagttcttgtaaagatgaatggatgactaacgttctgagtacacagtcactcctcctcttaattatttaaattcaaacaaaattctctgaaaccatagagcttccttaaatgcttccatcatagccataaattctacttccatggtggaaagatgaaccacagactataactagaccttccaacatatacaattttggtttgtcatgaataagtaggaagtggttaattttctatatctttgtttgacgcttagtcagggtccacgaacgctttcaacttcagttctccttattctttctcataagtcagaccataatctcaagtgccctttaagtaccttaataactatttaagggccttctaatgttcaatacccgagttggacatgaactgacttaggatgcttagatcatgagctatgttcggtttggtgctcaccattatatatatcagacatcctaaaaccactgcatagggtatatccttcattttctccaactctttcgcactgtttggacattgttccttccacaggacaaattgtctgcctaatggtacaaaagtactctttgcatcttccatgttgaacttctgaataactttcttgatgtacctagactgcttcaagctcgttgtctcttccttctttttccttaaaacttcaataccaagtatcttttgaactggtccaagctctttcatctcaaattctctcttgagcttggctttgatacttttcatcactaattggtcgttgctcattatgagcatgtcacccacatagagcaaaagaacacaactgtagaatgcactagattcttgaaatataagcagtaatcatatgatgattgtttgaactcaatttgttggatataagtatcaaatatgtttttccattgtcttaggggttgtttcaaaccatataaggagttggtgagcttgcatactaattcaactcccttaccttccacttgagactcaggtggttgcttcatgtagatctcttcatccaagaatccattcaaaaaagcaatcttaaaatcaagttgttcaacttcaaactccatttgatcaatcttatcatcttatactttactacatgtgagaagatttttatgtagtcaattattttcacctgagtaaagcccttagccactaacctgactttgaaccgtactggtttattcttattgattccctctttcaccttgagaattcatttgcactccataatctttttgtaacgccctaaataattaggcacgctacccaaaatatttatgaaaccctaatcccctaaatgggattactaatcaaaatggcgtggaatttaaacttttataataaacagaattaaaataaaacttgtaatattttaaactttacaacagttgggatcccaaaaatatttacaaactttattacaagtctttttctttcaaccgacctaagcgacaaaatagagtatcaaaaacacatcacaggtagaccccaacccgcttggtctgatgtggcccggacataggggtggcaattcgtgttcgcgggtcgtgttcgtgtcgtgtcgagacccgtgtataacaggtacatgcttgacccgaacacgacccgtttaataaaaaaaatgaaaaacctgaacacgacccgtttataagtatattttgtttaaacatgtcgattaataacacgtttatgaagtatttaacacgtttataacccatttatgacacgttaaagtactaaaataactttaaataggtcattaacgggtcaatatcgtgttagccgtgtcaacccgaacacgacccgtttattaaacgggttatacnagtcaacctgaacacgacccgaacccatttaaaacaaacccaaacccgataactctcgtgcgggtttcgagtcgtgtcatcgtgtctgacccgtttttccggtcctacccggacatgtacattcttcgcccagctcctgcactcatggttgatcagctaaagtcttaccctttcctgcatagtagagcacccgtgagccaagcccagcaa

SEQ ID NO: 25428 - DNA, 3845 bp, Cannabis sativa
tctctctctctctctctcttcccagttcgcaatgtcaccgtcaacccatctctccagcggtctgagtttctccgatgcagcctgcaataacttctaattctgcggccactgataactctcttcctttctctcttatttgttttcatgtgcaatttagattgttcccttcaaaattggagtgagaaattattccttgttattttatttctcatttcaaaatagaggttacaattttaatggaggttcagccgatttttttttggtagatgggtgactgggtgttggacattttgctggttttattgatatcgtgggtggttcagcagttttttttttaaaagtaaattaatcaatacaagttgtttgtctctttaatttttaatttttgaggatttttgagatttggagtgataaacggaagaaaattgtaggagttaatttgacttaaaaaaaattggccggtttgggcgagttaacctgatcaaactgcctaaaccgttggtcggtttacaatttttttttttttaaaattgggcgggttgtacttaaattttaacaatccgaactttagattgggttagaaaatatataggataaactgtccaaaccgaacgatgtacaaccttacatataagtagtctaattaaccggctaacatcttaaatttactaagagtttaataatttaaaatattttattgataaatttaaacttaaacaattaaatacgaataaaattaataaaagttaaccgccataaactctaagataaaacagtgcatttgatttgtttttccttttattaagaagaactttcacacataattttgttttattaaaaagaaaatcttactcttttgtcgtttaccgaagtcccctagttgacagtaaagcctccacactcaacattttgacacgtcaatgacccagctggcagcataccattaccaacccttgtctaaatgtctaaacaatttaggctttatagtatactattacaattacaatagagagagaaaagagatatatattcctcaatcccctccgaaataaattgaaaaataataaaattaaaaaataaacacagtggtggactgctataccagctaagcattcattattattttatctcagccagaataaaaattattaattattaaaataaaaacaaacaaaaatatatgatttctattagctctcccttttatccctatttgcagatccaaatgaagaaacctaaactagataaatttacttccaaaaataaaaataaaaaataattatagtaagctcatcaacaatttatttaaatttattcagcaaaaaaaaaaagaagaagaaaacaatttatttaaatttgaactgaaaccttactatggagttcttctctaatgaaaccctaccctaccatgtatagtttatttagtattataaaacaattttattctttttttttttcctttttgctttaaagaaaaaaaaattcagctttttttttttttggtcgttctgggtcccaaccttctttcccattttgtaccttgaatttgaagccaaaccatttcgtttctctcattctctgtgactctactctgtttgggaatccctagaagaagaattaaggaggggggaaatggcgacaagaggtagtagatcagagaaggtgaagaggatttttcagcaatttgatacgaaccatgatggagggcttaatagggaagagatggctgcgcttgttgttgctgtaaaccctagggtcaaattcagcgatgagcagatcaatgccattcttgacgaggtgtttcggacctatggtgagtttattgatggagagacgggcctcacttatgagggactcttgcgaacatacgacgatggtgctggtgatgttgaccgtgacttcgacgcgcttgggcttgagctcaattttgacgagtccaaaggggtttcgattgcgtctgaggcctcgtcctcttcgataattgacgaacgggttgtggagtcgcagaagaagcagaggacggcggcctgggcggtgtcgccgaatcacggcatcgtgttcgacgatacgtggaagattgtggacgatttggagattttgataaagagattgaaggccaagcaggccaaggatgggaaattgaaagcggacaacttcgacgcgtattctgatgcgggctggtccagggaattgggaccttctgctgagattgcggagaagagagtgttttgggaagagtctgggcatgactatgctgtctttgttaaggacttgggtgttttgaggaccagagctgatggagccaggtcgagggaagaagcttttgatgggcacatggcgattgggagggtcttgtatgagcatcagttgttcaaggaggctctagtgagcttcaagagggcttgtgagttgcaaccaatcgatgttaggccacattttagagctgggaattgcttgtatgttctgtgcaagtataaggaggcaaaagaggagttcttgttggcactcgaggctgctgagacaggtggaaaccagtgggcatatttgcttcctcagatttacgttaatcttgggattgcgcttgaaggtgaaggtatggttttaagtgcttgtgagtattatagggaagctgcaattctttgtccaacacattttagagcattgaaactcttgggtagtgctctttttggggttggagagtatagggcggccgtgaaggccttggaagaggcaatatttatgaaaccagactatgccgatgcgcattgtgatttggcttctgctttgcatgccatcaatgaggatgagagggcaattgaggtgtttcagaaggccattgatttaaagcccggtcatgtggatgccttgtacaatttgggtgggctgtacatggatatgggtaggtttccgagagcttccgagatgtatactagggttttagctgtatggccaaaccattggcgggcacagctcaacaaggctgtgtccttgttgggagctggggaaactgaggaggctagaaaggctttgaaggatgcattaaaaatgacaaacagggttgaattgcatgatgcaatatctcatttgaagcagctgcagaagaagaagatgaagccaaacggggcagcaaatggagaaggggattttgtcattgtggaaccctcaaaatttaagactgttggggagaggacgaccttgaggcaggagttatccactgcccttgagattagagcttttcaaaagatcaccagattgagtcgctgtgatgtggagctcctgaagaaggaaatgagtgataaagatgtgccattgtcctattctggtggtggtgttcctgagagatccatacgcaagcccaacttggaagaaatacttcgcagattattgaattttctaaagcctgagacctttcagggggctgttaaagccataaacgaaagattactatcttgcttggatgatacgggcacaggcagggtggatttaggcatgttctatgctgttttagctcccatttgcagcggccctccagaaaagcgtaaacgaattgctttcgatgcgcttttgtggcgtcctgtgaatgaaggtggttctcagctaagaaaagtagatgctactagatacatcaaattgctaaggtctatctatcttccttcttatggatcaagtgaaattatggaattccacggagaaacagatgcttcaatggtgtctttctcagagttcctttccatgtttgacgatgcagattggggttttggtataatgtcaacattgttgaagcttgaagctggggacagaaaccgccatggtaaccatatctgctctgtttgccgctatccgat

SEQ ID NO: 25429 - DNA, 2056 bp, Cannabis sativa
ttttttttttttttatgaaatagactgctgaaaaaatcttacggtgtgctctatactggcccactttattcaaagactaacaatttctgtcgatcttgtgaaaggtgccaaaaattaggtgcactgtcctaacgacacatgatgccattgaacccaatgcttataataatattcgactgtgggggaatgattttacgagatcatttttgccttcttctggctacctttacattctcctcgctatagactatgtctctaagtgggttgaggtcgttcgttgtcgacatgcagataacacaattgttgtgaaattcttaaaagaatgtgttgtctcattttggcacatcacgggttattattagtgatcaaggatcacatttttgcaactactcttttgagcatttgatgcaaaagtacggtgtacttcataaagttgcattgccttatcatccacaaacaaatggccagactgagttagctaatcgtgaaattaagcaagtcctagaaaagacagtaaaccctgactgcaaagattggtcttcgagacttcttgatgttctttgggcataccgcactgcttacaaaactcggctaggcatgtcttcttatagaatagtctatagcaaggcttgccatctgtttgttgaattggatcataaagcatactgggttataaaaaacctaaattttgatctcaatgcggcaggccttaattgtaagccttacttgtcagaaattaaggaattaaggaatggtgcttatgacaactttaggttctacaaggctaaattgaaagcggctcatgataagcaaattctaaggaaggaatttgagccaaatcagtgagtgtatctttatcacactcacttgcatctccaccttgggaagctgagatcctagtggattgggccatatgttgtgaaaattgtcttccccacggtgttgttgaggtcaaagacccaactgataagaagaaattcaaagtgaatggccaaatactgaaacactacatagagaggttgccccagcctattgagtatatcatcgtgactcaagtgtaccaaccctgagtaatgtttttctaattttgtatataggtttgttctcttttttctttttatttttgtcattttattttgttatttgttatcattttgttagattttatgtttagaggatcaatatcgatgccaccatggttgctcgctctccaggtgttctcttttccaattatttttgaatttctatatttttagaaattgaggacactgtctaactttagctgcgggtggtaaacatattcaagcattaaaatttgcattttgtcatattaatacttttatagtcaatttttttttaaattgctcatttatgcttgtaaaatcttatttttaagtcaatttttgctatttttttttcttacttagaatatttttagagttataaatgcacatgccagaatttatggtaaaatgattcttagcacatatttgtttataaaatatttcaagtttaaatgttcatattaacgagatttgagaaaataacttttgaatttgtattgatgcttagaaatcgttataattattttggacatggtactagggtttgattgaatggtgctttaagtgataaattttttatagaaattttttattaagcagcgtttatgtaattattttgtttttgaaaaaaaatacaagagcaacattttttatcaatttatctaatatgttgcatcttgttaaaaaaacacaagaacaacaattctatcaatttatctaatatgttgcctcttgttaacaaaaaaaaaaaaaaaaaaagtttgtgttatttaatttttcatttgttttggctcttaaaataaatgtaaaagattgtttgtttttgttaaaaaatcccgagaagctggtttgtggtactatctatggtggtttgtccaaataattcataatttatctttgtttcaatatttctctatatgtttgtcctaaaactaatctatccatttgagtgtccactttcaaatttttaactccatgagtgaataccttag

SEQ ID NO: 25430 - DNA, 1630 bp, Cannabis sativa
agatactctgtgaacttgcttgcaaaataatcaagaaaagattagtaacaaataataatcaaatatttgtttatcatcaaaataaatgagtgaatgaattttggtcaacagattgatgcaaggctatcatcctagtagaaaacaccatcctttccattacacgcaaaacttatgaccaaacctaaaaccatgctctgcttcaagaatctcaatatttaattgaggagctttgagaacagttacaagcccaacgaataatgtaccaaggcaagatttccaggcacttcaattctaaatttaagagccaggcattcgaagttgtagatcatatcttaaggagggtattcccatcttctcaagaaccataagtgggggtcttaggaccaaactgggaatgatcctatgaaatccaatataaagtgggtaacagtacctaccaacttaaaaaaatgatggatcaaaaattcgatgagccaggattgcggatcacctacgtcgatactatcactaaactaggggtgtctagatccaaatattttctttctgttgaactgtattttttttgtaatttttcttcttaaatgtaccctttcaagcataatcaaatgaaattagaataactataccaaaacatgcattttattttcggcttcaagcttcatttcaaacaagtgactaggaatttggagacgcccgaattctcagctcactttggggtagtatatacagctatgtgcccctaaaaatatataatttcccttttatcatttaaattctgcccatttgaattctgtcattagtttcctcatcgaaacttatgaaaccttaggtgtagaaaactttgcgtaaaatttgtaacattttcagcttttttcttaccatgtgcaaaataattttcacaaccatatacctaaacaacttggagaagaaagatttgcatttgatcttcaacgctttcagctgctctcttatcacattttgtgaaaggtaaatatgttgtgaatcaagtcagctttgttaattaaaattgtggaaatgaaaatattgcctaaacttcgatgcattttcaaccttttttctttctagtttaattaaccaaccttgttgcatgcacaaattaatattatgtttagtgcaaaaaataaagctatgcctggaacacgaaagcctagcctcttaggagaaagacactttatcactacatttagatttaatattgcactcaaactgttaatttatgtaccaaaaaggaattgacccagtgaaaccctaagggcctaggaataaacttaagatcctattacactactataaaatttaattggataaattctatatgtgccataaaagggccctaattctgataaaatgtaacatctagaagaagaacttattttttgacacttccaaagcttaacaagtggcttaggatcaaccctaagaaatgttcaaggttcaatgctctggccgctggaactagcagcttaaagcatcctaaaataacctaataaatggctaaccaacaagcaaaagataaaggctaaaacaacatgcataaaaaggaaaagagtgaaagaagatatgtaatatcctgataagcctaatagtaaataatatggtttatatttat

SEQ ID NO: 25431 - DNA, 2563 bp, Cannabis sativa
  modified_base (889)..(892): a, c, t, g, unknown or other
  modified_base (2536)..(2536): a, c, t, g, unknown or other
actccacataaagaaagtatctttattttgcctaaaaatccaaatctcttttacaactctaactccacatgtacaatgatgctgttagagccaagcccttatataaagtttgtcaatttaaaggaatcgaatgaagaagaagacccaaataaaaaagtaaacttagatataaatcataaatgtaaaatttagactattctcgtacaccaaatgagaaatatcattaaaaaacagagaattgaaaatctcaaacaaataaatatgatagttttcagtaccaaaacagttgaaaagaataaagactaatatggcaacgttaaatttcaacttccttaaattgataaataaaaggggacaagagagaagaagaagaaaaaccaacctgtaggaaagtgaaaagaagtgttgttgttgttaggtcttctggtgtgagctctagctgatgctgcagatatcttcctatttgctccttcagccatcttcaccaactagtttagtagtactcactgactcactggtagatacacaacatcaaagaagagaaagtctttccattcatgtatttataaataataaataaaaaaaaaagtactacagagtacagagagagattcatgtctgcagctacagaggatctgtaccttgacatgtgatagattagagacttttcagatttttttcttttcagattatttttttttagaaagagcaaatatcttttcttgactttactttgttttgttagaaaaaaaaaaaaaatcggtaaatattattttgaattctatattttgtaaaaattattaattggatattttattttgttaaatgataaaataaaccctgtattttttaaaattatacaaataagactctaaactgattttttatnnnnataaaacttaataataatctaatccaaaaatgttatggcaatattaattatattttctgcatctgtttgtgttagaaattgtcttaaagttaattatattaaaaaataaaattgttgaaaattgagctcaatatcctatttttattattttgaaaaaatataggatttattttgttatttaacaacacaaatgatctaattggtaacttttgcaaaacacagaatgcaaaataatatttttcaaaaaaaaaaaaattgaacgcgtggaatgtaatatcacatagatgattgctaaaaagattcactattttatattgtaatgaaggagatgtgtaatgaatatagttacaattatattcttactatcataaatttattgattgatgattaataaaatataaataattattaattaatactaagtttttttgttattttgaaagaattaatactaagttacactaaatgccacaactattggttgggaaaatggacaacaaaaacaccttaattttagatatttagtacaaaatatgcaccacaatattaccttaaattcacgaagagtaataatatgtgttaaaatattacacccaataatgttacaatattatttattttgttttgttttagataaaatcagttattataaattaaggtgagtcatttacaatactaaaaaaataataaaaattatcttctctaactagatacaattgtccaacactaaaatttatttatctaatttataagcgacttagttagcattttgaatgaaaggataattgatttgtaatatcttagttagcatcttgaaatgaatgataaccaagtatctcgtttaaatgggcaaattttaggatattgaattattgtaggtgcttgatgggttatagtatgcttatggtataatatagtctaaaataatttttcatctaccttttacctaaaattacattacaaccgtgaaagtctttttgattccaagtaagaatttttgacattagtagagagaagtaagttatgcaagcatattgatcattgggttatggaaagttggaaaaagtaaaatttttatgatgttatccaaataaaaaattttaatttgcatatatacactattcttcaaagaaagtatttgaattaattgttagagtattagaattaaaaatttgattaattaattaattgaagctctagaggtggcagggtagtataaaaattggaggcttaattaattgtttgttggtctagtttgttttcttagttttagtcttactcgaggacgagtaaggatttagtttgagggaatttgttaaactatttttagcctctttattggatcatttttagagttcattttcttcttcattgtcaccttttggaacataattacacttgttttctttgtttcaggttttgacacttagaatatataaattagtcaaatttcaaaaaacagtgatctataagaaagcaaaaattttgcaacaaaataaaactgaaacttcaagcctaaattttactatgttctgatcaaatatgaaaataacacaaaataatttaataatttaaaaataaataacacaaaataatttaaaccagttataattaaaatataaccggttttgtaacataatgaanaaaaataaataacacaaaataatttaa

SEQ ID NO: 25432 - DNA, 2481 bp, Cannabis sativa
gtaagttagcatcagttgagatgattttctatacccaattgaccactacataaaaaaagagaaagagatacttaaggactttataattgtttattttcctattagtttttcattttccgaaagacacaacaatttatcgctctaatcattgtagaggcaaaaacctggtttgaaagtggtgcaggtgaatctggggccctcccatcaaaccttctgtggttaacagcaagtttagttaacttggccatagtcttgtctctctgatttgaatatgattgcgatacacctctgtcaacacagagatacacagtgagaggaagaaatcaccacccaattgttttcagttacaaattattgaattacattgctaatagcacttaaggatttcatgagtaataatgttttagttaagactttataaagcaattcagtctaaaagcacaatcatttggatcagatagaactaataacaatgcttccaaccaaaggatgtacgccttacccattagaactgttgcaagctctccctaactgaactggtaatagttttggattcctgaacctaggtgagttttctaaccagtgaccagtgctagttcagtacatatgatggatgaaacaatttttcttttggattcttccaagctacctaatcaatagggtgatactgagaaagaatgaaagatactcatttattcaatttacacacattcatatacatatacatatacatattttgctttttcctttaatcagtttaggtggaaaatatatcaaattgtagaagaaatgagagtaccggccaagatgcttcaatctcctatctgttgatgctcgggaaagagcttctttagggcttgatgccaaatcatcatctatgctgagttttgtctttaaatcatctggcaaagcctgtagactaaacatgttagaacctctcactcatccagaagttgcacagtacaccgttcccaataagagtcataccataacatcatttacaagtttctccagctgaatctgttcaatataagtacgaggaacatatgtaccatccaagcccagctgctccgcaacaaatttaacatataaccgatctttgccttgcaccttcatatccattctagaaagttagtacaatgcttcttaaaattcacctaataataagacattgacatgaaaaattatgtagcatgattgccaaagcaagtagtgaactgcccaaccaagtccgtgagagcaacactcaagtctctctggtgtaattccatgaaaaacaaaactaaataaataaagtttcatgttggccagcatattaggagagaagttgatatatcaccattggagatagtatgtcacaaagtttgaagcactcgcatgaatatgtcaaagtcatgtgtaatttctcttccagcaaagaagggaaaatgctaataagtaccaacaattataatttcccaattaacagttatacaatagcttaaatacttaaacttcttgatatgctatcatacaaaagtaaagtcaagatatgaacaagtaaatatatggcatgcttgtgaagtctaatattttccgatcagaaatgcatttaataacctcaagtaaaaaatgaataatttcatctaaatgtccaacaataatattccttaaggtaaataatactgaagatgtataaataaatgtatttatatatatataaaatagataaaaggatttaaaatcaaaatctgaatgccaaagctagtagaatacctgaacatattgacgattaagttgctccaaccaatccgttttaacagaaactctatcatcgcagaagatatgactgcttcttttcaggatgcttgcaattgtatatcccaatgccataagtcccccaagaaggcgcacactaacttcaaaagttattcgaggagaaattatgaatggactatccgtaacccattcctgtttagagcgaaagaagagaggctaacaggttaaaaatctttctgttatttgaacttctctctaaagattattcataaatctccaagtaaaatcttgatacacgaatcctgccttgtagtaagtcacatatcaaaagatcctagataaattaaattttgaaagtagcttgcctttcttaggaaatttcaattccaatctctacccaaaacaaaagaaaaaagaactcgtttttcatatttagcctaaacatacactccctgctagttttctaacaaagaaaataataggaagaaagaccattgatgaggataagtacaaaatttagtttcattacttgaaaaagagacttgtattgaaaggagaaaaagtgaacaacaataatataaatatgtatacatgtattaaaaaacggcttcttgcctaacccattagacagcctgaagtatctaagtatagagtttctgcatggaataatgaactcactagtacttaaccaatttaacattgacatgtacagacgttcttaaa

SEQ ID NO: 25433 - DNA, 2229 bp, Cannabis sativa
aaaaaataaattaagtgtaaaacttgtcaaatgacatcatgcatgctagtaaagtgtgtaagaagtatttgtataaataaaattctataaaaagtaaaaaaaaaaagtagtaggagccctgtaggggtattggtgtaatattgtttaatttttgtatttttgatgtagattttcataatttatattaattaatattaatagtaaagaaacaaaacatgtctcaaaactaaatttataatcgtaacatatttaaatttttttccttcaattctttaaactaactatgtaaggaattattcattgaaaaacatatatagaaatttactttacttgtggttaagctataattttgaatttactttcattactgttgacctcaaaaagtgatcaaccaatagtggggtcgtatagatttgatgcttgtcatgtgttacacaaataaaaataaaaagcaataaacacagagatttattatagaggtcagcccccatgtaacaacaggtaatggcatactccccttttgatgtattgatacctagttaatactactgagatcactataggtgggatctgctatagctctctataaggatacaaaacaggaatcagtaggtagatctctaatgagagagatgaacagtcttagaggactgtgagagatgaagtgagaagagagaaagagagccctattgggcgtgaacgagacagagagaagagagaatatggccttaagacttagagctatttggaggctaagtgacttagcattctaagctagggttaaggcctttatataggaggcctaaaccctcgactacaagtttaaatactagatatttacatagtttgttataattacaaaagactaaagggcccttgaatctagatattattcagccattctattgggcttttagggcaaaattcgcagcccatatctgttgtccacgtgtagagctgtccagcaaagcctgtagtgtactccttggtcgaccaggctcctatgatggccaagttggttggccagggtgttgtcccaaggttggccagctcctgagagggagctagtctatctcttgatccttgtttgagtgtcggggtcttcgtttgctcaggtgttgacttggccttccttttagtgagttgtactaccacgtgccactggttctgtccacataagcatgccatgtcatgaggaaaaaaattgggataatattttcccccccaagtccatgtgcagacgtcaggtcggatagggacttattagctctcgtcttgtatgtagtagtctctgttgtgtagccttgtttggccaagtatcggctttttgcatggcctacttttggatatttgatcttctctctttatatacatatcatcctctcttctcggatatctcttcttcgtaatcgccattaacaagtttccagctttttaagcttttcgaaactttaatattcacatgttagtttgtgtattgatcctcgtgacaattttagaatgtgtaatgagtggcttttttacagaaaggattcgattttggcctttgctatgattcttgactcttcgagttataaagaatatgaggctcatattcatgttttgaaagaaaaacacacattgagattcaaaacttaccttggtcggtccaggcgatcttgcttgagacctagccggccctaaggattaatcatgggagttggccagctttagggttttaccctataaagcttgccttttcatgtcttcgtttggtggcactagccttggctagtcatgggaccctggctaaccctttcaaggcttgagaaccttggccagcatcagccttcgttccaagtcggtagccagttttctatcctcttatgacttccataggagtttggctctgtaggcatttacaaccttagtcatgcgtggtttccttagaaactttgttcaacttaagactcaacatgacttggtttctagcaaggccatgtcctcatgcatgcaaaccgttctcatatctggccttagggctttcatgttcttgctttagcctataggctctctatttttgaacactactattatttagccttaaagccatctatgacggacatatgatcgtcctggctatctttttatggccttcataggtaagggtctgaatttactttgtcaagccgatatatgccggcacgacttagaggcaggtttagtagcttattttaagccttaaaattt

SEQ ID NO: 25434 - DNA, 1815 bp, Cannabis sativa
tttttttttttttttttgaagaggtgtagctaagtcttgtattggaggtatccctgcaatcatagctgaagcaaaagcaatttatcatgctattcaatgggttcagctgcttcatcttccagtgaatattttaaggacagattgtaaaactacagtggataaacttgattcttgtaatattttagtggatattaagaacttgttatctttcagccttaattttaaagttgagcatgtatatagggattctaatcaattagctcattgggttgcaaaattaggattaggactagatgatgagttagtttagaatggttctttgccatccttttaacttgttggctttgtattttcttgcttttttaatgaagcacaagtttttccaaaaaaaaaaatgtaactttaggtatttaatttattagaagaaaaaacatgtgatataaaattgtatgaaacttaaacattatatatttatgccgtaaataccttatatttgataggatttaacaaaaaaaaaaaatagtgactgaaataatttttgtggaacttaaaaattgtaaaaagtatttgagtttgaatttgttttaagggctgcacatggggtggtgactccataggatctttgatctgataaacgagttttgggacttgaattgaagcctagcctgcaactgcaaaggttgtttaccaatttgtttgtttggttccccaaaccaattctgacccattttattaatttatttggtcttcaatccaattttaattttaagttgtttcatcaaataccagtgatccaaatgagtgacatagtaagtagtaatgaatgaatactgatgataatattgattttgaaactttcaatgggtcaaatatagcggtgttgtatgtcacaacgttaaacttatcaaatatggctcccattattcaccaatcatcaatcttatcaccatcatcatactttccaacacaactgcacctccttatattaagagaaatattaaaagacatcagtagtattatcatatttttatgtgtcaataatatcgctattggttcaactaagtatcgagtctcatataatttagtataataacttttaaagagtatcgctagtcaatcgcaacacgacatgtcgagaaagtgctaaacactactggtgcctgataacaatcctcctatattaattgttttgccataattgttgcaattttggaggtatggctgtggcaatatattatccttctcttttactctctctgacaatttttagttaataattagttatgatagtacaatgttattacaattgtattattactatttttaatataattattctactaatttttcattaataaaagaattaaccacattaagaataataaaaaaaacatacacatatatttacaataaaaaaaataacaattaatatttatacaaaaattgtaaagttttttttttagaaaattatgcaatataaaaattaatacaacttaaatttttttttttctgaaaaagtaataatttttttttgataattataattatattatttatcaatataaatacaccaataaactatttaatatatttttatatataattaaatacttttatttattttctttgtgatatttacatgtaccttttttttccttattcatatagagtattgcatgtatatactactagaatagacacatactatgtggtgtactcatcctaatattaatattctttttattataatttgatatatagtaaaaataggtatacatataagataaatattagttcaaacatttatctatatat

SEQ ID NO: 25435 - DNA, 4411 bp, Cannabis sativa
aaaaaaaaaaaaaaaaaagattcccatgcaaaatttactcatgtccaagtccaactagttgtgtgcgttttttttaattaaaaattgtacactttttaaagagattttgggtgagcatacatatcatgtgatgaaaaatctttatttatttaatttaaatggaaaagtttttctccatataatatctctataataattaaataaatatgatcctttggttttgaaccaatgaatttagttacgttttgtttctacaatatttaataaccatagttcaatattcaaaggtgagcaaagaacccaattgtgcttttctttttaatcaactttacaaattattaaagtagccaatacacacaactcaagtgtttttattttattaataatgataacaataaaggcattaaaaaaacatatatataatcatctaaaaataagatttaaaaatatatttaactaaaagaaagggaaatatacaatgaaaagcaacactttaaaaaaaattaatatattaattttttaaaagtaattgatagagtaaatatttaaatttaactctcagttgtaaataaatatttaagtttaatttttggtagtaatcatacttaaatttctgaaatttctataggtacctgaccgttaagtatcaagtcaatgactatataatagtctctaattaattagtcataaaatttattttttatttaaaaagtcatttaaatatactaataagaaaataatatatagatattgacttggcgcaaattacgtcccaatacatattaaagttctagaaatataacttttatattagagttaaaaattaaacttaaataattatttgtaaccgaaattaaatttaaatatttactatacaaattactttttgtttttataaaaagatttctgttttataaaaattaaattaaatgtggtttatttactattatttatctatactttttaattagtaattaaaagcgaaatatccaacatgtaataggtatcaattattcttcaaaaataattttggggtcaaactatttttttttttttttgaaagcaggtcaaactaaaattctattatataataacacttttaataaaaaaaaaatatatacaatataattgacaatatatatatttaacgaaaacgtactgaatattttttttttgtccatatattagagagtagctagagaagtaagtttgaatatatacacaatattaaacattatttaataaatttgcaattaatggaaagtgtcattactatatacgtacgtctttcaaaagcaattaaatagtaaacctagctaactataccttgtcattgttttacaacatagaatatagtcacctatatatgtatacatatttatatatatatatatatatgtatacactacaaaaaataactaatcacaatataaattttttgtgactaaaagtaatttttattgtagaagaattatatcaaaggtaaatatttactccatgaaccctcatagtccataacacaagctcttgtaacaaatcttctagaatctaaattatcctcttggattgacgttgtctaagggtgaaaatttgtactgaatttcagctttgtaccaatgtctctctgaagaattttccaaaacatagatgtgaatttcgaatccctattcaaaataatggattgtctgagctccatgaatgcgaactatctcttttacatacaactctgcatactgatccattgcataagttatctttatcgaaaaaaagtgtgttgacttcatgaaacaatccaaaacaatctaaactgaatcatacattcctgtggttttaggtagaccaaccacaaagtccattatacaatttcccattttcatttaagaagtttcaaaggttgtaataaccttgccagcttctgatgttctactttgatcttctaacaaattaagcacttggacacataattacctacatctttcttccttttgtaccaccagtaatagagtttcagatcttagtgtattttggtggtacccggatgcaatgaataaggtgtaatatgagcttcctccaatatctcttttctgagcttgttactactcggaagccttataaagtaacattccattattcaagattgagaaaccctaacccaaccagctagcactttctctaaaacttaattaactaagaatatcccaactacgtacctttgattcttttaagtaaatcagaccaaagtgctaggttatgaagttttcctatcacaaactcaattctagccttgacaatttttgatgccaactgaggagagatcatcttagtactgaagacctgcccaggaccttttttgttcgtagcatccaccaccacattggctttctcggggtgatataaaatcttgtaatcataatctttgactaactccaaccatctttgtttcgtgtttaaatatttttgaataaagaagtacttgagactcttgtggtcaatataaatctctcattactctccataccaacgatgtcaccaaatgtttagggcaaacaaaaaaacaagttccaaatcatgtgtcaggtaatgttgctcatactctttcaactaacgagaagcttaagcaaagaccttgtcagcctacattagaacacactccaaaccatgtctggatgcattacaatacatcataattttttcttgatctgatgacaaagctaatactgatgctaaaatcaaccgatgatttaactcctgaaaactagtttcacacttatcagaccatataaattgttgattctttttggtcaaatctatcaatggcatagagatcttgaagaattcttccacaaagcattgataatacccaactaataaaaaaaccttctaatttcaaaaatttccttagtcagttctaatttaactttccatgaatcaaccatgatcacatcctgtccaacacaatggcctaagaaagacacttgcaataaccaaaactcacatttcttgaatttagcatacagcttgtgatctctaagtcattccaaaactattcaaagatattgttcatgttctgcttttatttgagagtttacaaggatgtcatcgataaacactatgacacagctatcgagaaaatccttgaaagcactgttgataaaatccataaagggtgacagagcatttgtcaaaccaaataacatcaccaagaattcataatggccatgtctaatctaaattgcaatctttccctgaagctagttgaagaagtcatcaatttttggctatggatataatttgttcttaatcgtcagcttatgcaacttccagtagttaatacacatctaaaagaatccatacctcaaatgaaatttatttttgaaaataaaaaatgaattctacaaccacttttattcttcaattttaaaaatagagaagcaaaagtatgttttgtaaattttatttttatttttttaattttttttaagtcatgtccgagtcagggttggggacggggtccatgtctgggagccgggattcgggtacaatggggtttagaacccaggccaggtaggggtcagggttggggtccgagtctggggctaagttcgggttcgaattaagggtccaagtctgaggtcggggtcagggtccaggttcggcttagggtctggggttcgggccagggtcgaggtttgggtttaaggtcgagtctgagtccaaggccggggtcggggttcaggttcaggcctaagttcgggtctcgattaagtccatggccgaatttgaggtttgggtttaggttcaagtccgggcctgggtctgagtcaaggtttaggtctggggtctggggtctggggttcgagtccgggttagggctggggctggggtttgggctcgggtgtcaagggctaagttgggatgagagtctaaaatattgattaaagaaaatattgtttaaaaaattgaaagtgatttttttttcattttcaagatttttaaaattttgattcttaattaaaaaattaaaaagtaaaaacagttttattaaatatgttattaaaaaatattttcacttttttaattataaaaaataaaattttgatttaaaaaatattaccaaacgtatttttattaagagtgttgactcactttttttttcattttaagaggagatttaaaattattttatttgtctatattataattatactaagagttagggattgagcaaataatagcattggattccaaacaaatgcatcattttgtactgtaaaagtttttacttgggttttgtaatggttcttttttcaataactcaagtatataaatttaactatgatttatttggacatgcacatgctaattcattaccaccgcacctagagaaaaagatgttacatacaacactata

SEQ ID NO: 25436 - DNA, 1712 bp, Cannabis sativa
tgccgcttacaaacttaaaacttaaacattgagtttatgccgcttacaaacttaaaactttaggtacttatgccgctatttacccaataaatattaaggcattattagtgccaagcaccttaaggtggtatcgaggagcaaaccaatatgaaaaaaaaaatcgaaaaaaaaaggtaagtattttaattagttacgacaaatatgtgtaatagaagataatatttatatgcataatattaattttaatataatgattagttaaattatatatataatagaagtaatggttcaaatcttaccaaaaagctcttcttttatgtttatttttgtctgctattttacaaaaaaagaatattatgcaccctttattttaaattttggatccactagtggtggtactttatgatcggttatcgatattctttaaaagtttgttgcatcaaattatataaaacttaatacttaattacactaatagtgcagtatgatatctaagaattgtaatatataaggatctgtggtgcctttgtaaagaattgttatttaatactaatagtatccttgtcgttaatttagctattgattaataatattttataaaaataattataccaataataatattaaagtatattaaacaccttctctaaaatttgtgtgagtgtgtgttgtgaaattggtttggtttgagatgaattaaggggactaggaatgagggagacattaccttaatgagttttggcattagtaaaggacaaatataaatatataaatataatttggtttggtttggtttgtattgggtgagaagtaggagtaagagtagtagtaaataatcaattattatgtatatgtagtcatgattcattatatatcagttttcttcctaatatagttataagattgctaccaacttttaccatatttatatatgcaaacacactttacaacctcaaaacactattgtctcttcttattgtatttgtatatatatatcatcatgcgtaactatatataattcttttaattcatttttttttctttatagctataccctatacctagctacctagctagtactatataggactgctactccaaccatatttactgtgaaaatttactaaaacattactatataaatatttaaataaaaaagttgtattttttaaagaatattgttattaagtattaataagggtgatattttgtagttagttagaatatagttgttagattaagttacctccaatttgatatttatttgtatagttatatatataacacttctataattataaaaaagagtttttgcgtcaattaataagtttgatcaaactcgttaattgacgcaaaaattgattcttattttttattttgattgttaaccaatgtaaataataattaatttacattgattgttactttgataattaactctaaaatgaaaatcgacattaaagataaacttttaaaaaaaatgacacaaatgagggttcgaattttgtgtcaattttactcacacactatttaatgttagtttacagattttttgtgtcaattgtacaccaacgctaaattaattagaatacattacaaaaaacctaatctgcttcgggcctatataaaagatcctacctaatatattatctctccagccacatcaaatgatcaaagcttctactctctctctctctctctctctctctctc

SEQ ID NO: 25437 - DNA, 3724 bp, Cannabis sativa
ttttgtgactaatacctttagccaaggaccttttataattagtcacaatttttttacttttagtcacaacttttattgtgactaaaagtaagattttttgtagtgatgcatcttcaagagacacgttgaataaagtctcatccttacggaaacactatggtaggagaccactgacatttcctagtgttaatggtcatgcatgtacctcactagcattgcaaattggagttatcttccgtgtgcctctcactagcgtggtggatcgatttggaagactagggtgtgaggattattagatccaacttacatgaagttatgaggttaccttgagagtcatcaacaggtatacatatatttctctcatgcaatttatgttttgatttcatgtttatacatgtggagatacttagggctatggtacaatgatgatcagatatataaagcttctactgcatacacgatttagtaccataaaaccaacacaaacaatagtaccacgcataagacaacctctagcacctgcttctctcttggggaccgtaagtgtatcttaggccattagagcctataaatatcatattattttatgtgagaaaggttagaaaatcattgtaatacttcatcccttgaaatacaaacatttttctttctccgctgttgctctgaacatttcttgaagttttcatattttgatatttcatcttcattctaaatcttgtgtttgagttttggtttttcagccataatttggttgacaagattacaccgtcgacaatgtccaacaatgctagacatgaaaggggtccccgttgtggatcccattttcacgtctaacattgttatacatggtatatttttcttgttcaactgttgctggacatgaaaattacccctttcatgtcgctggatatcatgtttaatacaaagtggatagcaaagactcatcatgtcaaaattcaatggacatggaaatggggttttgtagtagtggttcgaagtttgagttcaggttggggttcaagtccatgtttgagtctgggtttgggtcctgctttgggtcttaggttagggctacaggtttgtccaaagtccatgttgatggtcaggtcttaattcagagtcagagtcttggtcctgcccgatatttgggatctagtgtcaggtcaatgtttgcgatccaggtttgggtctaaattttaggtttgggtttaggtcccaggtcaaggacttgggtattgaagatttttttcttcttttgaaaatattaatgaacacatcctattttatgaaaattacaacaactatgtattgacgctgaaaactgaccaacaccagctcgctagattggggagatgaataatgagtttaagtaaattttagagagacacacacaatttatagtagttcactccccacgtgttgattgtaatggagctgcgtctactttgagtttttatttcttaggggacagtaataacagaatgaggctaagtgcttaagctctagtttcaagagagagaaactagagtgagatgctctgacctagtgggtagttttcttaatatgaaaaatgaactaagggagctctccttttatagatagaggcccttgaaaataggaaaaaaaaatgcaagttgtctatttttgaccatagatgatgatctcagatgtaaattaaattctgaggttgatcgtcaattttcagaacccgagttgcgacggtagggcccgctccaggtaagctggagcttatttttttgtaactctcttggggattaaatttggagtttataacttaagaattgcaattgaagtgtgagacatgacttgataaaccattgaaatatctttgaaagacaagttgaatcgtgtcaattggattaatattgagtgagttatagtcattttattgaaggcaattcatgacctaggacccaggttaatatccaccacacaggttgacatcccagcaccctggttgacatttaacgtcatcctagatgttgggaaatgtcccagggatgtactttttaaagcttaagtgatattttaacatcacttagtctatttttgtattctggagaaggtggtcaccagttctgagagatgttgttgttatgcagaaatgagacactcaaaactcttcatttctgagtgagtttcccatgttggaaatgaaatgaagttgtgaatttaacttttttgacttcatggctcttagtgattgtgagaaaatagattaatagtcgaaactagatgaataattgaaacagaatcaaaatcggataaggtgaacgattatatttgcctcctacttgttccacttcgtccaaaagggaaaaacaaatagtttgcaaatcattttgaagtatgaaagtacctgacggatagtcgtctaacattaaaaacttagtaaataaggatgaattgaaaccaatgggtatgaaatcgcatgattgccaatgccttaatgcaacatctgcttctgatcgccattagatcagtcttgccaaaaaatatttaagagtgtttgacacatgtttacattttctttaataagttttgcagggaggaattagcaatagataaattagatgcactacatgaacatgtagtcaaaatattgtgcaacctcaaaacagtgaacataagaaaagatttggtaagtaattaatataatgaatttctagcaatttgtatcaaaatatagtagtactcatttaatttttgtaaaacaatatagaaaaaggaccttccttgagattcaagatctcccacctagccaccgtgtttggatcaaatctcagaccaaaaaccaaaacttgtcactgattacgatcaaaaaattgccaataagatagtgagtatatattaattgctgattaagtaataatgaattaatatatatataaatcatatactaattgcttgaatacgtgcactacactcaactagaggagcaagttagtcaggtagaagtttaggttcatggccaaaatgacattctgacataggcgctctagacaccagagcatcttggacgtgttagggcggctggtatgctagtacttgaaaaatgttatttcattagttatacaaaataaattataactaactttatttattaatttgcaggttctttgccaaggcgtctaaactatttggcaagaagaaaagcgaagttttctgatattgtggctcagaaatagaaggagattaagaaactaaaagcaaaaatcaaatccctcgaaaaaaaaagaaaaatgttaccgaacaagagtaggatgaggatgaagaagaacgatagatggctaattaggcgtatgttccacaataacatgcttaggaggatgagggtccacaaagttatgctcaggagtttgttcccctatatgagccacatgtcatgtacagtttcgctgaacagtgggcagctaatcgaataatatttctctgctcaaacaatatcgacaacatagtggccctatcatatctataagaacatgagggtcagatcacagttcacattttgccttacgatgattcacatgcccagattctcatttcaaaaatgctgcaagaggatgttgaaatctcaatcttaattggggggtgcagatatgttaaggaagtagcaaacatgttcctttcttggcctaaatacctaattttaacacctaaggtaacttttgttattaaataattatcaaggtttagttgagtt

SEQ ID NO: 25438 - DNA, 2861 bp, Cannabis sativa
catccacgttcaccttgattttattaatttctgggaccattgctcttccttgttttgattggcagcgggtaccaacaagggatcaaaacgatgagattgagcataactccattgatcaaggactgatcgtgaactagtgacaacttccgcagcagttcgtattttattattccatagcaactcgtttctagcttttcaaatagaccaagccaccattactccttcctcaatcatacttggccgtccacgatgcaaaaggctctcaaaccagagagaaaaatcgaacccgacagcagcagcagagatgttaactgctgcctgattccagcagatctgggcaaaatggcattcaagcaacacatgactgattgattcttcatgaaaatggaaaaagacacatgaacaagggacattgatatttttagtttggagttgcattctagtaggtaagcaaccagtaagacccttccacataaaatgcatgaatttagctagaactttaattttccacaagattttccacacttgttcttccatatcagcactccaagctcctttgcaaagttgtatatacttataagaactttttaccgtatagaagccagagttttcaaatttccagtaatagttatcccctcttcctgaattgataggagtgtttagaatgataggagcatctctgttgtttaataactctgtcactaactccacattccaattctctctattttcctgcattaattgtctcactttgcactggtcgagagcaggatgtgtagatgttacaaaaggattgtcatcatctgcaagccaaggaaacgtcaacacataaaaatcacccaacccgattctaatttttgcaccaacaagcagtaaagtctgagcctcatggatgcttctccatatgtagctcggattagctccaagagatgcatttagcatagagccattggggaaatatctagccttatacacacggccaactagagaatcatcctcctgaagcaagcgccaagcttgttttccaagtagtgataagttgtagtctctaaggttacgaaacccaagacccccactacttttgtgacgacttaagcgactccatttcatcatgtaattcctctagattgttgggaagagatcccccaccaatatttagacatcaatctttcaagcaaagtacaagtttcaataggaaggagaaaaaccgacatagcataagacggtatagcttgagcaaccgttttaagtaatatctcacgacccgctctagaaagaaatctgctctcccaacttaaaattattttttccattttctcttgaaggaaattttggatagatttcttacttctacccagtatacaaggcaaccccaaataaaaactttgatcactagtaggagccattcccaatcttgcacaaagcttgtctcgaaggtccaatggagtattagcactaaagaagatggacgatttggctctattgacttgttgaccagaagccaactcaaataagtgcagtaactgaagcacatgatcagcttcattctccgtggctcgacagaatatgtaactatcgtcggcaaaaaacatgtgagagatagttggagcaccattagcaactttacatcctttaatgtaaccattactttcaaacctccttatcaaagtagatagaccttctgcacaaataagaaacaagtagggggataaggagtccccttgtcgaattcccctactaggaatgatagggccaatctcatggccaccatgaatgaccatatactgaactgtagaaacagtagtgaaaatcaagtcaataaactggtcatggaatcccattttactcatcattgcccttaagaaaccccactcagccggatcataagctttactaagatcgagtttcaatgccatataacccgtcttcccttgccgttttcttttaaaataatgcatgacttcataagaaaccatgaaattgtccgagattagacgacccggaataaaagccgattgattttcagaaataagctggggaagcaatgtcttcaattattagccaatactttagagataaccttgtacaaaacattacatagagatagttgcctcaagtcaccccatactactagcatttttcttcattgggataagaataatattagtgcaatttaaattactgggtaacacacctgaatcaaagaagctcttgacttggctcaccacatcacgcccaaccacatcccaacatttttgataaaaccccagagtcataccttcaggacccagtgacttatccgggtgcatttggaacaatgcatttttaatctcatcttcaagaacttgccgcagtaattccttattttgagcatccgaaaccgaaggagatataccagcagcaaccacatcagctaacgagcttgttgaactgaataaatcagagaaataagaatagatgacatcttccttgatgttgctttagcgtggaaaaagttactattcgagtccccttcacgaagccaaagttgctttgactgttgtttccaaaaaacctcacgttgagtgagcgcctctgccaaatttttttctgtatttttaaattctgccacagaaacatcatcacgaagcctcttcaacagtttaatatcgcttttgcacttcttaatacggtcttggaaatttcctgtatactcactgccccagctcgaaagactctccccacatctcttgatcttctcaatgattgaagccccagcattggcttcccacgagtcctgaacaacttgcacacacagcggctctcgaagccatgcgttctcaaatctgaatattttggagacagtagttaggttccgattc

SEQ ID NO: 25439 - DNA, 1937 bp, Cannabis sativa
  modified_base (26)..(39): a, c, t, g, unknown or other
attttttcacttttagtcacaagttnnnnnnnnnnnnnnagtaagattttttgtagtgtgtattctataaccacttttatcttgaaattttaaaaataaataacaaaaatatgttacgttaattcaagttgtttagtcaataattactttcggattcatgcaaaaaaaaatgtgggttatgcatgtaaagtttctttttattttttattttttgattttatttaagttgggtttgggtcagggctgaggtccgttgttcgggaccgatcgagtctgggttcggggtctagatctggtctgagtctctaagtctaaaatatttattaaggttcaaaataattttgaaagtgacttttttttcaaaattttttaaaattttaattttgaattaaaaatttaaaagtgaaaatagaacatataattgaaaaatatttttattttactaattaaataataatttattaatttgaaaaatattaccaaatgccacctaaatgtcactcataaaaatatacacaaaagtggcagtcattttatagtatacacatctcccacttatagagaagaaacatcttcctatccataattaatgaattgaaagaatagaaaaagtgatttagaaaatatatctatatatatatatatatttataggtgagtagctgattttatgtttatgtagctttgtaatttattacgtcaatttgtaaaatcttgtggttattttaatgtcaacttgcacgcaggtgactagtgttcatgtcagcccgagcactggtcagatattatcttagatatactacgggaactatgagcttataaaatctaagatcttagaataaaaatttaacaaattattttgttaacttattaattctgagttcctcataatgtacgctcatccgcataagataagtctccacatgcttgcctactaccaccggaccaaccattactcatatgaggttgtccagaaactatcaaaaatgcttcaagtaataaacaacataaacgatatgataaaaattttggggcatgatgaaattcgacaaacactcttctttatggatagtataaaagtcttgggccaaaatattatgtccttttccttaaacattactaggacttagttggcatgggattttaggatgcagttgtggattatttttaggctagatcaatacataagggactcaatgcgacgaatgtaactcttattcttaataaggtgcctaatttgaaaaaagtgtcccaattcagatttctttttctttacattgtggtcaagatttattttgaaaattattgcaaatagaattagaccgatttttctccaactaatttgtcttactaaggcagtctggacaaaacatttaagataacaatgtgttagtctgaaaaatcatctattcgtttaagcttaagaaagtaaaagagggtttcttcaatattaaaaaagacaggtaaataaataagaggtatcaatgaaaacatgcatgtgaaaaggactatctactttattatacatagcttgaggaaattagaagtagctaggtatggatggacatgtaatatataaatcaattattcttatctttcttaaattattacattgaattatattaataatattattttgacatggtagcttagaaattagtgcttacttttttaatattatctctctgaaatctatatatatttccatatttgggatgatcctataatcaataatgttgtagtagtagttggctggccggtatatgttaaatcatcattcatattaatttaggtgcatttgaaagtaactgtgtaattactagttagggtaattactagagtaataattacacattatactaattacactatattttaaaatgcaaagtgtatttggatatgaagtggtaattatatatgaattcctaatatcttgtt

SEQ ID NO: 25440 - DNA, 2424 bp, Cannabis sativa
cccaaacacggactttgacctagaccgagattggagactaagacctggacccaggacccagacatagtttggggacccaaacttatattacaaccataattgggacccatgactaggactgggaccaaagacccgaccccagtctcggtcttagacccagatccgaacacgtacatggactgggacccaagatccaaatcaaaacgagattgagacccatgatatggatctggatgttgacccatgacccggggcttggacctaacctgtagtcagtgtctagatcttggaattgtaccaagaccccaacctggaacaatttccaaactgggaccgaaaccagacttaggcccacaacccaaaattagaacaagaactgaaattaggaccttagaataggaattggacctcgacccaaaactggatctacacgcagaactgaacacgaacctggacccatgccgggatcgatacccgaaccccgacccgaacccgaaccgagacttgtgccaggacctgcaacccagaactcgaaaccaaatacccatgactcaggaactagaccagaaccagacccgtatcaaaacctagacctagaccctgacatagaacaagaacaagaccaagacctagacccagacacagactgagacctgaacctcgaccaagacctagacccagactcggaccgagacccgagctcatactagaactcgaactcgaacccgggactcggacccagactgagatcaatactaagacccagaccaggactaggactaacacctaaacctggattaggactagaacctggattgggactaggacccgggactcggtacttggacctaagacctgagaacagaaccgtgacccagacccagaccaggccaagacccaagataaggacaagtaccgaacactgacagagacctgcactcaaactgggaccctaacccacaccgggacctaggaccttgacctaaatcggggagtcggacccataactcaggactcaagacccaaacctagacctgagacccgaacaaggacccaagacatttgctagaattggaccaggatctggatttggactcgggactcaggacctaagaaccaaggcttggactcgacccatagttggtgtctaaatttgggaattggacttggacacggacccagacccgaaccagaacctgaacccgtactagaactcaaactagactcgacatgtggttggtgtatggatttgggagaaagactcagacctgaacccaaacacggacccagaccaagaccatattcggacccagacccacacctgaaccttaaatcgtaccctatgacacgaaattggaaccgaaacttgaagcagacccttaaaccctaaaccctaaaccttaaaccctaagtcctaaactctttacacttacccctaaaccctatgccctaaaccctaaaatccataaacattaaacccaaaacaataaaccctaaaccctaacccatacatgggcctagacccatacccatacagagatgagatcggatcgaaacccaacccaagacccagacccgaacccaaatccagactagaacatagaccaagactcatgaccttaacccgaacccaaacccacactagctcctggtccgagaactagaccttgactaggacccggatcgggaccacgacccggacccgaacagggacctagactcaggccgggacccgaaccctgaataaaacttgaacccgtactaggacctaaactcagacccaaacttgggagccaaacttggaccttgacctggacctaggatccagacctagatgggggacttgggccccaaagtggaacttggactaaaaatccgaacgtagatgggggacttggacccaaaactgggcccaaaaactgggaccgaacccaaaacacgaccctagactcgagacatgggacccaaccctggacccgcaacccaagacctgactatcgggacacaaacctgaaccctaacccaaacccaaactaggacccgacccaagacctgggacctgaactgaaacaagactgagatccaagaccaagatctgaatctggatcaaaggctttgacttgacccgtagtgagtgtttgaatttaagaccaggacctggatccgtacctagacccggaatcgaaatcagacaaggtctgggactagaacatacactttcgacagttacaggatccaaaaataaacgtaaactcagaccaaaacccatattgggacttggacacgaacaaggacctattacttgggacctaaaccaagaccgggacctggaccatgaccctgacccaaacccaaaaattggggttagacccaggacctaagaactagagttagactggtgacccaaaactcgtacccacactg

SEQ ID NO: 25441 - DNA, 2580 bp, Cannabis sativa
atgttggtagtgggtgttttggtaaagaagggaaaaatgtcctcatagaaaataacatcccgagagtgaaagatgtgattggtttggatatctaataaggtatatgctttcatatgttcgggatatccaatgaataaacaagcttttgctcttggagaaagtttatgaccattgttatggggggaagtataggctagacaaccatagttccttagatgagtgtaagatggggttttgccatttagtaattcataggatgtcttgtcttttagtaacacagatggtgttctgtttagtaaatagacagcagtttttatcatgaaactccaataaagaaggggtaaatgtgattgaaaagcaagagcacgagcaacatttaaaatgtgctggtgttttctctcaacaatagcattttgttgaggtctattgacacatgaagtgttatgtaatgctcctttacttgcataaaaggaggttaatgtaagctccttagcattgtcagtccttatggctttaatctttttattataatggacattgacaaaagtaaagaaatttctgatgtgattagaagcatcagattttgttttaagtaaataaacccatgtaaaacgagaatggtcatcaacaattgttaaaaaatacctatatccttcaattgaatcaagagggtaaggacccaaaatatccatgtgtacaagatcaaatatgtcatttgcaaagctggtatgagaagtaaatggcagctttttatgttttgcaaagtgacaaattttacaatggaaatgatgaggtaaagtagaattacaattgagcagtttattgagtttatttgtgatgatgacagatggatggcctagacgtgagtgccatttattgttgttcatctgtgtagtggaagtggcagcattgcattgtggattgggagtgatttcttgctgaatgtaatacagattaccaaatcggctagcaatcccaatcttcaatgtctgagagagttcctggacaatgcatttgttagatgtgaattgtataatgtgattgtttgcattaagaaaggaactaatagagaaaagattgaaatgaaattgcggtacaaacaagacattggttaatattagtttagaattgatgatgacagtaccgactttttcaattttcacagagtgtccattaggtaaagttacagcagcaacatgtggtttgttaacaaaaaaggaaaaacatctaatgtcacaacagacatggtgcgttgcaccactatcaatgatccaaaaattatagggaaaggggctgacattaccagaaaaatttgtgacagcagcattggtttcaagagttgaggtggatggttgcagctgttgagtgagcatggatatgatctgctggcattgttcagtagtcaattgaggtggatgtgaatcagagagtgaagtggaggcttgcattgtgtgaggatttggccgagatgtagcaactgcagtatctttgctttttcctttaatattggaatcggttgttcttcggttgccatagccagggggaatccaattagaaaatagcatttatcccttagatgtccaggtttttggcaattagaacaagtggggcgcatctttttgttcttggaagtaaagtttgctgcaggagtgctgtcatttggtgtatcattgggtttagttacagcagcagctgtaagaggggtgatatttcagtttccgattgttctttgacgttcttgatgaataatcatggagaaaaccttgttgagaggagggtaaggatcaagaagtagcacttgatcacgacagcattataggactcattgaggcctttaagaaactgtaatacctgatcatgattgtggtattcttgctgtttaacagcagccacacatgtacaagggatttttgggcgaagttgagtaatttcatcccaaatagctgttagtttagtgaaataggtactaacagaatcttcaccttgagaaagaaaggtgagattttcattgagttcaaagatccgtggaccatttccttgattgaacctattgttgagttcagtccacatttctgcagctgtatcaagatacatgatactgcttttgatcttgggtgacaccgagtgtaagatccaagattggaccatttgattacaacgaatccaagaaccatataaagcatcagtaggagagggttttggaagcgtaccatcaagaaaaagggttttgttgcgagctccgatggagagtttaaaatctcgagtccatggctggaagttcctatctgtcaagaccggagtaacaagagcgattccaggatgatctgcggtgctgaggtagtaagggctgcgtacatcctcataggccggtcgatctccattgacatgattagatgatgcagttggaattggaacacgagatgagggatctgcagaattttgggatgctggaggaacgtgattcggaagtgcatcgtccacgggatgatcagtggaagtagcagtcgaatttgctctcgtgcgcaccattgttgaaggcagaggaagctgagttggtttagggttcttggattagaacat

SEQ ID NO: 25442 - DNA, 2771 bp, Cannabis sativa
aaacttgtgatggaaaggggtggaggaagagagttgaaggagatgtagaattctttctttggtaggagggagaaaggaagtgggaggagaggtggagggagactttcttcctccaaattttaaaatctcaatagctaagatttaagaaaaaataaaataaatacatcaaatactaaacttatcctttaaaaaaaatatatatactaatatgaatactatagtaattttaataaccaactctctctcaattcttctcccacatttactcctaataccaaactatttactgagatttttaaaaattgataaaatataataaatcttaagaaatatattatcgacaaagaataaaaccatagtttttatgtggttcaatgagtaatgatatctagtctacgagttaatattattataataaaactagaaaagtcttattgattttgatgagggtacatttgtacactcattcctcgttattaattagattaattgtttcttatttcttaaaatttagtttagatttgatgtgtgttttttttttttttttgtagttgtgcagttttgtattttaaagataattttatgatggactgaaatttttaagctaatttttaaccatgttctcatcattttctcaaagagcttgtctaatcaaaaaattaaagagttttttttaactttgaaaaacatgtcaaatcatcttatttggagtttggatgcaaaagttatgcatgttttactgagcaaggtcgaagtagtcatgttgcaggcgacatgtcgcccaacttacaaaaaaatgcaaattttggcacgtgcatataaaaaaagatatgcgaacccccaattaactaagttcagttgacatgtcactttaacttaggcgacgtgtcgccacaattacggaattacgaaatagagtgatctttgcacgtgacagatcaaaaagataggggatccaaaagataaggtccaggagacatgtcgcctaacgcagttttcaaattcaaattttaattctaaatggcatcctttctatttataagcctatataaaaaaaaatgatgtaaatcgactttggacggctagagagatacagaaagaaactttgagattagaaaatacattgaagagcaatagataagagattccgagaaatcatcatcaattatcattagtcttcttcttcttcttcttcttcttcttcttcttcttatgtttagttgtttgattatgaacatgattattgttgtgattatgtttatcattatgaactaaacgctcattctaaaatgttgatgaaattgttttagattatgaattaaagtttttaaattattctcatatttatccttgctatttgtttatgaaattttgtattaattattatcttgttaatgtgtgatcaccattaattaataaagagattttatgttttacacttgagagaggtaatctaaaatcagacttagaattacatgacataggaaaattgtgagattgagagattccattaattttatgggtttcatttaaagagaatcatatagcttgattattgcttgattgattaatattaaatagatatattgtgttagttaattaaggtaattgtatcatcacttgagagagtttaatagattacattaggattcttgaaactacaaattatagaataaatttggataattggtaaactaagattcatagtttgaaatcaatgatctaggtctttgttttttttttttttttggctaaaatcgatgtttgtccaaatgattatttccgactaccgagaattaactaactcattgatgctaccgcaggacacaaactcatgactttcatggatgaatattttgaatataactagataaaaatatgtgtcccaaatcaagaacatacaagttttataacaaatatagggctttattgctacaaggtcatgctatttgggctaaaatgcaggagcaacataccaacgcctcattaatataatgtttgaagagaaaattggtcacaatatggaggtttatgtggataaaatgttagtaaaattagtcaaaacaaattatcatattgttgatccggtgaaggcttttcaattatgagaaagtacaaaatgaagcttaacctacaagtgctcttttggagtttcatcaggaaaattcatgggatttatggttaatgtgagaggaatagaagcaaatcttgagaagataaaagcattgctcgaaatgccatcactaaaaaatgccaaaagaagtccagtggttaatcgagaaaataattgcacttaatagatttatttttaaatcaactgataattgcctaccatttttaatgtgttcagaggcaataagaagtttgaatggatagaagaatgcgagcaagattttcaaaacaataaagaaaatttgtcaaattttattgtattattaaagtcgataacgggagagactttgttcctctatttagcagtttcaaaaaatgctataagtgaaaccctggtctaagaagaagggaaagtcaaacacccagtatattatttcaaagaaaggttaccgagggcagagacgagatacccaccgcttgaaaagcttgcattaagattaatccacgcctcaagaaaactgtgaccatattttcaagtgcatcacgtaagagtcctaaccaaccaaccattaagaaatgtactcttaaaactcgatgcctcgggacgattaataaaatagttgattgagctaggataatttgagaattcataacatccc

SEQ ID NO: 25443 - DNA, 2126 bp, Cannabis sativa
ggagaggggaaccacactggtagccccctcctccccatttcttaaacaaaaaaggaaaagaaaaacaaaccttgtgccatggatgaggttttatctgtggaaacttaaattcggtgtagtttgggttcatgcactttatttcctctctagttggcgttcccaaaacctgaatattacgagtaataataatcgtattaagaaagcaaactttaaaatgcacaaacatggtggtgctaacggggtgattttacaaaagacactcaccttaatgatctcaactagctgatcaactccactgtcaccgggaaacaaaggctggaagataagtaaaaggttaagattatcaatatttgacgatcgaatgaaatcatcgaagagtaattcgagtatgaatgcctaacctgtccgagtagtagctcagccatcacacagcctgttgaccaaatatcaatagctgtggtgtattcagtcgctccaaatataagctcgggagctcgataatatctcgagcagatgtaagaaacattcggttctcctttcacctgataacatagaaaagagactaaacttttaacatttggatcaagctaagctcacaagctagattaatcattcaatatgtaacatagcgaaaatacttaccaacactttggcacttccgaaatcacaaagcttcaactgatgagtgtgaggatttacctgaatattattatagcatatttttagaatttgacaaggcgaaaaaatgatacataaacagatgataacacatctataatacaccattaaaaagtatttaaacatcttccactgtaatcctacaaatatcaccaaatccttaattctcacactaacaagtttcactcttgacaataaatttttcttacataccctacaaacaatagggaaactggacttttataggacaagtctcaagagggtcttttgtaaaatgacttgtgagacaaatatttgtaagatgatcgattcgatctacttttacatgacgaaagcaagagtgaccaagtgggttgagaagtgtaaaaatgaaaggtcattttctaattgcactttccaaagattgtcattttggcaaacaccaacaagtcttatctacacaagtactatatgctctaagaaaagaatcttacaagtaagttttgaggcttgatatcccggtgacaaataccaatgcaattatggatataagcgagtgccctgcaaatctgtacccgaaaaacaaaaatgaaatcgaaacactaaccaacatattgtctagcaataaaattagtgaatatatcccatgatcttaaccgaagaaccaagaacattcagaaaagaaggttttaatacataaccaacagaattcaacaacattactttcatacctgatatgtgtagagtttgacatatattaagggcattctttggttaatcctgctataatttctggcaacacggtgaacagtctcggggacatattcaagtacaaggttcagataaagctcttctttgtctgttgttgagaaaaaacagtgttttagtgcaacgatattaggatgatccaacatttgcataatctgcaattccctgttcttgtagcgcttgtcttgaaggactttcttgatggcaacaatctctccggtttctctacatttagcctggagaaagagttttacattatcatcatcattcaatatgtttggcgaaaaaagctgagaaatagcttcaattattgaaaaaaataatatgattctacgtacttggaaaacaacaccgaaagaaccagttccaaccacatgttctgcaatgtaactgaccgtctgtcaatagaaaacaaatgaagcattgtaagacacgaaagataaaccaacacatcgaattatctacccttcatagtagttttctacaaacctgcctagattgaccatttcgaccaccaatagttgttcgtatcacatgtcccgtttcagcacccacatcgtttacaacttcatgttcactatcctacattgcaaaagataataagagccatcaaaatctgtacaaaacatttcaaaatactcatcacaagatattttatgaagaaaattattaccctgtcatcgtcattatcaacgttatcc

SEQ ID NO: 25444 - DNA, 3830 bp, Cannabis sativa
tggtaaaatatttccaataaaaagctccttcttatcattgccagcatatgatgggagacctaaatatttctcatggagagaacaaataggcattccaagcacactatgaaaacgatctcgaataccttgagtagcattaggtgagaacgacataacagttttctcagtattcaaaagctgtcctaacgctcgatgataatagttaagtactcgattaactacatggtaagagtcttattatgtagcttgacagaaaagcaagctatcatctgcaaaaagaaggtgggatatagcaggagcacccctcgcaattgataaacctttcagatggcccatggtttcttcatgtttcaataaagccgatagtccttcagagcatataagaaacaaataaggtgataatggatctccttgacgtaagactctcttgggaataacagtacccttgaccgctccattaaggttaaaagagagagttgcagatgtaacacatttcataacaagattcacccagttcgtatggaaacccatcttgatcattacctcatataaaaagtgccattcaactcgatcaaaggctttactcatatctaactttagagccgcatatcccattctgcctcttttcttgtttttaagagtatgaacaagttcaaaggcaaggagcacattatccatagtaagacgattagggagaaatgcactttgattatgtgaaattacatggggtaatgcctctttaaatctgactgctatgacctttgaaaccaacttgtaaagtacagtgcataaactaataggtcaaaaatcactcacaagcttgggatgatcaatctttgtgatgagagtaatgagagccgagttaatggagtctatatccttgccatcattcagaatttgtagtgtgctttgggtaacagaggccacacaatgtcccaaatgtgctgaaaaaacattgcagacataccgtctaatccaggagacttatcaggagccatagaatggagtgcgttttctacctctgtagctatgaaaggctgaagcagagattggttcatctcaggagtgatggctgagtgaatggtagagaggacatattgcaaagcctcattatcaacaccattagaagaaaataaacttgagaaataattgacaatttcccactgctgatttcctcttcagtatgaaccattccaccattactagattgaagcttcttaattttattaactgcatttctagacttagctttggaatggaaaaacttggtgtttgaatcaccactttgaagccaatctacccttgcgcgctggtgccaatataactcttctttttcaagtaactcatctagtatttcatcagcatcttccatacatttcaaatgagcaattgagttatcattaatattattcaattgaggtgaaacgttgtgagcagcagcaatatctttccccatttggccatattttttaccatgccaatcttgtaaggcagcagtgcatgctgcaatattctgcagtagggaagccgtgggttaactggatggatttgtgcaccaaaaactctgaacaatatccctgcaatcagcatctttgagccacatttgctcaaatcaaaacttggtacgcctctgagaggaaggtgctggcagatgaggatgcgacactgtatatgcaatggctctatgatccgaatggtaaaagtcaagatgggaaagagtggcttcagtaaaaaaattagaccacttatcatcaatgaagcctctatcaagtcgttcccgaacaacattcccatgatgatttttgttagtccatgtaaaagaatcaccagtaaaagggacaacccttaaatgacaacaatcaacacctcttctaaaattatccataagcatgtcatctcgagggggacccccaacttcatcctcatttgaatgtaattcattaaaatctccaagaaccaaccaaggtaaattagaagcattaaaaacaaggctgcttaaaagattccaagtgttgattagcaaatgtgtttcaggtgctccataaaaggcagtaaagtgaaattggtggcaattatccgacgaaactaaaacatcaaagtgattcattgagtatgaattaagagttacatcaatattagccaaccataacagcaacaaaccaccctttagacctaacctagggacttcaagtccaatactgaattttaaagaagaacaaaaacgatcaacagaattacaagtcaacttagtctccataagaaaaagcaagtcaggacgctgctctttaactagcagcttcaggaatttgaatgtcgaagggtttcccaatcccctggcattccagcttataattttcatggctgggggcggggctgcattgatgcaacttccaccgaacaagatgagtttccttcgactgaatctgctggctgatcagaaacatgctgtaaggatgacccatcaacataagaactatccattttattaccacgacatctctttaaaatactacaaaagttctcaggatccatttgtcgtttaaaagtcttaaccgaatcaatatttccctcagaaacctaagaattcatcacagctttccctttgtttaaagtcgcactaatcggggcatcaaaagttctggaaggtggacattgagagaaggaataggatggcaaatgagatatattttcaggttgcaatggtggtggcttcgatgacactttaggaggaagaatagtagggacataagacgggaaagggagaggcaattcaaggcatttttctttagcagtagttgctggtttttctagtgtagaggactcgactaaggttaaggattttggctgaggctgtgttccaatggcaaagtttcgatgagtgtaaagagcgggaatggatgaagcaatggtttttctagcgagacgagtaagtaaagggtaagcattagctttggaaaagtcactgcggtatcgatcataacctgaaattggaagtttatctccaatcatttgtggaccatagagcagttcacataaaagacttacatggtttaaaaactattttaaatattattcatgtaggttatgaataatgtttttattatgtcattttgatctgttacaaaaatagtattttcttatgggtaactgattaatattttattaaataaatatttttttaaaaaaacaaaataatatataacatattatttatatttttagaagtaacaattttttaaaaataatatctacatagattaaatatttttataattaagtattaattattttcactattatttatatatttattaattaaattccttttaagattatgttttttttattttacatttctatagctttttaatttcaaaaattacaaaagatttttaaaaattaaattattttaagtaagtctatataagtatttttctctaaattttatttgtccaaaagttgaaaataattttttattttatttataaaaaaataattaaataaaaaagaaaaacaattgaatgattataaatatgtgtatgaaggtataggcttataggttatcatatgctatactaatatttgagaattctttaagccactaaggctagcatagtggtgagggagggatcagaaaaaaggagaggtcatgggttcgaacctaggacctttaagctattaagctaatatatggtttaaaataccattacgctatactcaaaaagaatttttttttgagaattctttaatttttttaatgtttcaatctttggttttttttcttcattatttgaattttaaaaaatataatatcactatttttacaaatt

SEQ ID NO: 25445 - DNA, 2095 bp, Cannabis sativa
aatgcaataattaaaagaagagttatgaaacgtcgcataagatgttgccacatgatgatgatgatgatcaagaaaatgaaagaagagaaatagtgcatattattattatgttaacatcagatatgataacaatatgtctactttttatttatgtgcatgtgtatataatatgcatatatatatgtatatgaataatatgtatgtatatatataaatttatatagagctggcaataatagtaatggtgtgtatataatatggtccccttcctagaaaagtcccatatacatatatatatatatatatatacatatatatattacatgactgtgactactttagtggcaaaagaagccctacttactgtgtgtgtgaagggttgctgttgttgttgcttgttagggttttattattaggctgaacagattattgtgggatttcttgaagaggggtccacttttttgaaccatatatacaagaacaaggaattaattaatgaaagagtataattaacaccatgattttttcttttaaatatgtcagtcagaccaagttgataatctatatatacatggtctatatgtatatatatacattgtatgtgtatgtatcagaagaaaagaaaaaaaaaagtattattttgctaattaattaatgactcaaaaaagagagatggcgacttgtcttgggatggtaaagaaaggtaataaggagttataatgaaagaagtgatcagaggcagttgggttgggaataattgcaaaacgagtcaagcatgcacgaatgaggcagactgttgttttagcagaaaacaccccaaatttatcattaacttcctatttctgataacactcacgctaaatatactgacaaatttatatatttagtacccaaaaaatccccattataccaacttctatctaaactcatcaacatatctttatcaaaaagagaaaaatagactatagtcctgcaaaaaaaaggggcagaagcttttttttctttctttcttttttggtggttaatttagaatatatattggaggttgagttgtcatatcaaaacaatacagggaaacaatatatctatatatatatatattgtaaactgagagagatgtcatttctttccttattttacctatgacaaaggtttcattatattctttgtttttatttatatcaagagaaatcctattattaaaattgtggtactatagtatatatgaatttatatgtatatttatactaaaataatttgttaacaagcacactcttgtttatccatttcttaagttttacaagaaaatggaatgagaacttctattctaactaccatgatttagaagctcttgtttggtagctctccatgtgctcctattttattttcttaaggaccacgctatacatatatatttatatagtaaggatgtacaaacaaagtttcattaaatatatatatatatatttatatatgagattttagtactgcaaaaaatgcttattaggccgctccctgtcattgtattttatgtcaatctggcactccttttatgttcttcattggttttcatttacgtttcaattttcagtaaaggcaatcgttaatcttaaaacatgatttattttaatacaagagctgtagtaattcttaaattaattgcaacactgatcaattaagtttctaatatttcaatatatatatatagaataattaactgatagtacttatagtgttcgacaaaaatagtacgaatattgaacacatataagaaataacattttcgtacccttatttccccagcaaacaaaatttattatatgtggaaaagaaagtgatagaagaaaaacctaattaacatggatcttatagaaagttaaaaaggtgagtagagcatggatatttaccaacaatttttcacgacggcaatggcctccttaaaaaaaaaagaaaagaaaagaaagcattattatttgacatttgaaggtgctcaataactctaacactccataatttgttaatgatttctcctaatatatattttcttggaagctcaaagagttaagttcattgataacaaaaccatgtaacaaca

SEQ ID NO: 25446 - DNA, 4573 bp, Cannabis sativa
  modified_base (799)..(801): a, c, t, g, unknown or other
tagatttacaggacctttcgagattctcgagaaggttggacaagtgatcatgtttcttcaagttcagttgatctcgtagatcactccaagtgtgattgcagtcggaccttgctcttcctcttaaggtttgatttaccttattctctctataagggtttgcgtgatgttatgcatatcccaggctgtatcctcatattttcctcagtttcctcaggttgcatctcttaagagttctgagtatatttctaggttgtctcctaccccttgatttgcgagccgcaaggttttcctcgtggatctcttttgccaaggtcaggttgatttcgggtttcattctcatgcgctgcccttactgtagctatttcatgctctaactcggcattacactggtttgcttcctccaactgacgcttaagatggcaagtttctaactcgatgatcggtatgtaattggttgggtcgtagatgccatcctcctaaacctggttaagaagtgaccggttgttgttgtcccaaggtcaatgaagccagggaccccaatatagggttctcttaggacttgcagtctgttcatggttctgattcaatagatccctgagtgaggatcattatctttggtgtcatccattacttttatgtcaggaggttttttctgagctttttcatagaggctcttaatgaaagcaccctactgttaacgtagattttcgttgactaaatttgagcctcacagtagtaatttcacatagaaaaataagagctatagaaataaagatatgaacacagggttttttacgtnnntttgcagttaaaattctacatagtccacgactcaatcttcttcagatttctaataattttttaggaactctcccgtatgaattttttccgtctccctttttcaacttgtctgccactatttataattacatagtgggcagtaaattacaaacgttgatagtaatctttacaacaattattccctcaaatcatgggatttgattacaaattatgctaagaaaatgtgggttttatttataatccacactactgtcagtatcccacttttattaggccgagatgaacgcatatttaaggatatacggtaagccttatctcatggaggtgcctcgctaggaatagaaccgagttaactctgatggcgagctgtggctcgtcatatgacttcccgaaattaatattgctttaattctgataactacattttctgttgccaagatgatctttctcccatgcatgccatctttcagcaagatagacgcctcgctatctgtcctctcgattcagcaaactatttaaacttagtttgtataccatgtcgtatatgctaagtgtttttatcgttattgtttctcttccacgcgacgaagttgaagcctcgtcatgcacacttgcactcacatggtctctcttcgatacataagttagcagtttgtacgtttctgtcacgcagaagactgttcagccagccgaattataaacatactctgcaaattatatttctaacgagttattccatgccaagtgtagttacgactgcatgtttgagttcttcgttcttcccaggccgacatgtgtcctcttccaatgtgcttaccaaattttgggtataacaataactgtcttgaagagaccaaccccaactcccgagatggctgagcgacgcaggctcctgctgggtctttcgtataatcttcaattggctgagttccgcatgaatgaggttaacttgaggtccatggatctcctcgctgagaaggagtttacttgtgattacaaatatcccaagtattcttcttgttagcaagtttcagtcccagccaatgaggaatctcaggattatgtggctcgggcacattacctccaaaatgctgtccctcgactgtccctcgagaagccgaaggagcatcccgaggtaatcaatgtggttggtcacccacagtgcatagggccgagcgtactttagtgtctttttgggatagcagctataaattctacacctggaatcccctcctcatagatcgcgttgcacataggtttgatagttggtacccagacttctacatccaaattagttgtactgactcgtattatgggatagccgaccagtatgggaccatgctggatagggaaaatcatatagatgcgagctaggatttagaaccaattaacccatatgacatattcaaaatcacatgatgtagagactttagggaatattatagtcctcctacctcgtctccttatgattatggtaaatcccttaggcaggaaattatgtcccaacttcccgttttacttgtttttaaacaaatgttaacacatttgtcttgtctcacagaaatgaatctcaagaacctccttcaatctttaggcaagaagggaaagaaaaggttgactgccttggagatttcattagatgtcaacgtggagcctctcaaaaggcccaggaagacaactgctaacaagaagtgagcttcctaggctattgatctaggggtccttgagattgagactcaggctcaaacccaatcttcagcccccacacatactgaagagacttcttcctcttcgagcgaagcacttgagactctgcctaacgaagttgggaaactggctcgaagtacactgggtagtttggtgcagcatgttggcatcatttcaagtccttccttcccaatgaatgggacttgatcaacaatgggaacctcaagagatgcttgaaaggagtgtcgcctatggcctctcagtaaattcctttatccttctcctcttacttccctttttaacattcttcaaaaatactcatgcattattgtttttttattttcagcaaactttcatctccttcgtcgcccaacggcgggctacggaaagaatgaagtacacggagagcgagatccagaaggtgataagtcagcacgaggctgtgaccaaggaattgaatgttgctaagttggagatttctcacttaagtaaggaaatcgaggaggtgaagagggcccataaggctgagcttgaagctgctcagaaggaggcaaaggataagatcgaggcatgccagaaactccaagaggaaggccaaaaactccaagaggaactcaatgtagccaaagtaacgctcgaggggaaagaagcttaaaccattaagcgatgcaatgccgttgcacaatgttccatcaaccaagcctggatggtaaatccagggatggatttaactttgctgtgaaaggccatgggagaagtctttgcttactacgagtaagctaagaaggtagaggaggaagccgaggtagtagctaaagaagaagaagaagaactatccaagtctcctaccatgtaggcttggtttttattaattttttctatttaggaaaatggccttgtagccgagacaatggttttgccccttgtggcgcttttttaaagacagatttgcaaagttggatggccaacttttcatttattttatcttttgttgaatgtctcgtacgttttatatttgaacttgatatatttgtttgtttccatttttattcacaacttaaacaattatattttgatcaaatttaaaatactttcagcctttccattgctcatatttttcttcaatattatttaagtagttagtaatctactatgtgcgcgagcagttattatctgctatgcttttgatttgcgagaagttaacagttatgcttcgcataaacaattataatctgctttaagcaaacttaaatatacttttaatgattcgtcactttgtatatttttaattgcttatatgaatagttaggccttctattcatatattagattaagtattttttcaaggcatcttggtgtctcgtttaatactttcctacaaaatgcgagtcattagtattcagcttcttatgtagcttaatgttatttttatgagttatatctcatttataactgctacttttgactttcctttctcgtgggaaaggttctttaatcagtcaactttaaaattttttaaagtagtgggtttgcaatatatcatgatatcatgtatttccagatgaattccggttaatcatacacacacatctatatgcccctcaagtaatttcaaagactgaaactttgtaattacttgaaaaatgatttaactttattaataactgatgttcaaaatattacatcagaaatagaagttacaacatcaatttactggtagtacggtcataaatgttctatgttccagtacttttttattagcgagcctctgagctaatttgtgaaccctagttcctactattgcttcgattacataaggaccctcccaatttggatcaaatactcctacagatgcatctctcgtatttgcaaatactcgccttaacaccaagtctcaaccgttgaagagcctcttcttcactttcttgttgaagtatcttatcactcggtgtttgtatgctgtattagtaatttacgactcagtacgcatttctacaagtagatctaaggaaaatttcaatagttcttgtttttcttcttaattatagaaatctcgtctatgggt

SEQ ID NO: 25447 - DNA, 8713 bp, Cannabis sativa
gaggagacctcttggtagaatgttgtgtttctttatcagtgatgggttcggcatcatctttgggatttgtcttggcatggcgattctgcagtgtttaacacaaacaaaaaaaaaacacagaaatatagttactcatcggacactgacacccaatttcggtacccaacatcgttcaacagtgaaatgtttcatatatatagaagaaagaaatatccaactgtttttgacaaaaattttgagagagccaccaaaagaaaatcagagaacaggattcaagttacctccattacattcttcagaaagcgtctatatctatccggagcagctgatgtaactgaattaaacccacacttccggatcataatctctattatgacagtaacctgtggatagagtatgatgaattagatatatgaacaagtcaatttcctctccctaaaaggctaaaacacacagaaaagaaaagagttcctgtctggtgttgcaagcaaaaatttggtgtggaattcacataccttcgatctgaaatggtttcttgaaacagcagaccatagtagaatttctttgagaatatcaggaagaagatgctgcaaatccctaccctctaagcaagaaaccaatactttcacaaaacccagaacagcctataaaatgcaaagcaaccaaccccttagaacaaggaatgttattcaaaacaatattaaaacaactttcttcattcaatttacgagtattttaataagaaatctaaactaaattgatcataatgtagcttagatagcactaacttttacaacttcgacagattttccctgcagcaaagttaaaatagaggggataagatctggcattgaacggtaaatatccgtatccttgtatatcagcattgatagcaccgacacagctccactctttacatgcggagatgtaccggaaagatagcccattacctgaatttgagcacaaaagacagtgacataggaaggaacttagagaaccatcttgaagaaacatcttaatgagataagaacaagcacatttaaaataaaaattactaatttctgaaactgaatgtccaatcaacactaagctcaatgatgaactgtaatgggtcagattcagtgggtgctttctcagttgggttgataaaaacatctaaaaacacacacccatctaaaatttgttaaaaatcaccctaatatatcaattattgagtgtcaacacttttttctccttaaacagagcaatacaacaacatcgatggtcagttgaagtcactatgcttccatactcaatagataaagtaacaaaagcatgaaagctatgcactgaccatgttaattagtttctggtaaggcgtatcagaagattcagaagagagagatgccatgtctctcaaggtggaaccaatctcaagtagtacatcatagcctgctttccttacatcttcttccttggcctacacattattacaaaatccatttcatatgtcacaattgtctaaaataaaattttcagatgatacaaaacaaataaatatacataaaagaaattaaactagtggtaataaaatattacaagtaagagtgttgaaaacaataccatacaaaaaaaaataaaaataaaagtatctaatccctccacaaccacaagtctataataccaaattggcaatgtgcaacccaatatttaaattcttaaatgaagaattatggttacaaaaatgaaaagaaaaaaaaaaatgcaacagaaacattaagaagctcgtaactcttcatacaaacactggaaatgtaatggcataagaagaatgaaaagaacaattgtaaccataaatttaagtgaaaaaataaacaaatacaaaacagtgaattaaaaaaattcttaaaacggttcttacatcctttagtgtaattataatctcattgacaataagaaaagcctttgcattttcttcctccgagtctacctgcaggaccagtacaaaatattcagtcatccaaaatttagatataaggttgcattttcagaaaaatgcggcacaaataataataataacaatggcaagactaaacaaagagtaagactactacgtctttaaaaggattctacataatattaaaaaaaaaataataaagtttcgagagacatctatatgcaaaaccagagcaaagatatacaatgacacaaaaaataaataaaaagttggtcctatatatttatgcctgaccttcaatgtgtaaaccattaaaggatgaaaacaagcaaagcgactccttagagtagcaacatcagttggagatttaaagcctagtaagaaatcaatcagctcagaaaatcgagatgaacaaaaccaagcatgctcctgcaccatgtcaagtaatagagaagataattcaattcatttgtgtgtgagaaagagaaacagagagagagagagaggttagagctatgaatatgtacagacccgcaaaattctgctcagagtgtgataggcttgatgatgaccaatgtcactgatgacctaaatatcaagtatccatgcaaaatttcagcttaaatatagcagttacagcgagcataaaatcaagcacaataaatcatcacatgtagctatcggaactttgattacctgaaagctgctcttaataaagttatagattaaatcaataaggtcctcttgggctccttcaacaaaacaagatgcaagctctagaataaaacatctgaaaaaacccaaacagaagagtttcaaacacaatattattgcatttagacatttcttcactaaacggagccaagtcatctgtaagattctatttctatgatataatggtgttaatattagaggaatacactttggaatgcacaaaaacaggtgacatttacttagttctaaaccccgtagtgcataatatgatgatttaatcatcaagtactattcaactatcactcaggcaaggggaaacaccaacttagcatattttccttcacagaatttccttctggtacaagtatatctacacggtacatcttaagtgtagttttcaaagaatcctccagatattaatatctactcgtttagttgccaaagttgtgtttctaacctaatgcctaaatctacaacataaacagaaagattctccttttacctttgagcatctttctccatggcgtttgtattccctggttctttgtcagccaatttgctttcattctccgacactggttttccaaactcgccactttcatcaatgaacccaaactgctcaaggaatgacttgaaaatctttttggttacagaaggatcagtaatagaggtcaagcatccaatagcgtcctgaaaataagcggacaagaacacaagtttaatatatatcatgtaagtaaacagagagaaaatcaaaagcagaaaatttgagtgctacaaatggcctttgaagccaattgggtacagcaaaagggacaataaaatgaagctattaaatgaacgttaagattatatctcatctgaatcaagatcaaaaataatggttgaaaataaatttaagaagtacatgaagcttcttagagacgatatatgaaagggattggggaaaaagtgaaaaagaagtcctcacatgtgaattgaatatctaaactgaaaaatacacccaagcaatcaaaacatttcattaatggctaaaatattgtaggtggtgagaccttcaaaaatgaacgcttctcaggaggtgactcaagaaactggtctgttaaagcccgaaccaacttgttggaatatgatgctaaagtcttcaaattttttgttgcaactttctttgaataagttggtggacagctgagctttgaaacagattctaatgacacacatggctctgacacatcagcgtcagcgttttggctgagtgcatttttgttctgatttgattaactataaccttccaaaggaaagggaaaaaaaaaacagaaaaatacatgaataaagtgataaattataatttgaaaaaagacaaaggaaattaaattctgacgatcttcaaaaaaatgtcacctgtaatgcaacagcaacgttttcaagcatatgcgaattctttttgagaaacttaattaaaacttgagccagaggtccaacattttggcaaaaatcagttggatgctgacaaaaagaagggagcaatccccacaggtcataagcacgagattgtaaattctgaccaattgttgtgtcttcagctggaagtcaaaaagagtggacaaacaaagaatgaaaataaatataagatgcaaaaattgttaagtgcttaaatgactaattatattacaaaaaggccaatatttcttagttatactaacaaggaaacaccctggaagagtggttccctgaaaaatagctccactgcaaacataccacttttatctttaaggtagtcacaaaaactaaaaaataactaataagcaatgaaaaccatcactaatttctttttcataagaaacagaaaaccattacagctttaaggatctctaacacaacaaagaagcaaaattgatttcagcacattagcaccacagtgcagatgcacaagaaacacatccaagattaattgtcatgacaattataagcattaaagctccaattgatgtcaaattgttaataaggtctccactctataagaaaatacctttacgactggcttgctgaaaggattttgcaagaggaatgacacgatctatgtaatactccaatgacgctccaacaatatatttttttagaatgggcaccaaccaaacatttgaacaggtgaaatcagtgttaacggatataggcacatatgataatattttctcaggtcccatagcaattacagcagatccgatacagctctgaatctgaaaggaatcgcagtaaatggttttcactattaccaatcaaaactggaaaacaatttcgtgtagctactaaagccatcagtctagcataaaaagtacagagaaacacaatgcatcattcgcaagaagaatccagattagctcattattttcttttttattttttccattttctagttttacaggaaacagattttagtaaaactacatgtttagactgaagaagttgatatttatatcaaagacttcaagataactgggtcttctccaaagctattcatgtgagacttataagtacacaggtcattcttaaaacagattgtgaagcgtgaagtgaaatgaatatctgaacctatatatcaattatgttgtgcaaagttacactataattacatgtctgtttaattagatgcaatgacttgaagttgaaagaaattctccaattcagagctaataaacaactacatgtgaacatggaaaaacacagtaaagttaaactttcagctgttatactacataaacacccgttaatgttggaaagaaaacagtatcatactccaacttacatgaacagtgttgaatttacccccactagcaagggtcatcaagtcagcgagtttgagcagaatatttttcatatagttacatgagatccctcctaaaatcaataataaatacagtaagcagcaatcagctaggaaaatacacgagtacaataatactagaaagagacaatcattgtgccaactaaattgaaatgcatggttaccaagtttaaggaacaatgcagatataacagccaaaatatgctcattaggttgttcctcacaagtcataagagaactttccaagatagcacaagtggattttattgcagctgcttcaatgttctcctttccatcatcttgaaatgattgagtatcatcaaccaactgacttgtttggtccacaagatgacttattacctctttcaatatgagtgcagcatgtgatgcaattgaatcttcagaattcagaagtgctgaatcatatcatagataaaaagtgtaagagagccttcaaacaaaatcaaccttttgtatatcaacatagaccagctacttttatgccaacatgtgtatttccataagaaagaaaaaacaaaaaacaatgagaaaaatgtatatatgagtcttccactaaatctcataaaaaattagcagctcacataggttccctaaacaaaataaactatgcaaatacctgcaacagattcacaaactagcgaaagacacttaatatatgagcttgcttctccagtacgaagtatgtcgagagaacgtttcaacaaggttacagcagacttaacggtatccgcaggattcttctctcctaaagagatatatgatgaaagagaaaccacaacatcctcagtgctaggtgcaataacatcagcttttacagtgtcaaaacatgtttcaatggttttaagaatgtgccttgtgagcaatgagaactgacatttcatgagtttctctacatcagaaagaacttttgaccttgttttcatggaaagaaaaggaataataagcttcaacatatttagcatgtggaggacctccacatttttaggttctgacaacagatcatctttagatccatcagagccccttaagttacttaattcaaccgccaaaggcatgtaatattttagcatagacatcaccaatttgctcgcttccttgataacagtggagctatgtattgacttaaaaaccttctcaagacattcttgcgaacatctacgtacctgtaaaaatcatgaaaaacatgaacatgaaaatactaaccagtatcaattttctaagttgtttacaatagccacccaaaagaaaatgatagtttgataaaataaaagcacgcctagctgtaataggcctctacaaagaagcacaaacccaccaatgtccaacccatatgtagaatatgcatgttcaaacattattttcgacccatgaccaaatggtctcccacaagaaattaaaaccatcattaggcaagcaacaaagtcacacgttatacccaaatcccttgcatcattgtgctttaacatgaatatatactttttgaagaaccatagttcataccaatcctatgcactccaaatatttaaatcaaatatacttaaaagaaatcccattctacgtacttctttcaagtatacagtatacaattactactacagcattttcaacaatcagttcataccaatcctaagcaagtagaactcatctataaaaataataataatggaaatatttattaacaaactaacttttttaaaaagaaaaattatttccaaaacaacctcaaggttaactcctacaactcaaaaaattacactaagcaacctaaatctgtgtaaaatcagtgaatgcatttgcaaatttcacactttcatgttgttagtttggcaaattacacaaagattaatgctttgataatgtgccctctcactgaacctacattggggtgcaaaactctaccaaatttataggtcccagaaaggaaatcaaactcaactactcaagcctctgacccttcatcggtaattcaatttcatgagagcataatgaattttatagctactacaaattacaacctgagttcttataaactatagcaatggtgaagcgattcattttatcagtataacaatatttcaactcagaaaaagtcaaacataccttaggacgtttgtcaacggagaatctaagcaacgtttcaaatcccaatttcacagaaacccaatcctccaaattacaaaaaccaaccaaaacccccaagcacttaactccagccctcacagtggccacaccaagcccttccttctccctcccaaggagcctaaccaacacctccacggcttccctcgccttctcagcctcaatcccctgtgacggtacaagcgggagaacaatcgcgagaaaagctagaagcgcagctacagcggtggggtccaaggactgtgaggaagcagaggaagcgtcatcaatagcagtaatgacagcggcaaagtaagccggagaagtgagtggaagggattcggcggtgagaatggaacgcatggcggcggctgtagcgaggaggtggcgatgctgtgcggccgtggactttgcgtaacggtccatgagttgttggcaaatgtcggaggcatcgttgaatgagtcagtgtgatcttggtcgagctcttggtcttgttcgggtttatcgtcctccattgttgtctggttaaggagatgagaaagagaagggttttggagtcggaggttttggagaagcaaagcaaatcattgttgagtttaaatgggccgaattcagttctttgggctgagcaagcccatttgctttctgctatgggcttagcccattaaattctactttatgggctgaactgaacccagctattatgagaggaaattagggataagttgaaaaatacctcttttttgtttccattaatcaaaaatactctcatattatatttttttaaaacacacccacttttttgagtggtttgtccaatatatcctcactctctacttaagtctagcatataatttgcattaatctaaggggtaatgaggatatcatctttaaaagtgagtatatcttgaagaatatgaaaatagaggtaaaaataaaaacaaataaagttaccacttttacatatgaaaacaaatagaccccaattagcttaggacaaggcctatttatcatatatatttggggtaagttgaaaaataccacatttattaatcaattgatcaaatttacctctaatttt

SEQ ID NO: 25448 - DNA, 2232 bp, Cannabis sativa
cactcactcgactagccagctacaacttgacaaccacagcaaaattggtacttattcagttctttaaagaactaagcctccctatttcaaaataaatagacttgttggataaccaaaatagatacacttacagcaacatacctccaaacaaaaatcttgctagaaagtagggacagcaggatggttgcagggtgtccaatcctgcataacataacacacagacgtggtatcccaaaaccacctctatgaagtataccaagaaagaagttgaatagctattgacaggagtgcacaaaggctctgagataatcatgccgaggagcaaagccaacctagtgtagttgggatcaaactacagcatcggcctagcctccaaaaggctggctgaccttggcctcagtaggctggccaatgatagaatcatcattctcgctggccaccaccttgacaagttagtcgaacataaattcaataacttggtcgaccatagcctcctccaagtggccaagcaatgctttaatgtggctagccacctggtatgtaccttggctagaccaatccactagttgtctgctctcatacttctagtctacagtgaccaagaggtaaaaccaaatcttgctagcaagatcccttgaagaaagggaaaggagaagagaccaagctaactcaaagcagcatgtctgcccataaagagttaccaggcccttcaacaaacagaataaggaaaaaaattcttcaagagacttactccctgaagagtattccttgacaacaaagatcctacaacaagcatgtttgggccaaattgaaaaggtctgcaccatggtacatgatgacaataaaggtgcatacatgtctagtgattacaactagaacttagagttggtacttctacccaaacactaaaatagagaacatctcagtaagtactctcactagacaacttatcaattagttcctctaacgtttcaccgtgcagggacctataaaagagctagtatccattacttttcagcacggccttccatcaaacttcagtgatggttgttgcggggtaagccgtctaagggtagccactacgtgatttcaaaagcaaacactaagctgtaagcttttgttacacgtaagaccaactgtgtctaatccattttctaacaatgataacttcttaaaggtattctttggaagttcgacatgcatacacctggtagcaccccaagaaaattcccaagcaaggtctatgaaacttggtgaattgcaagtgaccaagagaccgtaagtctgcacactcacttggggggaacccacactgtacaatgtatcaaactagcacgtaaaattcatagaaattttaacgcttagaataagctacgaaaccggcctctaagtcaagtgcaggcatacttcgacttaacataaagaaaagtaaatttggatacttacatgtcaaggccataagaagatagtcaagatgatcatatgtctatgataaaaggctttaaggctaaataatagtagtgctcaaaaaatagagggcctataggcctaaaacatgaacttgaaagccatagggccgaatatgaaatcagttcaaatgaatagggccaaggccctacaagaaccatatagccagagaagtaccatatagagttactataggaaccacgtactaagctaaggctaaggcagagttcctggtaggttctaagataaaaggtagagttccttgcaggttttaagccatagacaaaactctagacaactgtacccaaggatacttactagacaatgtcactgtacaaggttgggtatcatcaaagcaagtctcaagtgtaacaactttgacaaatgttgagtcttaagttgaagattcgacaataatagactcacctttaaaagtttcatacagagtttctaagggaaccacacatgagactaaggttgtatatgttgggattttatgccctaaataaaatccatttcaacataatcttatttgttatcaataaaagattagaattcatttatgtttacatgtagtattcatgtttatgtttaatgtgtacaagttctgttaaatccagaacatctaattattcagaattacagtgatggaaacacagtggaaggtaattgtgattatatgcttcaaaaggtaatgtcccatgattcatcagtgcactagatttacactgatgtgataatcagcgatatagcttacttacacct

SEQ ID NO: 25449 - DNA, 1815 bp, Cannabis sativa
atttgatgacccaacacacattttatatatacaattgtgaccccaataaatttctaacaaataccaaaaaccgagacttcaagaaaaattattcaaaaaacagcagactattttttttgggtttttgcaagaaaaatggtagactgttttcccaacaacgacctaccattttcatagcagaattagcccaaaacctcaaaactcctccaaatcattctaagctgccaagaacttcaatttaagctaaaataaacattattcatcaaaatacgaccataagggcatgtaacaaattccaccactatcgagctaagtttgagctctaaaactcaaacctagctcaatccatgccatggccagcaattctatgcaaaaacaacatcaaataaccataaaataactctgaaatcatttactaagcatctcctaaccaaacaaaaacaaacctaacactacacaacttcaaaccaagcttacccctagagatttcaagaaaatatagagtaagaacttaccttgattaatactagcagactttctctaatttccttgttggattaacttgaaagctaataacttagggtttgaatctctttgagttttggatgaagccaagagagaaggaggggggtttacagagagaaaggtttgagttaatgatgatgatctttttcattccttctcatatactttaaattaccattaacttagacttagggaattctactaactccaccagctcacccttaaaagaataagataaacctatgggtgattgccaaattaccccttactttcaccctaagttaccaaacatacctagaaataaaatggtcataagccattaccccacacaatcccaacatcccaaatgtctaactatctcgccttgctaattctgaaatacttaaccatatctaaaagactctaatgcccaaattatcgcattccgctgttatcgggtataaaatataaaattcataaaaattcacatatagcatatataatacacctaaaattcaaatatatctccgtaattgagaaattattttcataagccctaattttctactaagaagcatattgttatcctaaattttgtctacctgacttgacatgtccacgtaagccaagacatagtacatgtggaatatagccttgccaatagcagaacaaagcttccttacaaggtatggccaaaaccgtcaagcagcaaacaaaataagttatgcgagccgtcaagcagctctaccaacatgtctagatggccaaggggagtctataggccggccaaatgagtttgtatggcaagccagggtttgagcataagctggccagccaaaaggcaacttttagaccaaggaagcctaacctctgtaaggaaaaggtgtacaacggctggcctccatctccaaaggctggcctccacctcctaaagctggcctccacttgccaaagttgatagaaacatgacctgtaagatcttggcaggcacatggctggttagaccctggcaggagcatggccgaccagagctcaacccgtagacattatatggtcggccatcctacatcctgcaggtgcatgtccaaccatcttttcccttgtaggatattgatgtgcaaccttcatccgttgacagcaagccaagctatgagttgggccttgacagcccacaaagctgctacgaaaatatcatcaactttcttattttcaagggaaaattatgtaatgactgctttagtaatttgaattagtaaaggcaattagcactaatttatgatatttttataattatttatgggccccattgtt

SEQ ID NO: 25450 - DNA, 2840 bp, Cannabis sativa
ttaggcaactcacttacaaaaatgggtgtattttagtgaaatataatatgagggtatttttggttaatggatacaaaaaagaggtgttcaccaacttatcccaattatttatacagggccggccacgagtaataatgcgcccaaaaatatttttgtatgtgttatatctaaagtaaagtgtgagtattaattattggacttctttttgtaaaattttataaaaatattattttttttcttatgtaaagtatattatataaaaattttaggtttcaggtttgggtgggctttaggcacgggtctagtttgtcttaattcaggaccagacctgtaatataaaatgctacctcataaaagtgttaggcacctaagagcatctcaatagtgttgctcgaacaaaatgcttaatgatgtggaagaatgcttgaaagggagctacccgtttgagatcaaatgtttggatgtaaaaccaaaaactaatattgattctaaaacttggcaatattgatgcaatatcatacccatttttctccattttttttaaataaagtgaaagcaaataatatattacataacaaattagtgtgatatggtagtaactttaagaattgcttattatattaaacatgtaaaaaataatgtgaaagaaaaataaaacaaaatatttttcttgaattatgtaaaaaaatttaacagcttttaaagagtactattggagatgctgaatagtgttggagttaatataatagtaatgcccataaacttaagcatattatatgtagtattaatgttatcattaacattaattagttatggttgatcagagacttcgattaagagaactataaaattctcttacaaaaactcgtgtgttaattaatcccaacaacaaactcctgactaataaacctcaaataaattaattagccacattactttgttttgaaacaacaaatttgactccattttttttttcttattatatagctcgattgaaattctaagtctcatgaagtatatataaatatatactacacacacaattatacacatatacgtatatgaataagaataatctacaagttgaacctttattattttataaattaaattgagtgtctgtgattagtttgttgtgaatattttgtgtcaactctataaatattatttttcattgataacacatctgtcgtcaaaagagagaactaagcaaacaaaatataatagtattaaaaaaatagatcaaaagtcacaaaaagaatatgcatactctatagttggtgtttttgttttgttttgtttttcttttttttgaagtttaataaattaattcattatatgtatatgtataattttaatgaataataaaaaaaatgtatcttttatcaagagggataatggagagtttatgaccttgctatatatcttttgcaaatattggttttgttataattcttttattttaataattaatgaactcaaaaaaatcttcaaccaaaataagcttttccaacagcgacaactaattatatatagtttaaggactaattatacaaatttgagaacagcaacaagcaaattttattgattaattagttatttaatcatattatgagggaactaaatcttcattatgcttttattccttagctgtcaaattgtttgttttttttttaattaacaattaattaatccacacctacttatgaataaacattgtatcaagctcctcgacaaacttacaacccatacgctgaatattaatgttgatgtacttttatttatattattatgtataaattaatgtatcactaaaaatatgaaagacgtgcagttttatataattagtttatgtgtagtatatattttaaattaatggtgttgtttgaatttatatgtcttccaacaatattatcatgtcttaaaagaattaaactattctgtgatagaaatgaagatcaattattacaaggattataatgaatgagagttatcctaatatgtttttttttttttatttggagggcagacaccattgacccacccaattaatagatagaatattgggattattttagaaatattgaaaaatatttaaaaaaattatgtttttatagaattatgagtttttttatacatttttacggattttttttttacaaattgttatttacatgttgttctaaaaaaaaacttttatttttatgttgtgaaaatatattataacattgttacaacatgaaaataacattgaaatacaaaatgtattaaaaatgtaaataaaaaaatatgtaaaaatgtaaaattaaaaatttcatttttaggtgtgtgtaaatttccctatatattacaagaacttaggaatcaattatgatattttgtttgttgttgaaataaacattgaaatataattgataaattaataaaattattcctacatattaaaatagttttatatttatagagaaatggtattagaattattttagttttactttaatatttaatcatttgtaatattttatttttaaaaaatcatttgtaattcttactacatagcttctctgaattcgtttggtacgccatattgtattgtattgtatacaatattatattttggtggagtgactattccatatttgaaatggaaggaaaatccattccaatacaagattggaaaaaaaaaattataatgtttttctaatgtattttaaatttaattcggtaattttattcatatttcaattactatttttatttttattcctatgttttcatttcttttaaacaaacacatctcattatattacttttagcaaaccaaattaacattatattag

SEQ ID NO: 25451 - DNA, 3321 bp, Cannabis sativa
cgcatgtagaccatttaaacctatagccttgtcactagaaagctgaaagataacttttctcacctcatcagcaatgaagtcttgggctaaaaaacccctatatcttgttcctcaagaccggatcccagagaatcaaagattgaagcagcaacttcaatatcactcctctgagaagaaaaaaggtcagaaaaagtaagggtttatcaaactaacaatgctatcctgagtattgatcacagtaccatttgcagctataaggtacttgatattattagttttcttacgaaaggaagcatgtttatggaaaattttcatatttttatccccaaccttaagccatttaattctagcccattattttcaataaacttcctctttatacaacattgcatctagcatagattgcagctaaatgaggcgatttttatcaatgtcactaagaaaaaccttattctaaatactatttatatcatgagtaaggtgctggattctggttttaaaaagatggttgttgcatttatttcaagttttaagagaagaaatacagtggttttacttagaaacgaaactatggaaatggttattaggctgactcagagcaggacaagcattccaggttatatcaacaagcctgtaaaaactgggatcatcaagccagttattttcaaatctaaatctcttattcacgaaattaacaggattaggactagaagtagctaaaacgagctttaaagctcgatgatccgaaccataaaaccctaagtggtgaagactattatcaggataaagatcacaccaacactccgaaactacaacccaatttaacctctcactgatatttttattagtccaagtgtacttattaccaacgtaaggaaaaggaaacattgcaaactcactgagaaaattggcaaaaaaaaagacatagaaagttggtcagggagattcccaccaatcttatcactactaaaatgatagctatgaaattcaccaatgatcaaccaaggtagattaggagcagtataaaaaatatcatgtaataacttccaagtaaagtgcttttgatgactaacaggagaaccataaaaataagtaaaatgtcacatgtcattaatattaaaactaacattacagtctatatgattagaggaataatttaaatattaacataaacatcaactctccacaaaagaagtagccccaccaaatgctgcctagggacctcaaaacgaaactcaaaacctaaagaccttttaaacctatcaacaaagtggggcttaagcctggtttccattaaaaaagaagagttggcctatgagtcttgaccaggagggaaagatgattgaatgctcaaggattcaccagacctctagcatttcaactcaggagactcatttttatggacaggcgtgctcagcatcacccgcctcttcaagatcaacaacaaaagaaggaacatcagagtctttttcaccagccctagcacgcttgagcatggagtgcataaagcctccaacattggcttaaaaggtttgaaaggatggtcttttaactccagaggcacaagcaagtcccttgcctttaacctaaggatcaggttggggaacatccatcctagaggttcaattatcagcattgttctagcccaaagccagagagggcagagcttctgcaagagagtgggtagcatgcactaattcaggattggttaaagccagactatcactaacaataaatgaatcagtggagatcgaggcaagatgtgaagaatgagacatagaataagaactgttacaagttgtgccaaaagatacacaatccatggaattgttagggttgataagagtgggaatcatgatactttgagaatttctgggagcgcttaaacatgaataggatgccatatttgaattgagcaaaggcgcaaaactaatggattgagtcatgaaaggattcatcatttgacctccttgagagaaatcagagaggtccaagtcaactatggtaatggctagggcatgagggtactgaaaagggagaggcttctcagaggactttccctttccacgaaggagaatatcataaggccaaataggtgggataagtgattcatcacatttctgaagataagcatggcagtatttcttggcatggtccagtttgccacaataaaagcagaaatcagagagcctttcatacttaaagtctaaccatttggtaaattccctacccattttaagaaaatgaatatggatgcctctcctgattagtttgttaacatcaagaaactgaaccctcaaataaggtccagttccttccctcacagtagtgctatccacttaaatcagttcatccacacttgtggcaataagtttagccaattcataggacttgcatcgaaaagtgataccatagatttgaaccaacaaggggacataatgcaaatttttaggggtataggaaaagaattatatggagcagcaaagatggtgagactttgggcaaaatgccaaggttgtccattaaggattcttctcttatccccctcacagccaaaagtaacaagaaaaaggccatcagagtgctctgagagaatcacagggaaacgacactgagaagtctaaatttgagagagagttttgatcaaggaagaacggctaaagtgttttacagtacaaagtttcagaaggagattgataccattaggagtttcttcaccgtatttttatcaaaggttaggatcatgggttgggggaagttaaaacctaggtcttccataacgagactaacaactatcaagatgagcaaataagaaagaacagagctaagcaggtgcatgaaaatgaaatcttaatcgagctttatcaagaaaaaatactagacttcgtaggatgcctcttggcttgcttctgacgatagctcctattctaggatccttaggcatcatgatggctccatcatcaccatcgtttcaacttgccaccagtttcatgaagaaaaaaggatctttgggttggctcctgatttgatagttagagttggtgaagtcaaatattaaaaagtgtcgaggaagacacaaccaaaagagagaacgaaagggcggggtgcaataaatgcagtagaactcttcgcctgaagagagattctgaggataaaaatcgtcagagacattaatgcagtaactaatgtgattagaacggaaatgatgaaagaaactagagggaataactgttaggttttgtgccctaaataaaacccatttaaatataatcagatttactaattaataaagattataaattgttttatgttgcatggttc

SEQ ID NO: 25452 - DNA, 1910 bp, Cannabis sativa
  modified_base (869)..(869): a, c, t, g, unknown or other
gtactgcataccatgtacaaatctgataatgtaacacaaaaagttaattaaataggaatagtagtactgaaaagatcacaatagttcatcataataatggtattaccacaaaaacttgttacaaggggagaagctttcacccaaattacatttttaacattttggagaaaaagttgacaaataaccgtagaagcaattaattacatatattttggttttatagatttaatcacactaaaatagtaattattcaataattattaaaactccagttacaaaaaaattattattcattatatatatatttagtaaatttttgaaaattctccaacaataattctggagttttttttgaaaattttgtaattggtgactaaaaataattatttgtgctgtttggccaccttgagttgatggaatgaaaagtgtgtatattgagaagtacatagatttgcatttaatcttcgaaaaaaacaggatttaattgaatatgtagctaaaataccaaatgaaagtagattaattttttttttcattttcaaagtgcatattttaccccaatcttctttcttgatggtacgaaacaatagtataattaaaataaatacataaatcactttaaattcaagaagtccagtaggcagattactttcggtggaggataaaaatggattaaacttaaaatcacataatattactaatttcatcagctcgaatggttaccatgttttcacttaaaaaaaccatctttagtgataaacttttaatcacaacataaattttttgtggctaaatgtgacttttagtcacaacaaaaaattacttgtaactaaaaacacatttaattataataaattgtaatttttgtnactaatatctttagtcacaaactttttagtcataatatatataagaattattattcataattagtcataactttttcacttttaatcacaagatttattgtgactaaaagtaaataattttgtagtgttattttgtttatttttatctttcaaaaaaaaaatccttgcagtagaaagattaatctgttatttcttacatcattccaaacatgtcaaatattatagtatagatcgttcgtaaatgtaactcgttcaaacaactatttagaattcctagagccccatgcaaggcttgttggaaaacttgttgctcaacttggttaatcgctatttattgttcaaaataaatagttttatttctgtaattttttagttgttccaaagtctaagaagttgattttatcaaatttgcatatgacttcattacgttcgttaattagtgtgtgtagtgtgtgtgtaatatataggtaggaagtgaggtgcactatacaatcgtacttaaagaaacctaattagaatgagaatgacagttacgttcattatcaatgtagataatgtattatttagaaaaattaaaactagcaattatatataactcaaatttatcatatgtagtatttaaagtactatttctccaacctgaactagcaggatctgccacacagaaatcttgaagaggacttggctcgaaagcaatggccaaagcaaacgtggtggccataaaaatcaacagcaggactcggtttgccatgaatatgatcttgaatatatataatgtaaagaattaatacctagttataatatacctatatatatgtattgcacaaaatcaatttgagttgttgtgaattaaatgtagtggaataaagctttatatagaagatgctcgtgaagaaagaaatagcttggttacaccagaaaattaaagttgccgtctctcaacactaaaacaagtcttatattaattaattacaatctgcattctgcaactcaagccagttcaactctttctgtccatgcattcaatccaaaattaatgtt

SEQ ID NO: 25453 - DNA, 4001 bp, Cannabis sativa
tgccaagggttacagaatatgtatctccaagaaggggaaaccaaaggtaataatagtaagaatgtggtctttaatgagttggaatttcccctcttgacaatcgagaaaggtagtgtttctccgtatgatgcagaaaattccagaaaccagaagctatggtggaaccagaagatattgcacacacaaaagctggtgttgaaccgaaagataatgaaaaccaaacagatgttcaagaaggatccgtacagaaaggtctaaaaagttattagttggcacgggataaaaccaaaagagagattcaccttccaaaaaggttcgctgaggcagacttgattgcatttgtactggcagtggttcaacttattgaaattgaagagcgcagaagctacgaagaggcaattttaggtggaaacaagtcaaaatggcttaaggccatggataaggagatagattcactctaaaagacccagacttgggttgttttatcgaaatcggagaacaaaacgattatgaaatgaaaattgactctcaaggtgaaagagaaaatcaatgagaatgaaccagtacggttcaaagccaggttagtgactaatggctttactaaggtggaaagagctgcctatattgaaatcttctcatttgtggtaaagtacaagacaaattgatgttgtcttttgcaacacaaatggagtttgaagttgaacaacttaatgtcaaaattgcctttctgaatggattcttatatgaagatttctacatgaagcaaccacttgggtttcagatggaaaggaaaggagttgaattggtatgtaagcttcacaggtgcatatatggtttaaaacagtctccaagacaatagaataaaaggtttgatacttatatgcaacaaattgggttcaaacaatcagcatatgatcactgtttatatacaagaatctagagcaatctacagttgtgttcttattgatctatctggacaatatgcttataatgagtaaagaccaatcggtgatcaaaagtatcaaagccaacaaggaaggaacagtgtcctactagtgcggaagagaaagaggaaatgaaggatgtaccttatgcaatagttttaggatgcctaatatatgtattggtgagcaccagaccggatatagctcttgctttaagcatcccaaatcgaatcacatgccctgagtagtatgaaggtagccatagtacaaataaatatagaagagaatcgatttaaacaaggttcttctacaatctagagattacaatttactttttcactcttccaacctcttcaagatgcattccgtaatgaactcaaaatcccgaacctgattaatagacaacaaaagtggatttttgaagaacttatcctacatgccaagctttcaaaaacccaacaaaaacatctctttctttacattcaactttctattcaaagagaagaccacaatagatctcctgacattgatagtctgtctcgaccaatcacattatttctaaataaaatcttggaccaccctaatctcactcaaattggctttgcaaaagtaaaggtgccatcaacacacataaaaaatcgcctagggtaacttgcattttgcatatggcatattgcttttttttttttcttttggactgatactataaaaggtctaagttatgaacataaattaccgctagaacatcctgactcataaaacaaagatggagtaattaaaaaaacaaaaaggagaattaaggtatgtgtcttcaactgccttcaaaacactccaacatacttgctctgtgaacatgctccttctaccttgtaagtcccaattcaaataaaccttagacttatcctattgagaaataagtggcccttgaaaggaatcagaattaatttgtcaattatcttgtctagcctgaatagctaatttcaatctcgaaagttgaatttgaattgtatctcatgaaagtgaaaacttagaaagttaccttgtgcttcgaagcactcttaaaattcataggcttattttatcctattatttgaaagccctcattataaagctttatgaagggggaaagagtattctcaaagactaacaacttcaaatatgattttagtgaaaaatagaaaatcttcatcttctagatccttagtcgttactcttctttattacaatgtgtaagaacttcgtgtatatgaggagctaatgattgtaggcacatttcttaaattaaaattatttagtctcatagtatgagatttagagttccgtgatctgtaagggtaatgaccggtaagttgtgcaatcgcacattttttagggaaggtcaaatgtgatgattataagattgtgtaggtgtaagactacatagttgaataaggcttaaatagattgataggtactatctctgacaacaaaatgcatcttcctttcgttagccaatcacttaagaactccaaagttaagtgatgattgacctagagaaatcttatgacgagtgacctaagaagttttttagaaaacgtgcaagtgaggacaaagcacgctggaaagaatcatgttggattcgaaggtcactcgttattccagaagcagccaaagtaaaatatacaattaggtttaccaaagcaatcaacacattagcttgattaatcaaggcccatcaagtccatttgagtacaggtatggagtggaaaagtgataaacctatcacatctaaaagttttcagttgtgtagcttatgggaaaattagtgatcaaggctggaataaccttgatcctaaatctaagaaatacactttcattcgctatggcggggatgagtttggctatcatatttcggatgatgaaaacaaaatggtcattcgtagtagagatgtgattttcaatgaaagagtgaacaaggatagagacaaaattgacactagcgactcaaagcgtactgggccaatatttgtagatggagattatgatccaaatagttctatgacagagatgattgagacaagtcctcagcaagaggaacttattggacaaagcgatatccaacaatctgatgcaacactacttcctactccaactcctgtatggagaaggtcttcttggcctcatgtgcctaacaggagatatatgaactaattgttgttgactgatgaaggagatcctgaatgttatgatgaaacatgtaagactagtgatgtaagcaagtgggagttttccataaaagatgagatgcagtctttgatttccaaccagacatgggaactagttgagttgcccatggataagaaggcacttcacaacaaatgggtaccgagtaaagaaagagtacgatggctctaagagatataaaactcgtttagtagttaaaagatttttgcaaaaggaaggagttgactatattgagatttttctcctgttgtgatgctcaatattattagatcaatgttgagtattgttgccattgaggatcatcttgaacagttagacgtgaagattgcttcaggaaggctgcatttcttcagggagacttggatgaggagatatacatgcatcaatcagaatattttttagaaaatgtgagtatggtatgaaaacttaagaaaagtttgtatgtcttaaaaccagccccaaggcaatggtacaaaaagtttgacagttttgtgcataaggcttccaaaggtacaatactgaccattgttgctatttcagaagatgatatgttaaaagaaagtttaaatatgaaggatatcaaaacgtgcaagcaacaattgtcaaaagagtttgacatgatggacttaggtccagcaaagaagattcttggaatacaaatcataagagataagcatatagggatttcatagttatctcagtcagagtacatcaaacatattttgtagagattcaacatgggtgatgccaagccagttagtatacccttggcaagtcattttcacttatccaagggtcaaattcattttgcctcaactattgggagtttgatgt

SEQ ID NO: 25454 - DNA, 4720 bp, Cannabis sativa
  modified_base (172)..(174): a, c, t, g, unknown or other
catataaattctcatatattaaatatataataatataattcctcaatattacataattatctaattagagttttgctaatccatttcttaatcttagggcatctcatctcatctcatgtattatcaatgttgattttctttaactaaatatatagccttttacgtaataaannnactacagaatttaataataataatgaacaccggatattttacgtgattttgtagttaaaatctacatactccacgagtctgtattattagggatatttatttgattacagagtataattctcaataatgataaataatagagttctctctcaattttttttaatccatttttcatggattctgtccctatttataggtgcataggttgacagttatttttattgggatcgattcacttaaaactgccaatgaaatgttgacattcaccatatttcatttatttgcacatgggataatatctaataactacctaactgctccttgcctttattctttaaacggttatactgactaataaggttgtttctcgctaagtatgagttatctttcttattcgtttttagaggaaaaaatgctaagtgtagacttgcttcttctcgcagcactctcatattataatgatattagtgagatgactactattcgcgttgaaagtgagatggttgaatgtaattattttcacactgctcatgtatgtgagtcaatgagctgcaagatctttgaggtctagtcttgcaagttcttattatatactatgtttatcccgaggcaaacatattgcctcgtcaattatatccgttaatagttatttattcttatctcgtcaataaaaaaaataacaataataataacatatgatgtcattcatgatatacatcaagtttccataatacaaacacaaagtaataaatttgaagaaacacataacaaagtccaaaggccacaacaaccaactagctatagaggcataaataagcataattatagtttttgaatcccttattacttaactcttaggattcatagcataccaagtttgagcaccagtcatcaaaagaccgattgtagcagccgaaacagcaataatgggccatggactactgaaatatctctcactaagttgagctatccaactcgcatgacatctcttacaatgaatttctataccctccttcacattacaataaaagtctttcgaatggtcatagcattttgatcccatatcattgaatagtttggccacatctgcatcacaactgagtctgtgtctaagtacacttgacttccttagttccttaacatcttcttctccatcaataagaaagtccataaatttaacaaaagaagctattggatactctttgggaggaagacacatctcataggccaccaaattcataagcttaccctttgtatatttatccactgtaatttgaggaagcttaagatgcccttttatgttaaactttccattcttgaaagatatggatttaccaaaaggtatggattggacacttggcttaaaatctattccagctgatttaagctctcttacattgcgaaagtaccttttgttattgacaatatttgttttctgaccaaacagattcctaatacgacacataaaagcatctgaataaggcttgaaacgaagcttaaaagaatccgaaaatgggagtaatatgcatatcaaaggcatcaaacaacacaccaacaaatatttaaaggtagtgattgtaagtttagtgaatgatttgttgggaggtgtgataatactctcaccagatttgataaagaagtagagaagttgaagaagatgagcattatgatgtttattatgaataagaattttatcacattgttccttactgtactcctgtcttactggctcctttgtcttgagatcattgatgtgaaggaaattgagaatgtcaactttcaattttgtagccaaatcttcctcaatcgaatccaaaatcagttcgattacttcaaatgggatttggttttgaagcaagaataagtcctcttgaatcaatgttgcttgcaaattatcaataccaaactttgttacttcactatgaacatagttgtgtatgaagtgtagaactgcacatccatccaacaaaagtaacttggccaaggaatcatcactaaatttgattattctcacccatttatctgggggatcataaacattgttaaatatactctctttcaagttgttgttgtcaatgctgttcttgatttttgatagtaactcagtccctttcttgtccttgctaaatgatttgatgaaatcatttgccaataacagcttgaggcaccatttatcattgaacattatttcccacacattcaattcatctctaagttgcatgtgtcggttaaccttggcctcatacaaataataaaatataggaccaattggaaactcttttggataacaacactcaaataaatatttataatctctttgcaaaatttgtggaagccatcctatcttatcataatgcatcttttctccgtctgttgttgatgtgttcgttgtaattattttaagaaaatcatcatttgaatctcccaaatcaatacgaatttcataagagcaagaacctgcagacatcttgtactttgtgaccctttcttcccaattcaatgtccaattcatgaggtcaagaaattaataaagtttggtccaacctacatgtataaaatgaatcacagatataaatatgaaataaaaaattaattgaaataacattattgttagtgaatatatattataaggtcatttttgtggaataagaagaggtagaagctctgttagaggaatcaaattttagttaggagttagttagtcttaactataggcttgttatttttcagttagtaacattccttataacattattgttagtaacattccttataacactcttgttctcccacttgaaggaagggactataagtaggtacaaagcttggttggtggccaaaggctcaaaccaataacaataagagttgttctaatacatactcttttcaaaggatggcttgtaagacaactggatgtcaacaataatttttaaatggagtattacatgaagaggtctatatgacacaactcctagctttgaagacacatctcaacctaatctagtatgcaaattgcataaggccctatatggtctgaaccaggcaccaagggcctggcttgaaaggttacacaactttctagtatcatttggattcatatctccaaagtctgatcattctttgttcatacatcacaccactaaatctgttactcttatcttagtttatgttgatgatattttagtaataggaagtgattgtgaagtggtgactggacttatctcatgcttacattagactttctccctcaaagatctcggagacctcaaatattttcttgccatggaggttactctaaacaacaatggtctcttgttatctcaagctaaatatgcttgagacttactttgcaaggttaatatgcaagatgctaagcccatcaacactcctatggtcagtggtttgaaacactctcctcatggtagtgtaagtctttgaaaatcgataaatgtatcaatcaatagtaggtgcattacaatacctaactatcaaaaagacttgaactttcatacagtgttaacaaagtatgtcagttcatgtagaaactactacaaatacactggttggttgtaaaaaacgcattctaagatatgttagtggtactataaactatggtcttcagcttcccaaacatccaataatctcattccatggaagtctcagaagcatcccactatctctaggtccagcacgaatctagaagtcttgccaatgttgttgctaaattggcttggctttagtccttgttcactgagcttcacataaaattgtcttaacctttcctggtctagtatgacaacctcattaatgtcctactcatagaaaatccagcactccatgctcgtgcaaaacacattaaattaggcctctactttgttcaagaaaaggttcaaaatcaccaagttgtagtaaagcatgttcctgcactagaccagcttgcagatggatatactatggccatttcaagttagaattttttcaaaattcagatccaaactcacaattatagatggctccaattgtgagtttgcggaaaggtgttaagggaatcaattctagttaggatttatttagtgctaactatcatattaattattttttaattaataattgtagctattaactctttattgattcaactaacatcctgttagtttgttagattgtaacattctatataagagtgtaattgattcccaataatcaatatacaattgttttgtctccataacctttctccctctttctctctttgtttctctttctttatccttctctttctttgtattttgcaacaatgtcacgaagactcaatacacctaacaagctctaagctttaaacatgattggtttcactttcaacaagaaagtgcttatgtgtgctgagtttgcaaactcgcataagcttgactagtaaattttataaagcgtattttactccttatttctattaagaccttctacataggcaggggcgtagccagactaagatagtaaggggggccaatatcaggtactagaaaatgcatacaaaattgaagaaaat

SEQ ID NO: 25455 - DNA, 1911 bp, Cannabis sativa
  modified_base (1811)..(1812): a, c, t, g, unknown or other
atatataaatatataataattaagtttattaatctcaattatcaagtttactcatcacagaagaaactttccctccctcctcctcatcatagacttttaagctgatgtagtttccggaaaactccttatccccatgaagaactacgccggccttattacaatacagatataatacagtatttgcagtcaatgcaataagtaatattgaggtttgaatagttgaaaataataaaacttgtagagtcaaagagaataatattatcaacttatcactaccatcttcatcttctgctaattcaagagatggccaattcaaacgaaaattaaccaaccacaaagtggccaatggtaatcctgaacacatagacatattaaacacaagcaatctccttcccttgaccaagctccaactccttttcaacgacgccaaacccgatatcttttcagccacgaccacaacagacgacagagtccaattcacatgaagaaatatcgcaaccgaaagttgaacaatcgagaaagccaaaaacagtagcagaaattttggtgaagagaaatcgatgttgtacccatataaaacagctccgagaattaaaagagataagacgaacgaggagccaaaggttataagaacgacaatttttccggcatagttattggtgaccaagagcctgaaaaatgaagtggagagagatttggtggcggattggagattgatcagggtttggccatggaaggtttcgatgacagagttggtaattgttccgatagctgaggtggaaaagagtgagatgaagagagtgtaagcgaggacgaataaaagggttttggttgaaaaagtgaccgagggttgaacagaaaaacgaaatagagtgaagaggctttcaaagtagatggggaagatggctgcggctatggagagtgggataaggaagatgaggcttagggtcaagaaatggcggggttgggctatgaggactcgcttagtttcagagaatatgaggcgtaatgttaattgtggtggtggtgaagtttccatgggtgctccaaattatttttgattggatttcagatgagaaattctgataacaaggcaagtgtatatatttctatactggccggttgaaaggttgtgtattctactactctgactggtagttgtatataaatgtggtgagtgaactcagaaactggaaaacgaaaacgcgctattcataaagaaaacttcgttctcaatttttatgactcgtttgcaaaacattaataactaataagctgcctatagaaattgactttcatacgtcggggacaggacttattcatttctatcaataatatgattacttgtttgttagtagggttatgcttataaaagatgtaactttcacttcattagaaacgaaaaatgttaataaatgtcacgagccacttgggttcaatccagagtcgagatgatgaaattttaaagagaaatgctaaatgttccgacccaagtggattgaattgcctctcgagcccagtggatgctataaatataatttaattttgcataaatatctaaatgggacccacaaattatttctatcattcacttttcgtatctagtcagacttcatattctgcatcttcactttctttattatatagctgtgttttttttttattattttgaaacgaattagtgatcacaggccacaaccaaattggttctcacgacttgttagaaaattaaaatatatatagaaaattctacaatccaccccttaatacattgatgcattcttatctatttaagacatcctgcaaaattnnaagaaatttagaaaagtttaacaccctaaaaaatacgttcaaacagtgtgttatacgagtgtctattttattttatacgcgtgtaaaataactgtttga

SEQ ID NO: 25456 - DNA, 3593 bp, Cannabis sativa
tttagaaactttccataaaaaggttattggattattaccttattaattttttttagttcccatcaattggtattacccattaagaagtgttcatatatttgcattactagaaaaatacttatttccttcggttcccaaatcgatttttttaaggaccgttgttaataaagttacgtgactatttagaaccgtcagaaatactccaaccagttttaaacaaccatttagaattcctagctgtgcaaaacagtcacagttttaaaattcatagatgagttaaaacggtatatccctgatggtttaaaattattgtgtatactatggccgatagtttaaaattgccagccatagtatactcgatgatgaatcagtctttgaccgattaggtaccgtgcatgatctcagggatgacttaaattgtaatgccctaattaggcacgctacaatgctcttttgattactgtgtacttctttgctaatcaaagagttttttcaaaaatcgtagtaaatttaaactttttcgaataataataacatttaataaccataactttataaccaaagaaatatgtcaggatcccgcttttaaaacttgtttacatctacaaaataaactttataactatgacacatacaaaataagcctatcttgtcccgagatcgaactctccaggtcacaccgtcttgacaagtacaatcaccttcaagcaccaaacactactaatgtgtaatttgcgtcggtcaatgcgtctccctaaaatggttgaccgaagcaaaaaataggaagagactcattgttgctcagccttagtcttttctatacctatacatgaaagtaataactgtgagtcgacagactcagtaagataagcacataacatataatatactatcaacttgtatctaggcgccaatcctaaaatatgatacataacctttaaacttgcaagaattttgtaagaaattggccggatccagttgaaaggatcaactcggaggtaattacaaaattctttgaaataatctctcaagggaagaaccgctccagccttgatatgttcgaggctccaagcgcctattcccgacgagttactagtgctggctccactacactcctcgcgaattaccatctcaagagggaaacaactgaattccccaggagcaacatacctactgcgacatccacacctttgttcaataccacaggattttaatatgcctccaacatatgctccaatggatctgatcttggattacataagttcaatttcgaatgtgacattgggatcctgtagggtctttgacttacaaggcctagtagacataatgttaaattcaaggtcacctggtgaaaaagtaacagtgactttggttaaaaatatttgtctcacgagtggaatagaagataaatatggaggttcaggccaggctgcgtctttcaagaaacgacgtttaacctcaaatatctcttgcggaaatcgcttatagcgactagcaactttgttgtgattggtttttattaaatggtccctaatctttgcatcatttacttcaagtaaggattggggtttctggattgggtttaaatggaattgttaattccttagggcactctgtttctaagaatcccgaaaaataaatttcagaaccagattgagacatttttttttataaaagagcaattctaattcctggaagaaatttattaaaatcgaaaacttataaatacgataaacctaaaatttttactctatctaaacccttaaaattacccaaaaaattaaatcaaaactaccaaaaccaagcaaagaagaacgatgatgcaattagttataaaaaatatatatacactaggaaggaagaggatgaacaacttactagtcagagatggatgtttgcgtagggaggaatcctgtaactgggtttgagatgaacgactaaatccctgggaacttttgagattggagattaagtgtgaagaaatttgtaggaaataagtcacggacataaatggcatattagaaaaagggtttttctcaaaaaaaaaaaaaaaaaaagcttgaagttggttgaatgtaaaaatagtggaattatggtttcatttaaatttttataccttgagatcggtcaccgttagattaaaaaaaaatagagatctaacagacaagaacaagagagaattggaaaagattggtcattaaatgctaatgatgtgcatcgaaaccatgaactaccaaattcaaaagcatgtgatttttcaaattgggtcaagaaaaatttaaattaccctttgtaataacttaaaaagtactttttaaggggtaattgttatacccgaaattcagttgtacttcagagagtgacacatgtcaatcaagtggaatatgaaccaccagatataataacgattatatcatttagtgcaaaatagaataactcatcaaatatagaattaatagagtatattcataaatcgctcactgtatagtcttaggcgagacaagaatacacaaacctaattcttgtattgatgagacaccatcttacattggaagacacagtctcgagatttcgtttttaaatagaaatattcaaattaactacatgcaatatatagcgagacatccgctttgcgacacataaggaaatattgacgagacgaatcaactctcgaaacacaacgtatattccacattataataactaagtgtaacaacttggaaacatgtaggacatgattgtccagtctgcgttgccttatggtcaaagagcagttcttaagtttgctcagtacattaggctcatgccattgcaggaaggcatatgattaaaccaagttattattggtcatctatatacaaaatgagataccactatctcacgtcaccgataaccgccttgaagataaaaatgataagcgattgtgcggttatcaatatttgttatctacacgtgtttaaatgaaacatgatcaaagccctcatttcatgaaacagttatgtaactcaaattcaaatgtaaataaatgccggcctatatttctataaataggggcaacttctacaaaaaaaaaggggacggaagatctttgagagaaaaaaagatcactaattgtaatattgtattatatactcagaaatatcttgaataagatagactcgtggaatatgcagatttaactgcaaaaccacgtaaaatatctagtgttattattatatttaataaacttcattaatatttataatacctatgttaagtttattacgaaaaaggctcataattcgttaacgaaaatctgcattaatacacacttctcttaaaaaagaggaggtctcaagtaagaatcctccctcccttaatgtcaaaaaaaaaaattataaaaagaatgtactaataaatataattaattatcgacaatataaataagacaaaaacaaaaagggaaattaccccatatgttattttttttaactattttttttttgaatttacggttgcagcgctagttacaatatggatttctatacgattttttgttgcagtttaggttgcagcgctagttgcaatagaagtttctatgtagaattctgtaa

SEQ ID NO: 25457 - DNA, 4376 bp, Cannabis sativa
  modified_base (4312)..(4346): a, c, t, g, unknown or other
tgattctagatattattcagctattctattggactttgggggcctaattcgcagcccatctttgttgtccacattttggggttgtacacattgtcttgccaggtcaatcctggccggccatggtcttgccagggtctggcaggtcatgttcctgccaggatctggcaggtcattatagcttcaccaagaggaggctagtctttgagcgtggaggccaaccttttacaagttgaggacaactttgtacaccatttccttgtagaggtcagattcccttggtcgaacactagctcccttggtctggaagtcacttcttggctggctagcttgtgcacatatcctggccggcctataggctcacccttctcttggtcggccaaggatgttggtacaattcattgagggctcgcttcactccatttggttattacttgacagttttgctatatctttcatgaaggctctgttctgctattggtgtggttgtactccacaagtactctatctttggttacatggacatgccacgtaaggtggacgaaatttgggataacattttccctccaagtccctattcgaatgtctggtcggatagggactttctagccatcgtcttgtctgtagtagagtctgttgggcagccttggctagctaagtgctggcttttttcatggcttattttggatatttgatcttctctctttatatacatctcatcttctcttcttggatatctcttctttgtacctgcaattaacaagtttaaagctttttaagcttttggaaacttttttattcatgtttgtttgtaatatctttggtatatagatcctcatgacagttttggaatgtgcaatgtgtgactttttgatagaaaggattcaatttggcattttctatgattcttgaatctttgagtcataaagaatacgagacacatatttaagttttgaaagataaacacacattgggattcaaaacttacgttggctagcataggaggtcttgcttaagacttggccagccttaaggcttgatcatgggatttggctagctttagggttttgccctataaagattgcatgttcatgcctgggtttggtgacccttgctagttattgggtaagtgatgggaccctagctgcaaggcttatgaaccttggccgttgtaggccttggttccaagtaggtggctagttttctatcctctcctgacttcggaaagaatttggctctataggcatatacaaccttagttttatgtgtggtttcctttggaaactttgcatgaaactgaatggtgagtctattatagtcgaatgttcaacttaagactcaacatggcttggttcctataaggaactctaccttagtcgtagcctggtacgtggcccctataggagctctatccatgtcctttttggctttacggttctagtagggtcttcgcctcatgcatgcaaaccgatctcatatccggcctcaaggctttcatgttcttgctttggcctataggccctctattttcaaacactactattttttagccttgaagccatctatgacagacatatgattgtcttggctgtcttattatggccttgataagtaagggtcctgatttactttgttaagctaaagtatgtctgcacaagttagaggtaggtttagtagcttattttaagcattaaaatttctttgcataagttcattgtgccagttcgatgtgttgtagggtatgggcgcccttcaagcgaccctgctagcaagtctcttggtcacttactattcaccaagtttcacagactttgtctggattcttccttggggtggtgtccatagtatgcatgtggaactgaatgagtaactttaagaagttaatcttatgagcaagtggtttagacacgatcagtctaaagtgtaacaaaagttgacagcttagtgttcgcttttcaaatcacatagtggctacccctacgcggctcagcaaagaagaggctgccattgaagaatggtgggagaccatgccaagaaggtcatgggtactagcacttttatgggttcatgcacgatgaaatggtagaggaacttaattgacaatttggctattaagagtacttaccgagatgttccctatttcagtgtttaggtagaaagtctaacttcaagttcttgtcatacttgccagacttgtgtacaccttctctgttatcttataaaatggtccgaacctttttattttggtctgaacatgcttgctgcaggggattttctattaaggaatattctttagggagtaattctcttgtgaagaatttctttcctcaatctgtttgttgatgggcctggtaactccttatgcgcagttatgctgctttgagttgtcttgatctcttcttctttctcttttgtcaagggattctgctagcaagatgttgtgcacctattggtcaccgtagaccataagtatgagagtagattactggtggatcaggcttgctagagcaagaccaagtggccagccatattgagggagcactgcctgggcaattggatgaggccatggccggcccgcatgtggaggtggtggccagccagaatgtggattctatggcaagcaaacttgatgaggacatggtcgactagccttctaaaggcccagttgatgctgtggttggatcccgtctacattcgattggctttgccccccgacgtaattgacgtagagcctttatacacttctatcattagttgtacaactttttcttggaaacgctccttggtggtgttggagtaccacttttgtgtgttatgctgcgcaggatttgacaccttgtagccgttctcccagtccctgctctttgccaaggtctttgtttggaggtaagctgcgataggtgttagccatgttagagtgtcatccagcatgtcgacctcttctgggacaacaatgttgagatcttttaggaactagatggacactaggtttgctttgtcagctatggtactgctcgctaggagggcaagtgcatctgctgtggcattatgttctttttgaaacgggacttagttctttggagaactgagcgagtaccaaatttttcttggttgtcaaggtgcagctggccagttgagcgagtgcatcgactattgtgctgtctctgggggatttccttcttgtataggctttgagctgtcttaatagctctggtaggccatcatcttattgtattgagctgtatattcaactaggacataacctatgactagttgagagtcgtggtgcatgtttaggtggttagcctacacttcgtgtgctagcctggggctagcattcagagcttcatattcagccttgttgttagaagctttgcaactaaccttgttgcctcgtgcctcaatctccccctggtggtcaacgcacctcttgggcttttattctcgcttcttccctggctcttgcttttctcctgaactctgagagatttagggagatatgcttctgtgattagccctgaagctggtgagagctttacctctgatggccatgctcggttgtgagattcttttatggctgagtctcagtagttcacttgagtagctggtctgatgctctaggtttctgtagaacctatcacaacttttgaacaacatatacctttatggggtgtatctagaagtatagccttagctatttggaagccaagggcaagttgtgggtcaggttctccatgagtgggaaccaacttttagtgtcaatttgtctcttgtttgtgtagtatacaaggtgtttgtacacgttgtccacgcacaccttcatgttgtggctgataggatcattgaacattttgtccataagcttctaatgtgtatcccctacattctttagctctgaagggtgtgactttaaagcagcacaggcctaagtctatcacgaagcttgtattctcctaatatgttggatgcatcttctatttcttagctttggacaaggccaagttgtaacagtgataggcagatcgctaatctcctctcgacatcctacctcatgccttgttaggaatttcaggcaaaggtggtagatggatgttatcgcctttaggttgtataggcccagtcagcctatcatggtgttagaagccaagggaacgtcgattatgatgttcaacgctctcaaatttttggtggttggactttctccaatagcaaggggtaatctaatatacccaatgagtgtgatgcttcggccagaaaggccacacatcacttgatttcagggcgccaagtcagcgagttggagcctcatcttttnnnnnnnnnnnnnnnnnnnnnnnnnnnnnnnnnnntccattgtccaccatatatcttgctgcagt

SEQ ID NO: 25458 - DNA, 2282 bp, Cannabis sativa
gaaaagttcttcccatactttctaaagactttcatccaattgcttttgattggcttggtgagatagtaatctcaacctcttatattgaatttggatattcattgcttgcattatatacataatatctcttgtcattctttacatttccctttcaggatttggattttctgataagcctcaacgtggatatggatttgactacactcttgatggtaatattttttactggtcttgattttcttttcatttagtgttgcttaatacaaatttctgttgaaacttgtaatgaattgcagaatatgtatcatccttggaatcttttatcaatgaagttgcagataataaagtgtccatagttgttcaggtatatgccttgttatctttatttatttttccattttgcttatcatatttaaccatattgttctttgtgtgcttcacagggatactttgcaccagtagttgtgaagtatgctagaaatcatcaagaaaaaatcaatgacataatacttctcaatccgccggtatgatttctctgagaatattttgtttattagtcacttataaataccattatggacccgtattttgtaaaagttaccgattaagctcgattaagctcaaggataatattttgtacctttttggaaaatataaggtcctaaatcgtatttagcctttattttattagaatgataagttatatggtttttgttctgttttatgtagctaacagaaaagcatgccaatcttccatcaacattgtccatattcagcaattttttattaggagaaatattttctcaggtatgtttgtctaaatttttatcatgtatttatacactatctgcctggttattcaatcatttcatagacatgataatttgttgttactaggatcctttacgggctagtgacaaagccttgaaaagcagtggtccatacaaaattaaagaagatgatcttatggtttatagaggaccttacctcacatctggttcctcaggctttgcattaaatgcaattagcaggaccatgaagaaagaactgaaggtaaataaatatggctgttaatcttaattagaactgtgaaagaattcctaatcttatatagctttatactttgcagaaaaatgttgaagaaatgaggaaaatactacttgacaagagttggaaagttcaaacaactgtatgctggggagaaagagatcgttggttaaacttcgatggagttgaagatttctgcaaagagtcacaacagaagctcatccagattccaaatgtgacaactctatcatctcatatacaaaatggattgatttgttttgttcttcattgtaattcagtgtatacattttcgggttttgcaggcaggacaccatgtacaggaagattgtggtgaagaactcgggaaaatcatttcagggattattcggaaaaagagctcaatcttataatttttcatgtaatgataaactcatcagctataaattattattgcattgccagaaagaatgtatcaaagaattacaagtttgtatgtgtgtatctgcaatttttgcttgtcattttcatttcaatgtttttctaaaaagtactcttaaaagttttctactttctatgtgatgttctgtggtggatcctgatgtgctctattccaagcctcatcctcagcaactgcctttctccatctgtttttgaatatatccaattcagcaaatgagagctttctcacctgtccaacaatgaatttgttactatggttgctaccccaaattcgaaaaacaagtaattactttcattggcagaataacttcataaaggcttacctcatatcgaatatcatgctgttctggagatggtgcttttgtttttgcttccacctgaaaactcgaagaatttacgagctcagctcgtagacagaacaaggatttgataagctaatgtttcggttttcttaaagactaactaaccttgtgtggtgctgctgcgtcccctagtgtagggagaccataatgaatcaagtactcagaatctataactcctacctttttggttcgatcaccctgtcaaaaaacttgcgttttggttggaggaaatgaaataaaatgaaacgaaaaaagaatcaaatttcgctagaatagctatattcaatacaagctgttaaattttattcatatattcttctcatcattcttattcatatatttttattattatcgacgactagagagtgatagaccgagaaaaagtaatgaatgaaattcttgcctgtgcgcagt

SEQ ID NO: 25459 - DNA, 2904 bp, Cannabis sativa
tgtgggattgtacagcttacccggtgttttccttacggatcacggtcacagattgcactcaagtaattttcatcttaaaaaatattaaattataaaacttttatgtatgtccaaataaatagggatctatccaaatacttttttagagtttgcactgtaccatataatactatatatttatatcaataattgagtatgacaacactataaattagtggaaaggtgttactaatgtttggctcacttctcattaatactactaacattttacatgtatatgtatatataattaatatctatgatttctccataaagaaaattttaatattttataggagaaaataaaatacataaaaaatttcaaacaagggagtcaatgtttgggtcaactacaacgtgttggtggttattcatcttggttgggagtttgaatgaataggaaggagagattgcatggacagccttgtcatccactctaattaatctgtaggcccatgagcccatcattgttccaattactgggccaaccatatatacccaaagccctttgtactgcccactcgcaattgctgggcctagtgttcttgctgggttcattgatccacctgatattggtctgtatattcacaaataccacttattttttgtaattaattaatcctttttaggactcatcaatctaatgttaattaattccccttaccaaaatatcacataaagtaaaaattgataaatattagggaaatttacatttattttacaaggttttcacttatttttttcagaaaaaaaaatattattttcaaaacaatgaaaaaacaacactacatatttttatgtatatataaaaaacaatgttaaaaccttaaaaaatgtaaatctatgaaaatatgaattttttttcacttttaagtatttacgaaataatccctaaatattgattaatttcccttatgtgtgggattaattagatttgagaaattatattatggactgagtcactctttttgggccgggatatgggcctataatctgaacccatataattgcttacccagcaaagattgatgttatacacacagctgaacccactgcaataccagccagttctccaacctgaaagcaaagcaatgaaattggaagattaattaaattattattattaaaataaaaaatataagattatatattaatgatggtattttgtaattaatgaacatacagctttagtatcagttgcgacagcagaagtgacaaacatcataataaaagtaacaactatttcgatgatcaaagcttggacatgtgtcccatgtggtgttgtggttccaatatcttgaattgggtctagcacttcacgtagtgtaaatgctcctaaaattgcacctataacttgacctgctgcatacaatggaacctgcaaaaatatactaattaacttaattaattccaataattgatgtttggtaactattttggaaaatgattggatcgatccttgtgaccaaattcttcaattatctatggcattcaaacacgtgtgtgtctacgcatacaaaatgttttttgtagtttaattaattaactaattaacaaattaactaagaagagtcatcatcgtgatctctttatctaatgaccaattaattaatgaaaagaaagaaacgaactatatatatgatgacaactcgatcgccaacattttttctttcaatttttttttttttttttttttttgaaagggaattttttctttcaattaataattagaatttctcgtataatagtatattattttctttatatacatagatatatattggtagaaattacattccaatctttattggagttataattaatatgtcataaatttaaaaaacatatttaaacaaatattattatgagtacatgtacaactaactgtttaaatttattacttgaatattttcgaaaattaagtatactatattagtgtatcatatgaaaaacaaaaattataattttaggtacagaaaataaaaatacatttccctacataaatttatatatatgtatatatataaatatatatatatatatattacactaaaacaagtagtgatacctgtttccatggaaaatgtcgaacggcggcgaaagcaagagtgacggcggggttcatgtgtgcaccggagatgtggccgacggtgtatatcatgacggtgacaatgaggccgccggcgagtgatgctcccagctgtggcactcttttctcattacttccacttagggcagccgccccacatgtcacaaacaccatcagaaacgttgctatgatttctgccaccacctatatatatgtttatataacattacaatattaatatgaaactataatttcaattaacgtaatgggagttttgggaatattagtatataaatatttatatgtaggggtacgtacctttttaagaaaattaatttgacactccttatagtagagtacccatagaggggatgataggggatgatgatgatgatgatgatgatgatattgatgggtgattagtaagaacattcactttaagttctccttctactgatctatccatttgtatgaacggaataatataaaggttgaaaagtgaaattaataatgatgaacttttgataatagctagctaggattttgtaattttaatgaaacttggactcatgacttaaatagagatatcacaagcactagtatgtgttgtttctgtgtcgtcagttgtgctaataaaaatattctaataaagatactattatatatgtaggatttttaccgttttaaccctacaccaacaaagccacaatatcagttatcaaggtcaaaaatgacctttcctagtctaagtaaacccttagactaaacggcaccgt

SEQ ID NO: 25460 - DNA, 2280 bp, Cannabis sativa
  modified_base (2248)..(2251): a, c, t, g, unknown or other
tgtcaaagttcaggggcaaaaatcctaattagccattttttatttattcttttgttatagtttacaacttttaactatatttaatcattgttatacttttaagctaaattttagaacattttcaatagttagaaccaacaattgataaattgtttttcttaataaataatgaaattttattaatgacaaacaactaaaataatagctgagatatctccttattagagacatgacctgaataagaattagaaaaataatcaaataatcagtcgtttaatttctaaattattttacaaaaaattaaaatataatcacatgaaaaaaattgtagcatcacaattaaccttaagaacacttatattctatttcatcattcgctcagtagattacagtaaaaactgttgcagcaggtttatttaacctcgtagcttgagcactcaactcttgtgtaaggtcgtaattgcactacttacaacacttgttattctcaaccactaataacgatgtgatggcgagtatcgaagaacaaagaaaaaccaacaacaaaacaaaacaaaatcatgttacacaaacaaaattaaaatactcatcatgtcacagagacaaatcgaaaacgcttaaaactctgttacagagacaagactaaaatactcaaaactatatcacagatatgagagactaatcgcagtatcaaaaccgaccaagtcacacctaagctcaagaaaaatcaacagtaactataaatttaagaacgaaaaaccctaatattttttccctattattaacccttagagaatagttaatcaaacattctatcacaatattatttaagttgatattccatagctaggcaatggcatgaatatggagttaaataaaataagagaaaaccagtttgaaaaagaaccgtacctaaaaaacagtgcacgatcgatcaaaaaataaacaagtcctacctgagattctggcgctgttctcggttccaagtttttggcttagaatttgagctaatttttccaaacgaagatcaaaggaaatttcatttaatttgaagcatttaaattaaatatacatatttatttatttatatgtcataattatattaatttaatactgccaaccattgcacgacttctcagtagaatattatccccattgaaataaactgaaattgataagaataaaatctttgcaataacacaagaataaagtgatatattagaaaatagttataatgagataatttcaagttattttgatcttcttagccggcacagcgcatatatttatttatatatatatagtttggtttgccaaccttaggtgcgatgatattgatatttattactaaggctaagataacaccttaaaaaattgaaattaaaaattaaaagcatccgtaggtgttatttttatatatatataataatatatttggttatcaaaatttatatttatatacttttatacaaaatgaattgagaattatttatttatttttattgaagtacttaagccctagctaagttattgccgttaaatatataacacgtgtttggggttggataaaaggatatataaatttattatagttctcgaacaacttaatagttttaaaatacatgtcatttagaaacaaaaaaaaatagttttaaaatatgtaacaaattataaagaataatcaataattttatcccgaaacattaatatttttgatttttgcacccttatgattttttctttaaatatctttaaattacagaaatgattacaaatgtactttttatttttattttacaacttgctcttagaccactaatttatagttataataagacgtgtatcaaatccaataattaacgaagctaataattcgactctcatgttaaaaggttcaaatccaacatgtacatcttgaaagatattggttgggtgaaatattaccactacttaagcgacctgcaataagttaaagtctctataacaacctcaaataaaagaatgaaaattcttctttaatagagtgacacaataaaaagaatgtcatcttgtatgatactttcagttggtgagaagaaaaaatcatatgtttaaacttaaacctagttcccgtggaaacgcaagatttatcaaagacttactcctggtgatcaccttagaaggtctataatctggactaacgtatcttgtgaggagcctagtaatcaccttggaagatttataaattgtgttgagaatcatggggttnnnnctcaaaaccaattggcaatgagtggagta

SEQ ID NO: 25461 - DNA, 4750 bp, Cannabis sativa
gaataagtagtgttctttattaaagttttatttgattttattttatttttttaaaacaacattctaaactaaatataataataactaataagattacaaaaaaaaaaattactcatcaacttcgtttataatgctccgtctaaaaatgagagaaagtatgtagtgtagcttgtagtgtagtgaagagaatgcatgaagagaaaagaaaattgtgtttctttgtggtggtggagcgatgctcgggtagtagacaggaagaggaaaagagggaagagagagggagatcatataaatggggaggacattttggagttaacacaaatgttggcctatcctacaaatattggatagagaaattttattacaccccaaaaatttctaaagacattctatcttaataatttttattttaaataaaatttatatttttaattgtactaaatttttttaaacttttttttctaattcatattcttaaaaaatatacccatcaaataaaaataaattatattttaaatattatgaaaaaaatattaaaataaaaattgatattaaattttcttagaaaaaaaaaataaaaaatatatatgagttaaaaaaaattataaaaataaaattataataagtattgaaattaacgtaaaataatgtgaggaaaaaaatttaaaaaatattaagagtaatttttaaaaattatttaaattaatattttttaataataaagtatatttattattgtatgagctaccaataaaacttatttattgggtattataagtttaaaagaaaaattttaagatcaaatttccgatactcaaatacatatgaaagtaagcaacatcacttttcagttctcaacagtcaaaccccaaaattattttttaaaaacctttcaaattttaatgcctttctttgatgaacactttcaaccaaacgtgaaagaaaatatataaatttaaattaattaattattttttattgttttattgtcaatatttttttttttcaaaaattaaaaaaaacattatgctgatgtagctgaggttgtcggttttgagtctcaactggatctgaacagttgtggtgaactctctctctctcttctcgtattccttcacaatcactcttcttcaatctcaatcaccatcatcatctctacccgttagtttctttgtcattttcttcaatcaacaaccaaactttctcttcagatccatttgggttctctaaatttcggtcattttttttttcgcgctccaaaaccatttccccaaatccctgtttggcttctcagaaaataatttccccaaattttctcttctgggttggggttttttgagcttgttctctaatacccatttcgttaaatcttcccagaaacgagaaaaaactcatcttgtcgcgaatcacgtctgcaattctcagttcagacccatttttttatctaagtgtatgagacactcgtcgaagcagaggattcgttttctcttcttatttttttctacccaaacactatttttttgaattttctgttttgttagatctgggtaaacatgaaggaatcgactcaggggactgagcctattgggcaaaacctcataaagctcataagcaacctctgtttctcagtttttgtcttctcagtcttggtcttcacagtcatagccattacctaccaacccccagatccatggctcgaatcagctcctgccctaacaaaactcttcacccagaacgaaaacgccaccttcaaaaacgacgattcaatcctcaaaacgggcgaggatatggtcccagttgtagtggctccttccattgctccgtccttatcgaatcccattactgagttggctatagagaaaagtgaatctttgataaacgattcgattatccaattgaactgtgaggatctagagaaagtgaattgttcggatccccgagctttaatcgctattgagaggttcaatttaaaggttttcaagtctattgtgttcttggagtatcaaacaccagttaatggatctaaaccagatgaatgtgatgtaatgtggcgatttcggaacaagaaggagaaatcatggagaaagtatagggatttcaggaggtttaagctcacatttggtgagaattgtacttatgaagtggctcatgctggtggctggcattctggtgtcaatgctcgtcgatttaggacccgaattggcaatggaacgaggtctagactcgcgccgcagcctcctcgggatgatcagataaacgacaccattccaagcttgggatcagagactagcttcaggagaggaaggtacttgtattactctcgtggtggtgattattgtaaaggaatgaatcaatatatgtggagtttcttatgtggtttaggtgaagcaatgtacttgaatagaactttagttatggattttagtatatgtttggctgctacttataatcctagtaacaaagatgaggaaggaaaagattttagatactattttgatttcgagcatttgaaggaagctgctcctgtggttgaggagggtgagtttttgagagattggaagaaatggaatcgtagtcataagaggaaagttcctgttaggaaagttgtaactcataaggttactcctatgcagcttaagaaagataggagcacaatcgtatggaggcaattcgatgctcccgagccagagaattactggtacagagtttgtgagggtcaagcttcaaagtacattcaaagaccatggcatgctttgtggaaatctaagaggttgatgaacattgtcaccgagattagcggtcaaatggactgggatttcgatgctgcacatgtggttcggggtgccaaggcacaaaacaaagagctgtggcctcatttggattatgatacttctccagatatgcttattgagaagattaaagggatggttcgaccgggaaggcatttgtacattgcaaccaatgaaccatactataactattttgataaattgaggtctcagtataaggttcatttgcttgatgattacaatgtattgtggggaaatactagtgagtggtacaatgagactatgcagttgaataataatagaccagttgagtttgatgggtacatgagagttgcagtggatactgaggtactttacagggcaaagacaaaggttgaaactttctataatttgacaaaagattgcaaggatggagtcaatacatgctgaccagattgagataccatttattgctttggttttttctttctataaaacttgattcagtttctgaattatataccatttgggttcattgcaggcttccttgttgtattttgctttgttcttttttttttagtataggctatattcatgttgatcacaagaggcctattttgtactatagatacaagttagcttgccccttttacttcatttttttcttcacttctcaaaatgttgaccatcctctgaaatttttaatgaagtgttattctattttaagatttatgattcttgtttttcttcttttgtccattatcttgttttgcttgtctagaaaaggctcaaagtttatctttagtggtggagaaattcaaagaggcttatgcaaatggtgttgtatttatcattgaagtttatttggggaaatatatataatcttatatttaagtggggtcaagtgtcaatttccaattcatgtacctaacttaatattcactaaaaaaattaacattatggtattgaaagtcatgaatctttaaaattaaatgtccatattttaagttttcaaaatctaaaattcctaacaattagaattttttgtgtagttttttcccctttctaatacaacatatgaactcattcttttccatgtcataacacactcagattgtagaacaaatggaaattcaaatacaaataaaaaataaatgaattacttaaaattaaaatatattagaaaacttgagagaaaaaagtaaagaattcaggtggttcagatcgttaaatagatcatagtctacaaatcacttgtattacaattaaaatttcataagaatggaggtttgttatgattttggcaacacttaggtttgagaactaaaatttgaatcgttttacatgtgtaggctagtcctaccaaacacaagtcaaataaaataaacctaatgcgaagttaatctccaatatcctcactaatggagagttcacatcagttaagactaaactatctttcttatataaggcctgatggattggcctaatctggcgtgtaaccattgttgacgtattttgtctcatggtgatgtgacatgtgtcaattatgttatttgaaggagtctgagaaaggtgcgcttaccttgtgttataatagtgaaagtggatgcacgaatccttaggattattttatttcatgagaaatatattttgcctgaaatcaacttggagcttattcgaattccctcggccactgagattagggaggttgtgtgggcgatgcatccgctaaaagccccgggtcctgatggaatgccggggaagttttataaggatcattgggagattgttggtcgggatgtcactgcggcagtttgtaaattttttgaagctggcgaattggataggaaaattaaccagacctttatggtgttaatccctaagaagcttggtgctaattgctttgatgattttaggccgattagcttgtgcaattttacttacaaaattattgctaagcttctggccaacagaattaagcc

SEQ ID NO: 25462 - DNA, 1316 bp, Cannabis sativa
ttgaatttctaaagcttgtttataagcctttaatagatatttatttttctcttcaagattttgttttaatggtgtactgattatgcaaatgtggttattttaaatagattgctcgaatgcttactgtaagaagggaaagagaactagaggagggaataaataagagattgtcccgaaagctagaccggcaatggaagaaaagcattgttgtaaggccagctccatcgttgaagaagtttcgagaggaagaagcagctgaaaaagccgctgctgaatcttcttagaccatatctttccagcaattactatgtagaatatgaatgagtaaaaagaccataatcacatggtagattcatgatttgtattgttcaaattcctgttttggaccagttttgtataaaacgttctgttcgttggtagcttcaattgttgttttttttcacccaattccagttttatagtttcctttgcattttctatgtaaacacactaaaatgttacatggaaatacgaaatccttgaaaattaagggaacatgtttgtgtagctttctatataatatagtcagacataataaactatgtgatctcatgaattttgtcacattctattaatgggtcatatttatttttttacgactagaatggtatattagagactattgtgctgcttcggagtgaaacggtgccatagagaggggtgttcaaggacttgcttaagtggtcgtaacatatgcatgtgtgtttaatgtcttaatttgagtctcaaattatgtattgtaatatataaacgcttatttaaaaaaaaaaagttcaaaagttagaaggagcataacttaataacttaagctaatttttttttgttcataagtaccacctttaaataaaaatatacattttaattaattaaaaaatatatatatttttcttcttaaaatacataacttaagtttctcgtatttgatgtaaatattattatagtatctccaaccatgcatgttctctaaaataaggagtgaaatttgaaaaaaataagctctaattatataaaaaataattctcaacaatagaattttttgctaatttttttaatagtattttaatcaaaattactatttatttattattattaaattaatttatatttaacaaattcaaattataaaatattattaaaataatcaaatactaactaaagagcttggaacaagaataataaaaatgattctttaattttaattttattttaactattttacttaaaatttagctaaaaaaataaagaatactattagagaagatcttagtagtatagca

SEQ ID NO: 25463 - DNA, 4456 bp, Cannabis sativa
  modified_base (2927)..(2928): a, c, t, g, unknown or other
  modified_base (3743)..(3745): a, c, t, g, unknown or other
tatcaggtgcagtaatcaatagaatgataaccactatttttgtcgctatctatttagaaaaagcggaaactacatgtcgtttccttctatttgctagcttctcatcgtacaataaaatcctaattaaaaaatattgtatcatgtattttttttttgaaatcccattgtatcatgtatttttttttttgttttttttgagaaatggaattcattcaacaactcaacgattacaaggaaatgataaattaagatcaattatatgacgagcataatagggtaatacactaatctatatagcactaattttattttttagagcatgattgaccaataaataagccacaatattgactttccgaaagtacaattgaatataactttgtatcatgtatttaagatatatgtattttcaaaactatatatatatcgacataaaattttagtaaatgtcttctgctttgctgttttttttttcttcgtacaattggattttttatttttattaaaattttttgagtaaatttaataggaaaaacttcaagatagaaaacaatatcatattaataattggtagcgagattactaaatataatgattattcaaaaaaagagtaagttttgttaataaatgagcgacactattaacagttttgaaacaataaaaagaaaaaaaaaactgagtggatgaattgttacaaaaggacaatatatctctaatcagtaatcatgcagcttagataagaattatttactaactcactatttggaacattaataacattgatgcaattagactcaataatcacaaataagactgatgcaaagtttcaactttcaaactatcaaggatggccatagcttctaccatgatatgatcgagagcagaagccatcaccttactatgagaatctctcatatcatgacgttcttcctctcaaaattgctcaaaacaacgtcacaattaataagtcgtcttctatttttggaattaattctaatccgattcttgggtcttttaaatccatattcctctccaattattattatttggcacttcaattaaaaattctaacaacatctgaaaatgtaattggttagcaatttttacattattaatttataaagttaaaatatataagattcatattaaactatacaccaattacatattaactataaagtatatagagtatagtagtgaaaatgtgatatatatgcatgcttggtctttctccttttgatttcattgaaaaaacagaaacaaattaaaattggctgaccctaagacccacccgactcaagactcaaaaaaaaaaaattctatttaaaactgtacattttatttttattttaaaaataatatatatttttaataaaataatgacaattttttttttcttataacttactaaaattgaaaacacttaccctctttcaaaaaaaaaaaaaaaacacttaccctcaacacttatttttctgatacaaatttaactttagtgaaaaatatagatagatgcccctttgttggccttttaaaaacccactagattcaaattgtagaagaggtaggttgggaggtgtgattgatgaggatggtgtaggaatgattttaaggatggggctggtgaggtgatagcttcttggctggatttcaagttggaaatagggttgagagtgatgctacattgctggtgtgtacgtcttgcctttataagtcatgtgcctctcatccttttactgctggttcttgccatgttatggaagcattcactttagctagtaaggaatatgggtattcgcaatgcggacggtgtagtttttagctctttttttaacttaaattgtgcatacactttttgtaattgtgtaattttctaaattacaatggcactacaagatctcaaaccacaaaaatcaaataactacaataaatacagtataatacatgagcagtttactctatcacaaaataattcaattcttaatagtagttaaaaagaaagaataactaatatatattaaattaaaattcatttttgttgcagtagtcaaattaattctagtattacaatcagttgttgacgcatcattgtatagcatataataattatatagataagactgactagaatagagtaaataactcgaagatggatttttcatatacaaaataaaaaggctactacatacaagtatataacactgaaaccaattaaaattacaccagaatatataggctaaatataaatacgtacattactccacacggacaacgatatatatgtcaagaatacattgttatatatatatatgtgtgagaaatgctttactaaatgaagatgatatatttatgtttcaaatcttttgaattttctctttaatcaaataacaaaacaacgttcaaaagaaaaaaaaataaataaataacaaaacaccaaatgtaacactaaaagtgttcagcaaaatacagtgggttgagcttttatatataaatagatggaatattcatatataataaaattaaaattatatttaaaaaattagtatttttctaacaatattgtgcgatgcgatttaactcgcaattattaaattcatccgtaaacagcaccgcataatttggcataaatatacaaattgcaactgcaccgtgaagggtttgaaattgtattttttgtacagtgtaggtagtttgatgaacagtgaacacttatattagctagtgttgtaaatcatgtcataaataatccgtattatactatactataaaaaaatcaaaaatttacataattgactaaaaattataaaaaatttacaaaatacattaacacgattttttcttcatttttactatttaaacttttttatttacaaaaatgcatcttcagtaaaaataataaaccgttttttagttgttttatagtttanntatagttgtattatagttgtcatgagattatttttctagttgttttatagttgtcgtgaggttagttaatagctgttgtgaggttgatttctcgttattttttagtttttttttttaactttttactgaggaaaatggatttttgtaattttaaaattttacaagcctatttttgtaattaaaaattttagaccataaaattataataaaacataaaagaaaagtatttttgaaaattcccctaaaattaatgataaaattattattttttaaaattttattaaaaatattaataaaataaatattaaattttatattaagttttgtaattacgcattaaagcacaatactaaaacttaatacaaatatattatgatgttatttttgtactaaatataatgcaacttttagtaattaattacatataaaatccagtaataactttcaaattttgtgacacaaacaaaactacttaaaaagtcaaaacaagtccttaccattttaatattcaagcacagttaatggaagtttacttttcacttttcaacatcaaaagtggtcaagactcaaatatggtatagataattcgatcaagcaactttctcgtgtcaattgactaatatcaatttaaccctatttatttatcagaaaagaaccattttaggataaattaacaaaagtttctcatgtggtgcgtttggaatgaaaaatacggattatttcacaaatacacaaaaataataaaaaaaattacaaaaacacaattttacggaattttaaacatttttacaatttttttattttatttacagaannnacggtctttttatgttgtactcttgttaattttttgttgttgttttgatattatttagatgttattttcatattacttttttatatttttcttgttattttcgtattatttttatagaaaactgtaaaaatgtaaaaaaaaaaatctataaatataaaaatataatttttttacaaaaaatagtgccttatgtaatctaaccatttacatgggtagttgtaacttattagaattatgagaataagataagaaatcttacaatgtctattcgaaagactcaagcacaattcctggtccttatgaaatattaatagtatctctagtgattactttatcttaaacaagtattttacattaatatcaatactagaatgatatgttgatgacttagtctagaaggaatttattatttcagatgaagataaaatgtcacaacaagatctccctaagcaccaatagtaagaggttaaatgcacacttgtgtatgcattaaatcagactcctactattgagtgaaaggcatcaaagatgtaatccaacaaggagacattgtgagacaatcaagaaagaatctataaaagtgatctatatcttagatgggggtgtatttagaatccttaaatctatatcaactcagaacttaatgtttgagatggtgattactctggaggtgagggaactattctggaagagtgtaaaaatacatctctg

SEQ ID NO: 25464 - DNA, 3895 bp, Cannabis sativa
gtttttttttttttatttacataaacaaactttattttatagttggtggaggttgaaagcttgaaataaactttgttaacatggactagctttgtgtagtttatacccttaaattttttaatggggaaaagaaaaaaaaaaatagtgtacatgcttaaatatttggttgatattgttgttagttttcctatatatcttattttaaagagcttgtgttaggcactggtgactagcaccaatcttgcaatctattagtgttacttattacattaaattatataaaacttaatatttaattctaagaaaaaggtgatacacactttctagcatttctctattttaaataagtaattcgttaagtgattacgtatattgatatatattatataattatatacacgtactacaggtaacgaaactgaaggggatgctaagagagcaaggaggtgggtggaagcaagtgtccaccacaggtggttacactgaaatttcaggtgaagagacggtggaaagcacgtcggcgggaggtattcgaagcagtagcaagtcactaggaacgaaccctttggctggtggcggcggcggcggtggtgagtgcagtcatcacattctcaatgtggaggaatacaaccctgtatcaccaccttactggctcccttcttatccttaattacttaattatatatataatcaaatccttagttataataatagtaattcaaattaagttgttaataataattaactaattattattagtctaagtgatgatatattattatcgtaatcgtttttttattatatattattatatattaatcaatcattttctagctacgcagctctctcccccttgtaatatgattgattaagtaattgacttattatgatatgttataaatctatatctattgcatgtattctactataattaagcatattgtacttttcaactcaattaacattatcgaatattagttaatataatttatgcattatattattcgatcacttttttcagtatgaaataaataaataaaataccaattacgccctcacagccatgtgttttattaaatgactgttaatactttctgttttcagctcaattttgatcaaatacaaaatttaccaactttgaaatgtttggcctagatgtgaactcaccattgaaaaattaaactcagttacaaaattataataaccaaacttaaactaaggtataaaactataaatttagagcttgtttggtacgacgtcgtattgtattatttgtaacgcccctaacaataaaaaggccacaaatagtgactaaacatatgttgatctcgctaaaccaaaattaataaagctaagagcgaaaatttaaattttaaaacaaatatacagagtaaaactataacgtgtaattatttaactttacaaacatttaaaaggtcacattttgtatcgggatcccgtaaaaacttttcaaatattacaagttatcatttcatgccgacctaagcgacaaaagttgagattacaaaatatttcttctggtagaactcaaccctcgtggtcagtatggcccgaacatgtacaatacatccccaagccctcgaactcatggttgatcaataacagatttgctctttcctgcatagtagagcacctgtgagccaagcccagcaagacagtataaataataataatacgcataataatcaaaaatcacataattattgataccactgcatctatcgtctatttgacatagacctacgtgttacgctaacacatctattataataaggccttattagaactgtttatcttggttctaattaccgagtctaacctaattatgccttacgcgcataactctttatctcaatatacacagcatagtaatgcattcaaaatcacttaaatactagagtaataaccctagaccacataaccgcttattttagggtaataaccctaatcccagtttctcacttaacatatgcataataacatacatgagcgccacagcccttaactctatgtgttagcttactgtcttacctggtaatccatgtatgtggatattccaaatcctcgggtgtttccgagcaagcaacggtaattcatcacacgttcttgggatttcacaaatagggttaatcccaatttcaatgtcacatatacacataattttcattctatttacagattaacatatagagctcaaaacgagcttttcaatgatattaagaatgtccaaaacgaaattccaagtcaaaaattatggtaaaaacaagcatacgaaaatttttgggaaaaatagggcctcgccggggcgaggcaagccgtagccgcggaggcaccaaccaggttgcccacaccgcggtgagcccagccgtggtcgcgacaagggccctagaatcccctaaaatgctatttttttcaacacctcaaaaattcatctaattcatgcataaattcaaatcttaaacctcacaaatataatcaagaacttggcaagaaaatgagcttaaccaaagctctaaacaacaccaaaatatataaattaaacaagtcattcaaaatcaccattatcaacaagcttgaactctaaacttcaaagcatttcaaccttcaagagataccaaaaaatttagagcacaaacccaaaatttaaaccacatttctcaaccctacaattatccaaaacaacctatatgcaataatcataatcccaaaagctcaaacacacaataattaccaatatttcccctcaactcaacaacatgcatccacaatctcaataacaccaaaacatcaatgttaaaactagaaaatcagaattcatagtaaaagaaaaagatcaaagttattatcttcaagtttcaaacacaagaatttacaccaagctacaccaaaattcaagcctttccacaacaatcaaatgaaaattatcaaagggagaaggtgagagagggaggtcggctaagggataagaaaacccaaaaaatggtttttagttttccaagaattgattttgttgaataataaacttaattgaccaaatagccataatgcccccaaggcatatatatccatacacaattaaaaaggttcactcacacttatatatcacaataattcaaatttctcatttatcatatcaattccataaataaattccaaaactgtattttgcgctctgaacccaattcagcccaaaatacccagttatgactattccacatcgacttgtcaaaaaatgcctgaaaatagatagaataaccatactatataataatgtagtccataatcacattatatcataaaattacgattttactcttctcgagtcaaaattacgaaaaatgcccatgatacactaacgaggtcttaaaatgcaatacaccataatagttttacatattaaattatataatcatataattcctaattaatacataattgatctagttagggttgctaatctggttatttaaccttagggtattataattatcccctccttatagaaatttcgtcctaaaatttacccgaacaataatactttgattagtgcaattgtcttgtttctcaagactttctctcttctatctagtatctgcactggctgctcctcgtatgaaagatctggttgtagttccaatgcttcataactcagaacatggtacggatttgacttgtatttctaaagcattgaaacatgaaacgcatcatgtagagctgccaacgctgggggcatagccaatctgtacgctatttgccctatcgtctcaaggatttcaaagggtccaatgaacctcaggttaagctttcctctcttaccaaagcgtttagtacctttcataggagatattataagaaatgccatatctccaaccta

SEQ ID NO: 25465 - DNA, 2850 bp, Cannabis sativa
cctggtaaaataaattccatcaggtggatctctacttcttccaattattccacaggccaaattcgtgtgttaggatccctaaaaagagtatcaatcttatcatccctgccttggcagattcctatttgttctatgtttgtttggtcttggagctttggccaaacaggctatcctttgatccccatttatgcatcctaccccattcctggttggaaatttcacacatatgtggtagattgatgttactaccttcaggtcatataatgtctgtcaccccatcaagacattgaaagctggtggcccatcaagacattgaaggctgatgcctgtcatgactgtctgtctggtaggtgcttttcccacagtttaagggaggcaggttaccccaaagggtacaacactatttctggagaagccataaataaatttttcgtaaagaaccatatttttaagttggagcctaatttctcataggttgacttgaaaagaatgttcaacaaggctccattatctatcatactctgtgacactatcatgtttgtgatttctactttgacgaccagggggttgttgtgaggataatggacatgggtgacatcttttacactgactaatataagtgtctcatttctgcacggctgcttaggagctcgctccaccacagccaacacttctcctttttcctcttacttgattgtacgagcatacctttcttgggatttttgtgtatctcgagtaatatggggtcctcaaataataacttgcaaatgtccatctacttgtggtggcattagacaattatggttgttttgtttgttggggatccctctgattcttattggtctttatgtaccgatttatatgtgggttatttctcctaatgaggaactcaatttcctctttcaagttgttgaatttgttactatcatggccaaaatctttgtaaaaatgacaaaacttggtggtatcccttttcatgatatcattttttattggaatgggtctcttgtaggggattgttgaatgggtcaccatgaaaacattctccctagagtatgtgaggatggttaaagcattgaaacaaggagctttctcttcggggttctgctggtcagctttaaactttcccttcttatcattctttgagaaattctcattgtgagaccttttaccacaagtttgttatggttatagatgcagatgaggctggtgtggacaaaaatttaatcaggacggcgttactctagccaaaattgtccacccttcttacttcttcttcaagtttaatgaaatcatctacccgatctcaaaactcacccattgaacccataatgagtctagttatgtccttctagagctcacctttattttctattcctcctagcactgtgatcagacgtccttatttagttaataccttaactttagttgccactttcacgaattgattgatataatccttcaacagctcacccgacacctgtttcacctcaaccaagaggaggaaaattgaattcagagttttgaggcaaagatattccaggaatcaaactttctaggagttagcttgaagtacaacttttgggtgacttctactaacattgctgagaaaattctacacctgacctccccttttactccatacaagtccgtctatatcttaaaatatttgatatgagataacagatcatccttcctagtgtacagcttctaagttggcattttcaacttaggtacaaggtctagggcattgacccgttcagaaaatagcgaacctcaagttccgtcgagttctaattcagtaagttttggactggtcaaggtatgtatcaagcttttaagtgtatccagttgggcttgcactcccttctcaacctatgctacctatttttcggcctttgtaactagcttattggttggagctacaatgggctgaatatttcctttattgttatctaagtcgataagttggttattatacaggggaaaaaatttctgtctttattatccctcttttgatttaaatcatctcaaagatctttccatgcttgggtccaatcctttagaaaatagaatctactttgggcctccttccccgattttggcttgtggaccttgctggactgagaggatttccatcactatggatgttatcttggttattattgccattattgggtagattatcctacaaatttccatgcactactacaaaggtggctttttctgacagtttataactatcttttatatcatttcccaacggttcctaaaaccgttggctatgtgaatgtcataaaaatataaaactttaaaattcggtttataactgttggaaaaaatcaatttaaatgatagtttacaaatgttagaaaaaattactttaaatgcctatttataattgtgggtaaaaatattgtgaagattaaattaaattactttttgatatatgttttttaataaatatatataataatattaattttcatcaaaaaataaataacatttattaaaataaataaaattaatatattattaatattttacaaaagatacaattcagaaaaaaaaaattataacaaattcaaaataaataattattaaatatgaacattacaactaagtgaaattgaataaaaaaaacttcaagtcaatttgtagggccggcgatggccttcaagccaaaaacaagcctccccttgactgtgatggcctttcttcggccgtctaagccaaaaacgagcctcccctctttctcgtcccttcccctctagatctctctctccttggttctatgcacgacggcgacctctagttctctctagaccaaacgaagcccaaaaaccttaa

SEQ ID NO: 25466 - DNA, 1989 bp, Cannabis sativa
  modified_base (111)..(113): a, c, t, g, unknown or other
tacggctccggtgggttcccttaaccaagccactgcctatgagtcgccggctcattcttcaacaggcacgcggtcagagccctgggctcctcccactgcttgggagcttannntttcatgttctatttcactccccggtggggttttttacccatccctcataatacaacttcaatatcagtcaccgaagagtatttatgtaataccctaaggtttaataagcagattagcaaccctaactaggttaattatgtattaatgagaaattatattattatatgatttaatatgtgaaactattatgatttattgcattttaagaccccgttcatatgtcagtggcatttttgtaattttaactcgagatgggtaaaatcgtaattttatggtataatatgtttatggactatattattatatagtatgtttattctgtatttctgcaggtattttctaaaaagtcaaagcgtaatagtcagaatcaagtattttaggtcaaaccaatttcggggcccaaaatatattttcgggatctatttatggcatttatgggataatgagaaaatgtgaattatgttatatgtgtgtgtgagtgaaatgacatgattaccccttttatgtgtatatggtattatgtgtgccttaggggcattttggtctttttgaccaattaatctactttcaacaaaatagttttttagccaaaataaaccaactttctaggttttaccatcctcaactgctctctctctctccctctctctattttgttagttcaaacatagttttaaaggaaaagggcttgaaattggcgtggatttttcttgcttggtgcttgaggactttgggcaacttgttctaagttctaacctattttacttgttttaaattcagattttcaagcttcataattgagtttctgagagttcttggtattccttgtttatggatgcatgttgatgaggttcaagggaaatcttggtgattattgtgtgattaatgtattagggttgtagttgatgcatttagattaaattggaagctttggagtgagttcttgagattaaatttttgggtattgctgtgaatatttgagttgtgctttgaatgtttgaaggttggaatttcaagtttgatgacatatgtaaaatagtgattgtgggtggttgtgtaacatgctttagatatgttttgcctttaattttgagttttgtttttggcttaaaattgttgttgatgttagattaggttagttttgatcagaatcttggtttatgcatgagtattggatgtattttggtgtataaatgcttggaaaacaccttaaattgtttgggaaacttgttcgcaagtaatggtatttttgggtagagtttggtgcattttttggtgcctaaaggtgagtttttttggggtttttaacccaggagccgcggcatggtctttgagtgtcgcggcccgctagcggtttttcaggacaaaaagtgttaaaacttgttttaaccataacttttgactcaaaactccattttagacgttcttagtatcgttagaaagctcattttgggctctatatgttaacctataaatcgaattcaaattactctactacaagccaagcctttagaggcactttttttcaacataatattaaagaacagacgacatagggtggggaagttttggaagggattttgacaccatgtatggtgtcgatcattttgaaataaccgacgccatagggtgtgatggaaataaccgacgccaaaagggtttataatcctatcccagcccatcgtgttcctcattcgaccaaccaacccagaaaccccaaaccctctctgccaaccaccacgaaaaattaccccctttttaccattttctcaccattttagctcatttttgtttctaaatcttctatttttcatatctaaatatacctgaaaagatcacatttttctcattttttagggtaaaccaaaggtagag

SEQ ID NO: 25467 - DNA, 1377 bp, Cannabis sativa
tatatatacataaaaaagagaagaaaacagtatactataaatatataaatatatgttatatataagatattgtagctaataattatgaaaaaagaagggtaggcattagaacttgatttttccttaatttacagaagaaaaacttaaaaatgaaatgaaatgtaaatgagataataattaaagagataattgatgaattgagaagagagaaacgtataggctaaaaacacttgaaaaaattatctcaatgaaatgaaatagtaaggttgcatctcaatcactataaatacaaaagactaaaatgagtgaccggctgcagccggtcacattgttcattatcaccttgtttttttatcaaacattatgaccttcttagtaaagagaaatatacttttttttgtggtagtggtaaatttttatttttatttttattttgtaaaagtaaaagttaaagttattttaaataataaattgaactatgtattttttaaaatgatataaattaatactcatttaataataattaatattatgataaaaataggtatattttttgaatttattcgtgctagaaattgtagttatgttaaaaattgaaatgggaaatttgaatttttatacgtcttttaaagcataattggttaggtaaacaaaaatttaaagtaattgttaaaatatgactattttacttaaaccccaaaaatactcctctcataatcacctcccccttttctctctccttccctctaacctctatctgcccgtgcataccccatcgcaagaacacaccaacccacaacgcccacccccacagcaccattccaactgacccccacccaccattcggactgactgattaccgcacggagtcgaccgagtatcccgatcgactaccgcacagaggagaactccaaacccgaaatttgttgtaccgagtctgattggggcgcgataggtacccaaaaaaattgttttttgggtacccattgggcccggtaccacaaattataccgggtccaattggtccgaatagaaaaatacttttggccactaatagaaaaatactcattagtaaaaggtgaacctcaaaaagtggtcctttctaattaaaaacaatactttttcttttattcaattctttctaattatgttattattacctaataaaaccctttctttttcttttactattaattaattaataatcccttatatataaataaaaaaataaggaataataatgaaacgtacaagttacctcataaattttataagttaacatagtaagtagattaagactttgcatttattatttattattttaaattaaataaatgtaaagtcttttttttttttttcatttttcaaaaaaaaaaa

SEQ ID NO: 25468 - DNA, 8023 bp, Cannabis sativa
gatctatattaataagtaaaactcattatattgaaatgagtttcatttagggcataaaacccaacagatgcatccatcatatcaggagcatacaagcctcatgatcttcaatgatcctatcagctgcaacatggagttgtgagtggacgacatgtttgtcaaatcgaaaagggatgggggcatatggaggaccaagacaaaaaatttcaaaatcctattcagctacaacatgaagaagctcaaacccaaacaagatccaagcccttttaaatatgaagtcgcccacaataattaaggaagtacaaagccaaaaaggacgcactgctgcactaaacagatttgtgtccaagtctacaaacaaatgcatacccttcttcagcattctcagaggcaacaaatttgtgtggaaaaaagaatctgaaactgcattccaggagctgaagaaacagattggctctgccacctgtcttaccgaaatccctaaacaaagaagagctaggcgtgcacatggcagccacagaacatgctatgagtgctgccctcataagaagaaaaatagtgtgcagcagcacgcaagagattggttgacactaaaagttggttcctactcatggagaagctaatccacggcttgctcttggcttccacaaatctaaggtaatacttccagatacaccctataaaggtgtacatcgatcaatagttgtggcaggttctacagaaacttggagatttaggcgaactactcaagtgaaccattgagactcaaccaacataaaagcacctcacaaccaagcatgtccaccaaaggccaagctctcactagcttcatggcgtatcatagatgcatatctccccaaatctatcagagtttaggagaaaagaagaagccagagaagaagcgagaacaagaacccaagaggtgcattgaccaactgtccgatggaaacatggcccccaaggcacctaggggcaactaaggaacaaggcaacaaggtcagttaaaaagcttctcacattgaggctgaacatgaagctccaaatgctggcccgaggctagcacacgaagcacgggctaacaacctagacatgcaccacaactctcagctagtcgtaggttatgtcctaggtgaatatacaactcaatacaagaagacgatggcctactggagccgttaagattgctcaaaggctatactagaaggtaagcccccaaataaacgcaacagctgacgcactcggtcaactagcctgatgcgccttgacaagcaaggaaaacttggtacatacttagttcttcaaaaaactaagtccttttgtttcaaaaggaacaaacatgctagagaagcaagatggatacacctaaaacaacatgcctccaaacaaagaccttcccagagagcacgaattaggaggacggctacaaggtgtccatttctgcacagcataacacacagaagtggtatccttacgcctccaaggagtgtttccaagaaaggagctatatagctattgatagaagtgcacaaaggctctacgataattataccgggagcaagaccaatcgaatgcagacgggatcaaacagcaacatcgaccaggcctttagaaggttggttgaccatgtcctcaacaatctagccggccacagaatccaaaatctagccgaccaatacatccacatgttggccatccatggcctcatccaaccgcccaagcaatgctcccttaatgtggctggccacctaatttttccctggccagtccgatccaccagtagtctactatcatacttctggtctacagtgaccaagaggtacacaacatcttgctactaggatcccttgacaaaagggaaagaagaagagaccaagccagctcagagcagcatggatgcctgtcaacaaacagatcgaggaaagaaatacttcgtaagagaattactccctaaagaatattccttgacagcaaagatcctgcaggaagcatgttcggaccaaaataagaaggtctacaccatgttacaagatagcaataaaggtgcatgccagtctggcaagtacaacaagaacttaaagtcagaacttctacccaaacactgaaatagggaacatcttggtaagtactctcactagtccacttgtcaattaagttcctctaagatttgatcgtgcaagaacccataaaagcgctagtacccacgatcttctagtcgtggtctcccaccattcttccatggtgtcctttgctttgctaagccgcgcaagggtagccactatgtgatttcaaaagcggacactaggttgtaagcttttgttacacattagactgaccgtgtctaaataacttgctcacgagattaacttcttaaagttactctattagttccacatgcgtaccatggacaccaacccaaaggaagaacctaggcaaagtctatgaaagttggtgaatagtaactgacaattagacatgcctgcatggtcgcttgagaggcggccataccgtacaatgcattaaattggcacaaagaacttatgcagagaaattttaaggcttaaaataagctactaaacctgcctctaagtcgtgcaggcatacttcagcttgtcaaagtaattctggacccttacttgtcaaggccataagaagacagccaggacgatcatatgtccatcatagatggcttcaaggctaaataatagtagtgtttgaaaacagagggcctataggccaaagcaagatcatgaaggccttgaagccagatatgaaagcatttcacatgcatgaggccaaggccctgctaaaactacatagccaaaaaagaactggatagagatcctataggggccacataccgggctacggctaaggcagagttccttacatgatccaagtcatgttgagtcttaagttgaacattccactataatagactcaccattaagcttcatacatagtttataaggaaaccacgtatgaggctaaggttgtatatacctacaaagccaaattcttatcgaagtcacaagaggacataaaactggttacccacttagaaccaagacagacccatgaccgccaaggttcgcaagccttgaaagggtctgccagggtcccatgactcagccaagaactggcaagggtcaccaaatccaggcatgaacagactagctttataggataaaaccctaaagctggccaactcccatgattaagccttaaggctggccaggtctcaaggaagacctcctaggccagtcaagttatgttttgaatcctaatgtgtgcttttctttaaaaactcaaatataagccttgtattctttatgacttaaagagttaaggatcatagcgaaagccaaaatcgaatcttttctatcaaaaagtcacacattaaacattctaaaactgtcatgaggatcaatataccaaaaatattagaaactaacatggaatcaaaaagtttccaaaagcttaaaacttgttaatggaaggtacaaagaagagatacccaagaagagaagatgagacatatatcaaagatcaaaaatcatgccatgcaaaaaccgaacacctggcaagacaaggtcgctcaatagagactactacaaacaaaacgagagttagaaagtccctatccgcctagatgttcaaacaaggatttagggggcaaacgttattccaaattttttccacctagtgtggcaagtcaacatatgccaaagatagagtacaggtggagtaaaactatcaagcaacaaccgaatggagtgaagcaagccctcaaagagatgtaccaacatccttggcaagccaagagaagccaataggctagccagagtaagcctataggctggccaggatctatgcacaagctggccagccaagaagtgactttcggaccaagggagcttttgttcgaccaaaggaacctgaccttcacagggaaaaaatttacagtgctatcctcaacttgcaaaaggttggtctccaaacccaaaggctggcctcctcttggtagaactatagtgacctcccacgtctttcaggccttgactagccagatcatgcaagccctaggcaaccaggattaacttggcaggactatatgtatagcccaaatggtggatggaaagtcatgagatacaaatagggccctagaagcccaatagaatggttgaataatatttagattcaagggcactatagtataataaacctagcctaaaaacctaagtcacttagcctctaaattgctctaagtctcaatgccctattctctcttctctctctctctcaattgctcacgcccaatagggctctctctcttctcttcatctctctcagacgcctaccctagaaaatctcaacacttgagtttttgcctgtactaattcataccttgtaatcctaagggtgctatagtagatcccacctatagtgatctttgtgtttcactccgtataatacaactaaaaggggagtaggtcattacccgctatcgcaagggaggcgaacctgtataacaaatatttttgtttattgtttttcgttcttaattgttcaaacacgtagcaagcatcagatccatatgaccgcgctgtcggttgatcactttttgaggtcaacattctcaatttcatcaaatgggttattgtggtataaagatagggtttgtgttcgagcagacgagtgtatcaaacaagagattttggatgagtctcatacgacaccatactcattacacccgagaacaactaagatgtatcaagatgtgatggcattgtactggtggttaggaatgaacggtgatatagtggaatacgtgtcaaaatatctaacttgtcaacaagttaaggcagaacatcagagaccagcaagataacttcaacctctgaagattcctaagtggaaatgggaggatataaccatggactttatggttagattatgaaggacaataaggttctatgattccatctaggtaatagtggatcgatatacaaagttagcacactttttaccagtacggaatatgtatactgtagatcagtacgctaatctatatgttaaggagataatttgacttcattgtgctctaaagttgatcgtctcagatcaagatccaaagtttacatccatgttctgggagagtttgaaacaaacaatgggtactaaattaaaattcagtacaacttttcatcctcacactgattgttagtctgagagggctatttagatacttgaggatatgctacgactaattcataccttgtaatcctaggggtgcttatatagccacctatagtgatctggatagtgtttccctcgatataatacaactaaaatgggagtaggtcatcacctgctatcacaaggggactgaacctctataactaatcttgttgttcattgcttttagttcttattttttcaaacaggtggcaagcatcaaatccatacaaccttgctgtcggttgatccctttttgaggtcaacattatcaatttcatcaaatgggttattgtggtataaagatagggtttgtgttcgagcagacgagggtatgaaacaagagattctggatgagtctcatactacaccatactcattacacccaggaacaactaagatgtatcaagatgtgaaagcattgtgctggtgattaggaatgaatggtgatatagtggaatacgtgccaaaatgtctaacttgtcaataagttaaggagaacatcaaagaccagcgagattactccaacctctaaagattcctgagtggaattgggaggatataaccatggacatggtggttacattaccaaggacaatagggttccatgattccatctcggtaatagtggatcgatatacaaagtttgtgcactttttaccagtacagactacgtatacagtagatcaatatgttgatatatatgttaaggagataattcgacttcattatgctccaaatttgatcatctcaaatcgagatccaaaggttacatccaagttttgagagagtttacaacgaacaatgggtactaaattaaagttcagtatagctttccatcctcaaactgatggttagtctgagaggactattcagattcttgaggatatgctacgggtgtgtgtattggacattgaaggttcttggaatgtacctacctctgattgagttttcatataacaatagttatcaaagtactattggtatggcaccgtatgaaatgatatatggaaggaagtatcattcacccattcattaggataaagccagtgaacggagatatcttcgacccgatgcagtccaaataactagtgaggtcattgagaagatttgagctcgtatgcttgcctcacaaagtagactgaaaagctacgctaattcgaagtgtagagatcctgagttctagattaggaactttgttttccttcgagtgtcaacaatgaaggggattcagagatttaggaagaaatgaaaaactaagtcctagatttattggtcccttagagatactggataggtaggtcaagtagcatatcggctaactttacccctattttattcagagttcacaacatgttccataatttaatacttttgtaacatgtatctaatacgatccatattctgagttatgaggacatcgagcttcagacaaacttatcatacgaggaacaacctatttagatcttggatagaaaaggaaaagtattgcggaataagaccattccactagttaaagtgttgtggataaacaccaatgttgaagaagcgacttgggaagtagagtcgtagatgcgagagcagtatcccatgttattcaggtaaatttcgaggataaattttttgtaaggaggggatagttgtaatacctcaaaaaatataattatattaatttggacatattttattaaatatgtaattatatgaatataagcgtcatattataatcttcttaagctaattatgagataattagtaatttttgagtaaatgaataattgagcgtaatttattaattacagagattttgttagaacatgtggctattatatatacctttttcaaataaaatattttcgtgttcagtgacaatggaaactcgatggattggccaaagatgtcacgacgataatagaataggttttattataattgtactggattgttttagtattcatgtattgttggtttagtcggggtagctagtaatgaccaaactaccccttggttataaattagcttaagtgttaatgtaggggtaaaatattcattttgttaagcttatttattttgttttattttatagtctagtaaaaccctagcataaagataggtttattatttgtttatttggttaattaatagatatagttagataattgagagataaaaataaaaaaaaaataagaaaacctagcacaaacctatcattctctctctcttctcttcagctcaaggaaaccaacgaagcccaatgtaatatcctaaaaaacttagttatgaataattaagatttattatatattatggattaagtagtaatgagtacgattatgatcctgttaactaaatttaacataaattataaattttagtataagtggataaataagcttaatttattaattaaagagatttattgaaatacgtggaaataatataagttatttgtgaaataaaaatattttcaggttcgacgatcttagagacccgattagaggccaaaatgtcacaatgattttaataagaaatattgatggatttattaagataagttgattttagaaataccgaggtattttggggtattcggagctgaccaaatatcccagaattaaagtgttgacttcacttttagcaaacgacaatgagtctattttataagcgataaacggatatataatagcagatatatgataaagcaataataagacacagggattttatagaggttctgcctcgagcagttcggtaatagcctaatcgtcgttacttgtattgacttaag

SEQ ID NO: 25469 - DNA, 7125 bp, Cannabis sativa
  modified_base (628)..(629): a, c, t, g, unknown or other
tttcccccagccacaaccacccgcacagcctcaacaaccgcattttccccagccacatccgcccatgcagcctcaactacagcatttcccccagccacaaccgccaccgcattttcagcagccccattttccagtgcagcctcatcagcagcattttccccagccacaaccaccaccctctgcttaccatcctctgccaccgcagcagccaaattacttccaaatgccacagtcttactatcctctgccaccgcagcagcagccaaataattacttcccaaggccgccgtcttaccatcatactcctcaccagaagcagcagcagcagcaaccaccgcggcgaccacccgatggaggagcaggacatggaagatcagctgtctagctctactgctctagatagtttctaatatttgcttctgttttttgatatgagattatatgccaatagactattcatttgtttatgctcatatcaacttttggattatgcaaatataataatgaaatgacattttttttttaaaaaaaagataaaaaaatcatgtcagtaatcatttcaatgcaaattattactttgttacagattaactacttacattttagtgaatttatatatatatatatnnatatatatatatatatgatgtgattatttttacgaacaaaatttaaaatcgtgtaattttataatgatataaattccctttccaagtatatttatcttttaaagtatttaaatcctatttttataaatttgaataagacaaaatttactcaatttttatcttttaaattcccatttttatttcatatttattaatattcttcggttaagaaaacgcatggaactttttcagaagaaagaaaaacatgtagaagtttgaagaataaattaaattaaaatttacaaagatatactatgaaagttagaaaatcaattgaaaatttaaatgtataaacaacaaaaataataacaataaaactgtgagtactcttttttatcactgataatctagcataatactagtgaaacttttttaattatgtataatttatttttataaaatttaatttattaaaattattttggaccaataaaaaaatttagtgacacattaaatttgcaaagcaaatgaaacttaaagaaatattgctacaaaaaaatatatatatgggggttaacctgaacttggaaagcttgaatttgattaatgtaaatgatcatgttatcaaccatttaagctaccaaataccctcaaacaaataacatgagcatagtttaatggttccagatttagtgggtctcaagttcaaattttctttcccaaaataaaaaaaaatgacacattaattaatgagtgaatcaaattacgtaataaacatgaacatgagttcatgactatatcacttactcgaaccgaacctagatcactttaatgttttttctattttaggtaaatgggcaaggaacttttaggatctcagatagtttgctgtatttttttgtgtaattgatttttgatattattagtaaattttatttttttcttttattacagtaaaggcgggaatttctatgaaaatatctggaagggcattatcgtcattacagtaacaccattctcatttggtgacgtgggcgtgatcattggtcattcagtacaaaacgtcttgccctttaacaagtcaatgccagtattacgatgacacgtcatcataaagatcgcttacccaagcaaaccaaggagctgacacgtgtcagatttgtccatgtcatgtggaccccacaccaaaccctttaaaatctattgacagagcttacaagcgccaaaaccccccaatatctctttctctctctctctctgggctcagcactttgtaacgggtaagactattttcagtttcatttttcttttatgattttggcctcattttcatgtgttagaaaatgttcttgttgtgattacggattggattttcagaaagaaattctcttgcaatttggtgttttgatcatgggttttcaccttgtttttttttagaaattactatttaaaaaaaaaaaatcatgattttcgttcaaagttttaaactttttggtttttttgtttaggtttttgggttcttgatatgggtttctaagcatatggttgagcttggagtgtttgtttcatcgttttggctttgagttcctgtcttgaaggggaagctttgcttttgggtatggatgattttgtagtttttttgggttttttcattaatcctattttgtgggttttctgatttgagtttaggtaaatgtatagagttgatggattttgtggtgtggtgtttgtaatgggtttcactcttgattagtttctttttcttgggtatggtagaaaatagtgggaacttctttcttgggattgtgtggtcttagatataaattgctagtataattagctatattatatctacaaagatcataagtagctactgattattcatttttctataggttacatctagtagaaatggatttgttaatattctttttgactcatttcatttctcagagtagattgaagatcaatggagaatgaagattcggagcatgaacacaagcctcttacaactgctacaattgagtctgctagtaggagtacttctatgaactatagtactagtggagctaataacatctctcttgtaatcatgcaagcaacggctcaatcacattctaattacagaccccattcttatcccattgataatttttctgaatctgcccctaagactgaaaaacttgatggatctttcctgacccttggaattgggagtactgcagatgctatgtctagatgtaatatttctggagttgaaagtattccagtgccggctcctcaatcaaacacttccaatagcttagccgaaagtaatttaaatcctagtcccagcatggctgatagtgtatctgatgctcaaagtggtgtctatggtcctacttttcttggcaatggccaaagggttgtgcctggtgtcaatgcaaggtttctttccaacccgcgttttactgcagaaacacctcaaaatgatcagctgcatgccacttatcctgtcaatcagctagaaacatgtgagacctggctagctagaagtattctacgtgatatacgtggcaataaccaatgggcggttgtgtctggtgttagctcctccaacccacattatattacagaaacacctcaaaataatcgggtgcatgagtttgatcctggacatagaagggagaattcaagaatgggaggtattgacaccaatagtggttatcaagggcactcagctataccttcaatacctagaagcactcaacttgggttatctagcaatgaccaaagaattgtttctggtgttgattcaaggaggtgtcatttcaacccacgatatgtttccgagatacctcaaggtgatcttggatctacaagggaggatgcaagaatgggagatattgaccacagtagtggttatcaaggttcaattcctacaagcactcaactcgggttttctaacagtggccaaaggagtttttcgaggtttcattccaaccctcaaagtgatcctggacctacaacagaggatttaagattgggaggtactcactatcaaggtcactcagctattacttcaatacctagaagcacccaacttgggatttctggcaatgcccaaagtattgatcctggtgttggttcggggtttcgttccaacacacaatatgttttagagacacctcaaaattatgagaatgcaagattgggaggtcctaacgtaaattatgatcatcaaggtcactcaactatatcatcaatgaatagaaacagtcatgttgggatgcttgactccagacagggcagggaaactagctttcaaccagcaatgggccagtcacagaattttatggagactgttgggcctcagagaacaggggttttgataggtaacaaatcagcatctatttatatatataagcttttagttttacaccagttttactttggtactcaagcattttagtcccaataatttatttttttcactaaaattaagttcttttataaagctttctgtaattcttttgggtatgtcatgttcagctaggtgtcttatgctcactattgacttctaaaaaccaagtatttttactaaacactcaaaatgccagaaaaatgtcaagtaatttagagatggtttaccttttatattgcatttggtttctttttttcagtgatattctataacttgctttacacgtttcaaagttcacttctgttttactcaaatcattctgctgaaattaatgaaaactagtaataagagactggctttgtaatacagttcgatgactttcttgttttccaggacagagtacttcaaacactccagtgacaaataacaatagcatttctcaaccttgtagtgtttccagttccactagaccctcccttaaaagggatgtaatacaatcttcccaagctactttccaaagtcaacacgataagatgagaaaacgttcaccaaattcgtcaggcgttggttatcacatggcccaagccaaccatgagcgttcttataacaacacaccacttccaaacctgctccagactactccctccttctcaccccatccacagatgcacaatgttcaaacgtatggtccatatcgtcctcaacatttctcacagcaatcactggctgctacacaatttctctcagcaccacaccctgctccacaatatctccaacagccacaggccattagacaacttctcttgcaaccacaacccgccacacattttctctcgcagctacagattgctcgtccacaaatggtcttgcaccccctgactgcttcacaaattctctctcaaccacagcctgctcctccacaaactctacatccgagtttactacgtcgcaataagaatactagaggctgtccaacaaaacagtcatcactcaagacttcctgtaagcctcaagagcatatcaaatggcaaggtattcctgagttttttcttcttatttttaacacctttatatttattcttttggcttggaatgagaattgttttgtgaattgaatgaattctgtcttttttgtttttacagatccaaatcagactaagaaaataattgggcacaagtgtttcatatgccaaagggatctttcattatcagcagacggttctgctttcaggtcaaatcttctcccaccgtccgctattctaccatgtggccacacctttcatgatcactgccttgacctcaacacccctcctgaccaagctaccaatcctccatgcattctctgtaccatcatgaaagagagttgaatccatttacttgaacacagaatatgatgttctccaaattttgttagttagtccagagtagtagacaaagtaacaagagcctataattgtcttttgtttttacaaaatctgcatttgctgcattgaatttaactatatatagatgaaattctcaactgtatgtatatatggctgacaaagcaatcaaattatggggggtactaaaatagtttatacacatttttgttaagatggactagtgaatagttacattttattgtggtttattctatagtaaacaatttatcaaatttcacattgtttctttctgctattttatttctcattttcatctgatattgctggcaaattatttctactttcaatcaatttccattcattaaatccaaattcaacactttcaactactaataatttattgagattttttcaactaaattattaaatatttttcttactcatttataagtgttttatggtctaaaataataataataattattacagaaactgaaaagaaaattaccggatgtaataatttctgagttattcttatttgaattagaatgacaagcagcaaaactcataagttaatcttagcaattagcagattatataaatttaacttcttgcttccataaatggttttaagtgttttaataaattattggctatttattcacactggaaaaaagagcttcatttattttattttattttgatataagaaagaagctttatttatggtcagcctcagccttatttttgttttaatatcattttcatataagctcatttattttagtttaataaatattttatggcctccaacaattgaagcacaaagaaaactatgggaattaataatgataatatttcttcttagaaaactttgcattgattgaaggccataataatattaaatggcttgtctattaaaatagtttgtggtaccaagttttttgtattaagttttatgaaattgaaggccatattaaaaattgcttactttggctaggcatttttcatcttcacttagctgttagttagtagttaataaaattaataagttaaaaaaaaaaaaattaataagttacttataataacattaggttgaaatgaaatattttcatgccaaataataaagcatgtaaaatagagaacaaatctatgaaatgtcatatttatttttgtaatttcagtagtgctagttttacaagcatgacattttattgttatttttataataataataatatttttgttttaaaaaatactatttgtggcatctaatataatattacatattaaacatatttactgtatttgtataagagaaaaaaaaaaaaagttatgatgaataaattaattttggtatttatgaagctcaataaattattgttcaaggttgaggagaaataaagtgggccaacacctcataatttgggataagttgaaatttacctctttttttacacattaaccaaatataattctaaaataattttaattgataaataccttcttttataatcaaagtaccaaatataacctcacaaaactaatcaaaattagacttcctaatgcagataatggggatataacttataaaagtgggtataaattaaaaagttgtaaaataaaagtaaaagttaaaatatgaaacaaaaaatgagtatagagtctaattttctctcataataatttcgtttacaaatctaataatcaagcccaaatactcaaaaca

SEQ ID NO: 25470 - DNA, 2165 bp, Cannabis sativa
  modified_base (2112)..(2118): a, c, t, g, unknown or other
gtaacatgctttggatgaactgtactattaaaagaagcaaatttctttgaatcatagcaaatgtggtgagtagcaccactatcaataatccaaaaaaaagatgaaaaagaaggattaccagcaagatttgtagcagcaataacagaactgttgtcagatttggagttttgttgttgaagttgctgactcagaaatgaaatgagctgctggtaatgagcagtaaggtctggtggtggattagaaatgttcaaaccagattcagtgcaagaattgggggctgtagagcctgaagcagcattcgtttggtgagcctggggagtcgatttagacttttcagacttattcttgtcaccataaccagggggaaagccatggataaagtaacatttgtcaacaaggtgtccaggcttgtgacaatgagagcaagaaggtcttggtttcttgtttcttggttgatttgggggctgagtagcagcagccataggaggcaaagcagagccaagagttctttggcgctcttcttggatgatcatagcaaaaactttggaaatagaaggaagaggttcaatgagaaggatctgagctcttaccgaattataggattcattgagtcctgtgagaaactgaagaacttgatcctggttgtaaaactcttggagacgctgaagagcaccacaggtacagttagcagagggttgaaactcctttaattcatcccagagagacttgagcttggtgaaataggaactgatggattgatctccttgttccaggctgtgaagttcggccttcagctggaaaattcttgggccatttccttcattaaagcgatcaacaaggtcattccacatgtcagatgcaaggttaaagtacatgatgctcttagcgatttcaggggaaaccgattgcatgagccatgacatgaccatgttgttgcatctggtccatgaacagaaagcctgatctgtgggtgaaggtttgggaagactgccatcaagaaaggcagtcttgtttttagcagcaaaggccatggtgattggtcgacgccaggattgaaaatttggtcctgtgagaggggtggatacaagcatgagacctagatgatctcctgtgctcaagaaatagggactggacaagtcctcatgagcaggtcgatctctggtttctatggtggcttgtggaattggagcagagttaatgtctggattgggagtgggatcagaagatgtatcgccattctcatcgttgacagagctccgtgtattgtgtttggccattgatgcaaggaaggaatcgatcttgggaaagatcagagaagaagatgaaagcggaagcagttgtatcaatttgataccatattagcagagagaaaatgaaacagagtaaagtgttttctcattaaactgaactgaagcaaggattacaatatttatagagcaaagctcttgatacaaagggatgaagcaactgagatgactaacagtaatcttaataacacgttctgccagaaaccatcttcaggccagtctctaatgtttagcaactgtcccgagagaagccatggtctccttttaagaatctcttctttgtctgaaagattgtcaaagaaaatcccccacaaacccttctccaaggttttaagacgccatttgccttttaacgttcagacccccgtaagaatctgcttaactcttcctctagccaaagggcgagagccaaagattttcgcaagaaccccggtcttagcaactttagcattgatctcaaagtcagcttctaactcaagcgaggcctcatcgatgaactgtgagaggaggttcttttcggtctgttccgtagtcgcgaacggtctcaacagagttttataaacaaaacacactctgttctctctctccattgcatttttcaggtgaatctttctgtctgatctttctatgaattttcaatttcatattccctttactctaattgttaaacaacttctgatgatctctttctttcatgaatttgtgagaaaacttttctttcgttttctggcacaattcgattgattaggctacaacaacaacatggatttcagagacaaggttaatatacatttatatatatatnnnnnnntatttatatttatatttatatacttaattttaggttcttgggattat

SEQ ID NO: 25471 - DNA, 2804 bp, Cannabis sativa
ttatttattagccggtcttataaacttagaacaaccggttacaaaaaatattaaaaaataataaagtacgtaggacccactatacattacaatggaatacaattcgtaattttactaaagttgcttgaaaatagaattaggggtgttcgcaatgcgaatggtgcattttttgactgtttttttaaattaattcgctcatgcagtttttttaatttttcaaacgcactcacaccgcgaaattaaaaaatcgcaaaaaccgcactgcaaaaaatagtacagtgcagtgcgatttatgcagtttttgcaatttggattatcactaaataattaaactatcacaaatacaacaaagtttgagcaacacttgtcaagaataccataaggtttgaaaataaatatgaaaaaaaagtttcaagtttcaacaatacaataattaatgggcttaggttatattggacctaaataaatataaaaattaatatttttataatatgcagtgcggtgcggtttgaaccgcatattaactattcaaaaccgcaaaccgcatcgcaccacgcggtttagaaaaaattcaaactgcgaccgcaccgtagagaattttgaaccgtattttttttgcgatgtggtgcagtgcgggcggtatgagcggtttaatgaacacccctaaatagaataatagtgatttatcttatttattattattttattaggaaacgtaatcgaaatgtttaaattgactaaatgactcttttaagttaaaactataatataaatcagttattttataagatatattttaaaagataaagttgtcattataaatttgatattaagaaataaaatacattagccttaatgacattctttagaaaattggtggggaaagtttttcttttcttttttcccttatttcatcaagtttttcctttcttaaatttaataaattaaataaacaaatgtaaggaaatgaatctcttaccattgattctcattacttattagtaaacataagggtatcagtagctttgatcggtttatgttatattttattcaaggtcggattgattggatgggttgatattattttcaacacatccaatataaagattgagcgagttatattttcatcagatttttcaccttgtatatttttgtcaaattatttcgatttaatttggatggattattcaaattgaatagtttataaaaatttatctatacccctaatctgcgttacaaaataatgtgatctatggtagagcattaatttttttaagaatacgttattgtattaaatttgctttgaaaatgagttaccaatagaaggaatttcttaccatcaataaagctcattgtctctccaatttagccaatttatgagcttaatattaaaattttgactaatatgtgaaaaaaaatacctcaaaaatttaaataataaaaccttaatatcaaaaaatataactccaaagtcattgttatgtaggttagaattattcaataccataactagcaataaagaatcaaaaaaaaaaaaaaaaaaactttaccatacaatccaataaaacaagcgtaatttaatctcatcaccatttcacttgaaatactaaaagaccacttgtaatataaaactagaccaggataaatattttcttatacaaagaaagaaaatatgacaagtaattttaactagtgttgtaaatatggattgaactttttgacatggcacgaaattaacacgagcatgacttgacacaaaaaaaaatgtgcttagataagaggcgaaaaaatactggcttaagcacgacacgacacaagtagatatagattggactttttgacactgcacgaaattagcacaagcatgacttgacacaaaaaatatatgtgcttagatacgaggcaaaaaaatatcggcttaggcacaacacgacacaaaaaaatatgagcttaggcatgaaatgacgcgacaaactcgaaaacacgacacataagcacgaatatattagttcgaaatcatgacacattgaaaaacctaataatttaataataataaatatttatttattaattaaaataatagtaatattcaaattattgtatttattttttatataattgtttgaaaaaatataaaagtaattagaactatataatactgttaactttacgaaatagagttacttttattattttttttttgggattttgattggttattagtgtgttttaaatttattttctttaatatttatagttaatatttaatttaatgttttttgttgaaaaactcactgaagatacgaagttgagttagatttaatgatttttgcacaagttttgtgatggttcaactttagttcacacgacgctgaaactttaagtcaaaattaaaccacgttctgagtaaattctagaaaatctttgggaataaactttgtagagctctttttgagattttcaacgcaactcaaatcatctcatttaaagttcggaggagaaagttatgctatttttactaacgatagtcaagttagggaaaatgtgttagacagaatacattatgagccaacgtgaaatttctacgagccaatgtggctttacaaattaataaaatgattttcaagccaaaaatagggagaattcattattttcaattagggcttcataagagataaaatctaaatacaagaaacacattcttggtgagaaacggaagaaaaaagtgaatcttgaaggattgaagacgtgaatcatttaggtggcgtttggttgggaggaatgaaaatataaggataagaatg

SEQ ID NO: 25472 - DNA, 4539 bp, Cannabis sativa
  modified_base (918)..(926): a, c, t, g, unknown or other
ataaattgttgattctaagacaaccaattatacgtcgagaattagattttgtcctttaaaagaaagtgaagaagaagaagcttgtatttttataggttgaccactaaatatgctcaccctatatacccactctcatcataactagctaggttgcacatgtacatggactaccaagtacatgtgttagttgtaagatttggtgtctattggtataaaactaaaatataaatcattataattggttctcaaattactttaacaggtatgatactgaatatgatatatcagatttcacttaagcatctatttaaattctagtttgcttatcaaaattaggaaaataatatttcaccaaaatatcaattattttaggaaaagaatttgattgtatattatatatattttgctaaaatgattgtataatattattattacagtaaaagttaccttaaaatttatgacaagataagctacctatagagaagtagacaactaaaaaccaagaaacataaagtaaaattgttagttagattgtccctacaaaaaaatcccacaccatattccatcatttgttcaactaacttcacacaagcttctattgaaatttatatacatgcagaaagtttaaatagttacattaaatatataattacagtgattaaatttattttaattgttaaatcattattaaataattataattaatttaaaaaaaatcaaataaaaataattaataatttaactgtaatttgatattaacctaattttatttattatttcgtaaaaaatatttataattattagttataaaaaaattcttattaaatattttaataaaaaaataatttattttaaatatataattaatttatgtttaaaaataaaaaatttatctattattaaagatcggaagagcgnnnnnnnnnagggttagacctcatggtcattacataataaaatgcgtaaatatgttaaagtataaagagttagacctcatagtcattacataataagttatctagaataggggatggattgaccatacgagttacattacgagcaaaagcccacttagttatatgaactgtgaaattactaagtctagatataaatgaaaaattacaactacttaaaaggtttgagagaattttatattgacgcacatagttatcattactccaaataaaaaaaaattccttttagcatattgattactgtctcaaaattattctcgattatcacaaatgaaagcttacatcaagtcgctgattataggattagcaaacagactacaacttctccaataaaaagattaaaaaaattgaaaatgttcttcattataatataaattgtctaaagaataacaaaagcacaaaattaataataataaaccaaaagaaaattagtatattttttatttaataattaattctagtgaaagggacaaaaatccttgacaatgaattacaaaaacaaataattaatttgcatagctcattcaatacgttcacatacagtttcatcaaacaccgaatgagatcttaaaaacaataatgatttttatgaaatttctatttaatattccattttatgtatttaatgtaccgttgactatttgattttgaaatacaacgcggctttcctctttgacccattttttttaaataaatattttaattatttataattaattcccactatgaattatagagccagccatagtccatgttatgtgttattattattattattattattattacaaatttatttatttagggtatgtttggatgtgattgggtatcatttctaatagtgtactattttattaaattagtgtaaaattttcacacaatagtatactaaattatgcataaaataggtgtgcactattttacactattaatatttaatatagtagtgttccattttgaagttacactaatttagtgtttttttttaacattctaatccttattttgttttatttttaaaatataatcttatattttagtctttaaattaaaatttatcacaaaaataataattaatttaaaacactaatatatttaaaaatacaaaataacaataaaaaaaatactaatacttaacactaagttataaaacttaaaagaacaacattaagtaaaataataatttaatagtcaaaatgatcatttgtggattcaagttttggaaaatatcaaaatattgactatataaactttaagtatcttgatattcttgaaatgcttgatattattgatgaactcttttttgcataattattttttgctcattttgaaaatgactgcatatattaggattaattatagaacttaaattatttttttaaaaaaaaatgtatagcgtttaattgatttaattaatattttattttactaaattattttaaaattttaaatttttattattaactatgatataattcttactaattatttcataaattagttattttgagttattaatacaaataatataaaatgcatcttcttaagtataatgtattttgtgtgaatcattagagttgttctataaaaaagtaaaaaaattctacgtgtaatttaaccatgttcttaatcagtggcgtgacagatccaagactaaaattaaagaaggcaaaaagtaaattaaatattaaaactaaaaatattttagcttaactaacatgctaaagttaattattatgttatatttatcacttttaattataaatatgtattgtaattaattaaaatttatatatcatttttttgatttttttaaaagggcgactgctccctctcgcctttatgaagatctgtccatattttcaatcaaattattatgtagtaattaaagaaattaggattacacaatatttgaaaatataatatatttttagatataaaataataattatatttaaattagtaattatacataaaaaaatatagtaattattatttaaaataaaaagttctttttggtaattacaattcttttttttaaaaaaaaaattggtaattacagttataactataaactagtaaattgtgtaaataactccaataaaatccagttccaccatagtttttcaatcaccttattttttttaatcaaatttatatttcatttttttgaaagcaaatttatattattttgataatattgtccctgtaaaaggaaaaaaggaaaagtatgtccaaaaatagaaataggaaaatattaaaaaataataaaaagaaaaagaaaagaaaaaaagaaaagaggagtttggattggaggcataattctccattgatgtgcatgtgaggagtgagagactattttgaagtcgctcccacgtttgagaagtaccatcatcaccattctccatgttccgccaatgaagctaacttttacagacaaacactcctaatccttcttctatcactatcttccattctttagacattacaattcattcattcctttctgggtaggtaagaattttttggtagttttttcagttttgagttttttttttggggttttacattttctgatttttcttttttgagatttgcatcataatacattacattaccatcaaaatttgaatttgcgtcaacattacagttccaagtgggtggttgtcaaatctggtgatcaagtcattagataaagttggcatattctgggttccatttctctgattttttttttttttggggggggcacaatttcatccattctagctttattcccaggcgagtttcgtgaattgggtcttgaagttttttgggttttaggatctgaagaattttcttttttggtcaagagaatttcttggtctttgccgtgaagaagacgagtttgatttttagggttgccatttttgtaatggaggtctcttggtagtaatagtagtattagcagactaaaataagtagtggaattgaagtgaaagacttaaaaagtagaaagaaatggcttcaacttcaccatctccgaactcttcgccgccttctgcggcggttcccccaacttccacttcttcaccggtgactccatcaacgacgtctccgcctccttcttcttcatctcaacccgatcagacttcagatactcccattgctcccactaactcggcaacgcctcctcctcaatctcctcctccggtagttcctgccgctcctcctccctcaccgccgcaatcaccaccaccggcttcgcctccgccatccccacctgccgccccgccaccttcaactccagctttgccgaccccttcacctcccgtgtcaacggcgcctccacctgctacaccgtcggcttcgccaccaccttcaacccctgctcctcctccagctgttgtcgcttcaccgccacctccaattgattcatcgccgccacctccaccaactgattcttctcctcctccagctcctcctgaagattccccaactcctccggctccgaccgcgcctactcgtccagctggttcaccttccccacctcctccggcaactgtcccggatcctccttcatcgg

SEQ ID NO: 25473 - DNA, 2704 bp, Cannabis sativa
attattgagataagttgattttaaaaataccaaggtattttggggtactcagagttgaccaaatactctaagaatagaaatttcttaatagctaaggaatgataaaataatattttgttattgtaattattattattattattattattattatagttgctgatgttgtttatatatattaaaagaaaagtttatacatctatatgtatgttgataagaacaaaaaaagtaaagtaaaacctctcattctatcttctcttgagcaaacatgaactatcaccacaccattttttaaaaatattttagagcaaaaacataatgtgttggacttagatttcagctggaatccatagtagcaaatggaaaagaataaaggtaagctcatcctaagttttctttaagttttgaaaggatgaagtttggttctaagtgagagtttgttgaattggttgctgtaggattaaaacttgaatagggaaatgcttttgggttggaataggattcatttgacggttttaatgcctagttagtggctgtggtagggctgaaaagaagcttcagtttttaaaactcaagcttggagctccaatggtggatttgtgatcttgattccgttttgatttctgtaatgtagagaatattttacggatgttatataattgttctttgaagtttggaaagatttggttagatttggagctagtttggagggtttaaagttgagaaaaatcatgttcctggctgttcagagctagaatcgtggatggttccagccagaatactatttcttcagtttttggaaaaactaaattttgtattttggccataacgttgcactcgagtatctattttggacattctttataccatttcgaagcttacaatgagctctatcatatggtgtatgttttagagccaaaatataagttttattttagtgtatttttactacgaggtttggtagaaaaccctaggttgtcatttttgtagctgtgttaagtagtattttttaggataaatacttattggtttactgttgttgtgacataagaccgagatcatcgggataattctccacttaggttagccaacatgtacaaacttagattaaaggttagaaaagtatattgtactacatagtacgttgtattgtaatacacttaatattgctatgaattgattaatattgagattgagctacgcttaatattgttatataatgaaaagattaattggttaagcaatgatgatgtaatgatactatgaatatgatatacgagctcagctaattaggttctacgatactcttgacgatgtaccaaccgtaggtataggcgttagtgacatatgagtacaaggtgtaggtatgtacgggttcacctgattaggtgatacaattatgtgatatgtgtgtgctaggctatggcacagacttgcctgattaggcagtgcaatagaggattatcagattaaagcatcgacttgtttgattaggcaatgtgatgtaatgaagatggttactttatgaggtaacatatatataatatattattaaatgaatattatttatataattggtataatagttttgtattactagatatctatattcttatgcttattcgtggcagatgccaatagtgatttagatttcatcttatgagcaatgcgtgatggtttgattctaattgagtataaatgataatattcgaataataaaatatataattattattatttcttttctcgttgagtccttgtgactcacgggtgctttgtggtgcaggtaagggcaaggaaaggttagagctgtcatgagctgactgccttctccagtaatgtacatattgacctcacgagttgtatgagttcttttgggctttatttactatgtattttagttttatgtttttaggtatcatcgtatatagttcttttgtaaagcttttaataatagggatcctcagaacacgctttttttatgtcattataatgtcctttttagggttttattttagtaaagtttttaatataatcgcaatttttaataattaattaatctattagtattaaactagtttataaaatcacaaatgtggtgtccctatagattaggacgttaagaaagtacaataaggatggttccctacaaaatgttgtatggtaggaaaagttgatcctcaattcattgggaagatactggagaaatgaagtatttttgtccagagttagttcaaaggacgaatgaggcaatagacaagatcaagcctcggatgcttgcttcgcaaagcaggcaaaaatgttatgctgcttcgaagcatagagacattgcatttcaggcaggagaacatgttttcatgtgagtttcaccagtgaaaagtatcaggcgctttggaaagaggggaaagttagggtcttggtttatagggccatttgagatactcaagaaggtcaggcaggtagtgttaaggctagccttaccactagagttgtcgctgttcataatgtatttcatatttcaatgatgaggaaatatgtgtcaaacccaactcatatgttgagctatgaagctctagaacaacaatgcgacttatcctatgaggaacaaccagtgcaaattcttgataagaaagagaaagttcttcgaaacaagaccataactttggtgaaagtactctgaaagaatagcaaggtggaggaagcc

SEQ ID NO: 25474 - DNA, 4416 bp, Cannabis sativa
aatttttatgagatcccgaaacataagcaatctttttggatggtttgtaaactttcaataattacaagttttattttcattccgtaataatttaaagtttaaattcttgtcttatttctagtaatcttagtttagtaggattaggttatgtctatctcaaaaattgtaacgtgcctaactattagggtgttacattaccgttgttctgtctagtgtctaatttaaaatatggtgacattacttgtacaaagaagagtacaagatttatacagaccacaagagcctcaagtatttctttacacagaaggaattacatatgaggcagaggcgatggttggaattagttaaggattataattgtgggagtttgtattatcccgaggaagccaatttagtggcagacgtattgagcagaaaaggtcacaggcacgttttcaatactatgatgatagctcctcagtgagcctaaaaaatggttaaggctgagattgaatttgtgatacgaatgttacacaatctgacatttcagtcagattttttagaagaataaaaaagacacaattggaagatcctgagctagtccaaattcgggatgaggtattggctggtcggcctaaagacttttcaatcttaaataaaggaatgttactttacaaagataatgtttgtgtttctagtaatggggagcttaaaaaggaaatccttgatgaagctcacactacaccttatttgttgcacctaggaaccaccaagatgtatcaggatttgaaactctattattggttgtgtgagatgaaggaagatgtagtggattacatgactaaatgtttaacatgttagtaaatcaaagcttaacaccagaggtcagtagggttactgcaaccattagcacttcttgagtggaagtgggaggatattgcaatggacttcgtgattggttttcctagaaccacatgaatgtatgactcagtatgagtcataatggaccgtttcacgaagtctgcacattttctaccggtaaaaacaacctatacagtggatcagtatgcagagctccaatatccagagttgtatgtgaaggagatagttcgtctccatggagctcctaaatctattatttcagacagggatccaatgtttaaatcaaaattttgggtaagtttttagagagctacgggtacgaagctgaagtttagtacacattcttttacccccaaactgataggtaatccgagagaacaattcaaattctagaaggcttattacgagcatgtgtcatggactttgtgggttcatggagtaaatacttgcctttgacataacattcctacaacaatagctatcaaagtatagtagggatgactccctatgaaatgttgtatggtaggaagtttagttctccaattcattaagacaaaactgaagaaaagaaatttttgggtcctaagttagttcaaaggaccaatgaagtgatatacaagatcaaggttcagatgtttatttggcaaaataggcagaaacgttatactgatccgaagcacaaagatattacattatgggtaggagaacatgttttcctgtgagtttttccgataaagggcattagctgctttggaaagaggggcaagttaagccctaggttcattgggccatttttgatacttgagaaggttgggtaggtagtgtatcagctagtgttaccacaccgttattggctattcataatgtatttcatatttcaatgtcgaggaaatatgttttagactcgacccatgtcttgagttacgcagccctagaactgcagtcagacttatcctatgaggaacagccagttcgaatcctagataggaaagaaaaagattcttcaaaataagaccatagtttgatcaaggtgctctagaacaataaaaaggtggaggaagccacctgggaattagattctggcatgaggactcaatatccagagctattcaggtcaaattttgaggataaaatccttttaacgggggaataattgcaatggttgcacgtaagaatatgggttattaaaggcaattagcattaattattgatttttttttataattatttatgattttataatgttgtgggtcccaattttataaatgggcattagagttataatttctcaattcaagagattttattaaactctaggagtattatttatattaaataggaattatgtattttttatgatttttgctcggcggcaacaagaatgtgatggatggctgttagaatcacatgggtaagtttagaacctatttcatagtgaggcaaatatttgagatatttagaataccagatttaagaggggttatggtattagaccattttatccctaaacttattattgcttaagttggaagtatgaggggcattttggaaaattgtttgtgtgtttaagtggctggtcttggtgttgacagctggccactcatttgttttgttttttttcaacataattggaattattgggttagaagttagaagaaaattaagaaaacacaagaaaactcaaagctctcacttcctctcattctctttcttgaacaaaccttgagaagcagcaaccttgggaaaattttggtgtgatttgaggagttttagttggtttgtctagtgtaattcaaaggtaaaaaccctagcaccttctcctttgagttttattggtttttctttggtttgagcttataattgaaggatttggggttgtttgagctaaagttttccatgagttgttttctgtaatttaattgagttgatagtgtatagtttctactgattttgttaccttggagtgcggttgagcaagtttgagtttgaaagctcaacaatgttttattgagattttgtgcgtattgtgggctattttttgttggaatctatcctttgatgtttttataggtgatatggaaggtttggtgaagtttcgacacgattttgagcaaattttatatttatttagggttacttggtgcaaaccggttaactgtatcaggggcaggattcccgaaagtttattttgtcaaatcgtgttatttttagaaccttagttggttatttcatggattcttagggtgttattataagaactattgatagtagaacccttagtggtgaattttgatttctaggactaggttttttatgtgttatttacccatttacgtaaatgtgaattagggcatccatccaacatgagatttttcgttcaggcctactaactcacttgaattcagaaacgaggtaagactagcatagaatgtatatattatatatgcatgatgtttatgtgatttatatatgttttgggttggtatcatagcatcacaaccattgtgtcagaacggcagtacgagtacagtacttgttaagagtgatattcaaccccagaaagtatttattggcgctatcatagtggtacgaacatagtaccagatcggcagtacgtgcatagtactggttaagagtgatattttggccaattatacttttaggtactattgatgctattatatcggcacgaacatagtgccgggcctgaagtgcaatcatagagttggtagtggatgatatcatggtcaatagtaccaaaagttaagaacgttcttacccatacggggataatgtttgtaagagtttaaatacgggatcctggtttatatagataaatatatatatgtgtgtttataaagtttaataatttaaattaaaagttttaattgggtacaatttttaaggaaaactctttaattagcaaaggaggcacgttaattagaaaattactatagtgcacctaagtattagggcgttacatatggtgtttagctattaggtgcccaatatcagctattgaatttgactccaaagtcctttttagcaaaatattctataataagagggatttttctgttctcttcaatataatattggacatttgtaattctttgtcaaacttccctaacatccctattcggaatatctcaatggtgtttaatggagatgctcatagtgttgccaaaaaaatattagggcttgattaagaatatgtgtggaatggtaccatttcacacttctcaaaattgtaacttgtattttttggctgctcaatgaaagttacaattttataaagaaaaaataatcaaaattggtcaaaagaatgaacaatgaatgaggagatagaaaccaaaaaggggttaatatatcttgagcctcgctctttcaccaaggaaaaaagctgattatcaactttgttaggaagactttgtcttaattaacacgcaatgccatcgtattgagagcttttcctacatattacaaatatagcttattattttcttttcaaatactttgggaaaacctcatactaataaaataattagaatactt

SEQ ID NO: 25475 - DNA, 3286 bp, Cannabis sativa
aatcagattagattgtaatagattgtaatgcgaatgcgttttatttagggcacaaaaccgaacaccaacaacccgaacagatcctatctaacttgatgcctctcttaaccagctcgttcttcgtaggaacccaattgtgacaaactcgccaaacaaaatttttcattttcggagttaagttcgagtgccagatctctttccaccactttctcaaaatccttttattggatgtctccgcaccatgtttctccatttgtgacaggatatatccactagcaaccgtgtattctccattcacagtgtagtgccaaatgagttcatcttcaccacaactgctcttagtttgaatccccaaaatccaaggaatatcatcaatatgcatcttctcctcaagagttgtgagaaggaaatgagctcctctaggaatccattgatcctcatttattctaactttggtaccatcagtcacacgccatcgtaacccctttaaaagaagctccctgccccatataatgcctctccaaacattagagcaccaagaaccatgtcttgcctccaagaattcagaattcagaaaataaagggcctttaacacttgggcaaacaaactatctggatttgtaacaagtttctaaccttgtttcaccaaaagagcttggttgaagtcttccaagtccctaaaccccatggccccagtccatttatctttgcataacttctcctagttaccctcaatgaatttgatgcttcgctgttgtagaaccccaccagaaacgagctataagggcttgaatctcacgaatcaaaccctttgttaatctaaaacagctcatgatataaaccgggatagcttggataactgattttatcaatacttcttgaccagtctgggagaaaagacccatcttccatccttgaagtttatcccaaaccttgttacgaatcagaccaaaagcttccttcttatttcttcctacaaaggcagggagactaagatactttgtatggttttctataaaagtaacccccatagaagcatcaagtctctggccctctgtccttgtaatcttccgagcaacacataagttagatttactaaaattaatgcactaacccgacaaggaagaatatacctgaagcacctctaaaatagctttcccctcctcaactgaagcattcataaagatcagactatcatcggcaaataggagatgtgtcaacctactctcaaggtgaccaaactggagcccatgaattttgttggctcggctagcttcattaatcagacaagacagcccctccaagcaaataagaaacaagaacggagatagagggtccccttgcctcaaacctctctccggaatgatgtgacccctagcctctccatttagcagaacagagaaagtaaccgtcttcacacaacccataatcttagtaatccatcgttcatcataacccaagcacttcatcatctcctcaagaaaaccccactcaactcggtcatatgctttagacatgtccagtttaagagccatcttcctaccattcccaaaccgacccttcttcatacaatggacaatttcaaaacctagaatggcattatcttgaatctgtctccccttaatgaatgcactctgattttcagagattaccttatccatgctccgttcatcctatttgcaaggcatttagagatcaccttatagactacattacatagacttaagggcctgtagtctcccaccatagtcggatcctttactttgggaataagacataataaagtgtcgtttagacaaccacaatccatattgttatttaagacctccaagtaagtagcaataacctcatgtcccacatcctcccaatgattatggtaaaataacctcgagaggccatctttccccggagctttgagaggatgaatttgatcaataacatctttaacttcttccttcgagaactcttccaggagtataatgttgtcgtgataagatagccggttaggaacacaccgatttaggatgtcagccatattaatattagaccctgaagaagaaaaaagattcgagtaaaagcgaaccatgatgtcctcaatctcgctgtccgaattgcaccacctcatttgttcatcatataatcccttaattgtgcttttcttcttccgttgggaggccttgtgatggaagtacttagtattacgatccccgtgagcgagccatagagcccgacttctttatttccataaaatctcctccttagcctcaacaacattaagatctctttcaatccttcttcggttcttccaatccgtttctccaacagaagaagagagattttttagttcctcttttagtttcttagttctagcccccaagtcagcctttttatctttattccattcatgaaggatctctccacattgattaattctccccctcagcccctgaggagagccccaattggaaccatcaagccaaaccgactccactatcttaccacaatcctcttccccagcccaagcttgttcataatgaaacctagatctccattttggatccttggttgaaagcttcttattcttgctagagctaagaagcaagggacggtggtccgagttccaccaaggaaggagggtgacttttgacatacaaaatcttctaaaccaatccaggttagccaacaccctatccaacttctcaaaaaccagattgttgtgacgcccattacaccacgtaaactcgccaccttccatcctaatttccttgaagttgcaataagaaatggcctttttgaagtcccgcatctgggagtcttgtttcaaacacccccctcttttttcgtttaccttaattatctcgttatagtctcctccacaaatccacgctccctgaatcaaatctcgaagtctctccagcagttgccaggagtttttcctaccacccggatcaggatttccatagaacccagtaaatctccaagcaaaacccagaccattctccacaatagcatcaatgtgagaaatagtaaacgctttcacactaacctcaaagggctccttccacaagagggccaacccaccacttttacccttggcagccaccacaaaacaactatcaaacccccctttccatcgcaagttcattaagtctagtttcggacaagaaaatcatcccgggatgatgatctttcacatgggagcaaagggtcttcaatctccaggggttcccaagcccctaaacattccaaaacaagatattcatggctctcagcgacccagttccac

SEQ ID NO: 25476 - DNA, 1749 bp, Cannabis sativa
agtcaatcaagtctccacaacaacaaatccttctgtgcaagcacagttggaccaactcagggacatgatccagggcatagcttgcctgaagccttcaaaccttgaacttgaccggtcgagggaatcactattcttggcatatataattgccttacccttgccgaagtttaaaataccggtatggaagatgtatactagacgagagaatccgttgggtcacatcaaatacttcgagatgcagcttgacctccaaaaggtcattggtgatgtgcatttaacacttttcccacgccacagaagaacaaggaggagaagtacacttgcttcatcctcttaataaagaagcctgaggccatcttcatggccactcagggaacgatcccataccgaaagccctttcctatcagaaggaagatgggcaagagggacatgtcgaagttctgcagatatcataacgacttcagtcacgacactaatgagtgtcaaaatttgaagagggagattaagtacctaataaggtgtaacaatccccacctgcgtcgttatgtgcaagaagaccagacctaggcgcaaggaggccaaaatggagattcgatgccaccacccgtggcaggacatctaggggtcataataggcggacccgacattgctggcaaaaccagcaaagctagggaaagctatgctcggacactctgtcatgaggccaaaggcaaattcctagatgtcaaagactggagttctaaacaacagaagcctgtagaacccaccatctcttttactgaagaagatacaacaccggtcagtttctcgcataatgaccccctggtcattactgtgcaaatcgggaatatgaccgtggctagatgtatggtggacaacggagcctcctccaacattcttttcaaatcaacatatgaaaagatggaactcaaactcaccgacctggcgccttgcaagcaagtgacgtatggcttttttggccaaggcatcgcacctatcaagaatattagattagccctcataattggagaaaatccaaccacaagaacactgatggtacagtttgtcgttatcgacgttccctctgctttgaatgccatgattggccgaccggccctcaacgacttgaaggcagtgacatctatctaccacttatgccttaaatttccaggaaggcacggagtggcatgcatgaggggagacaaatagtctgcctatcactattacaacttgaccttgtccaaggccaaaaaggagaaaatgcctgctagaagtccagaagatgcgccctgcaaggggcaatgaagtctagcccaaggcaaggacacagacacagatcctcgctttggggatcctacaggaaacttcagacctatagaagagttggaagaagtgcaagttgatcccactcacccaacaaggagactgaagatcagtgaaggttcggctcgagaaatcaagtcagtcttgacaaaatttctaagggcaaacctggacctgttcacatggtcacatagagatatggtcagaatcgacccctccatgataacccatgcactcaacattgatcaaagcattcgacctgttcagcaaaagaggcggcagctggacaaggagcgtgcccaggtactcaaagatgaagtcaaacgactgagggccaatgacttcatagtagaagaattctaccctcagtgggtatccaacctaaaactggtacctaaacccaataagaagtggagagtttgcatc

SEQ ID NO: 25477 - DNA, 3325 bp, Cannabis sativa
tttctgaaatctgtttttaaaaaataaggccaaacaagccaaattgtttttaaaaacaaaaaacagttttttagttatgatgtcaaacatgcacttaatttttagatcattgttgatggtatagttttctttgaccaaaatggctaatatgatagttcttctagtcctggtatgaaatcaagttagccattttggtcttcaatctgaaaattatgccaattatgatattagccaactgctccctttccatccttgtttccattgagaaatagctattattatctgtagtgtagtgtagtgtatacattcatgtacacccctacattacatacatgcacaaaatttgaacatgactttccaactatatactgttatgtaattatggacttgtgatcaggttgacctgtcctattatgatctatttgggagcctgaagctagttttgttaaatggtcagaagcttcctgctaaacaagaggtattagcccattttgaaaaagaaaaatacttgcaggtagttgtagaaaatgataaacttgtctgtctttgttcctaaaacaggcactgaaggatgcaatagttgaaattttaacttgcagaaaggtgatctattcaacaataatgcactaaaattttgagttgtagatttatctgaactagaacctattaaaagatgatacattttttcttgacagggtgaacctgcatatccttcggttgaagttgttactgaaactgaggtacaacattatgctatagagtatatgtcatgctgtgtttactttctgtttatttcataattctatactttgactttcataaatataggtagattcattttgattattttgtgggcaaactgatgaccaaaaaattttctttttcatgagccaaattatacaacttaagtggaactgttaagttttatttttgatttggaattttcttctttgctctgtatgattttcatacaggatcacagatattcacatttgtgcatgattgactctatacgctcatactaatcaccttttagcaaatgaattccaagaatttatatatttctaagaagttgaaatgatggcaaataaaaaaaaaacaataacattttaaaatgtgaaggaaaactctcttgtgaacttccaatgtgaatttgactttatagggatacttccacttagtattgaagacatagtgatactcttcacttcttttgtacataattttgtttcttgaactagtctatcattataatgtatacttaagtttgtaagtatactgagatagtttatgcctttgtatattttatatctgaaagcacatgcctttgctgatatctcaatgaatggaacaggattgctcatgttgcacaattgttgctgagaagtttgcactgacttcacctgaaactttggttgggaaaggattcagtaggctattggtaacttctttcagttctttcaaccaaagaaagaattcttggctatgtttatgagctcatattcttctttgacacaatttctcttctatttaactttgtttaagcatacatagggtgcattgagctactaagcatagtataactttgtaagctatcctagcaaatatttttcctgtcatatgtgtaattcttagtatatttgttcttccttcctaaaaattcaaggacttaatgtttagtttactatggaatactagttattttacagctatctttttcttcatggacttatctttagctttcttttatacttgcagttagcaggaatcctgtcagacactgagaacctaaccaaacctctttgttcttccaaagataagtacatggcttcacttctaatccacggtgcaggtcggcttgggtacaatggcctctatcaattatgtatgtattctaccatctaaagtgaatgcaatctttattaacagaaggaagtgagtcagttggctgattaagcaagttggaaatttgttaagggtagctgatggatgttatggtttgttatgagcctattagtcttattcttatttttagctcattattaatgtgttgtattctccttaccaattcaacacttctattccgatcaagttcagttcattcactctctattctctctttctttcattgttcactcctctgtttttaatgaaagctaataatgtaaccatgctatttatttatatgcatgactcaccttttggaggtgttatctatggtctgtagtgaaatacaagaagcatgatgtatcagagcttaaagtggttgacatattgcgcaaagatttcaagagatggacaagagtaggtttgtacttttcacaacctttgaataactattcaataatcaaaaaaaaatattcatgccatgccatccttcaatctcatttattcctctccggtatgtaacactttttactttgtcatgaaatttcgtaaacaaataaaattataaaagcaggtaacaagacacttatggttcaagaatgtctaacaatgggctgagttctattggaatttctattggacaacttctctcccatgagagtgctgcaccacaacaaattaagtactttcagcgtaagtggtcaaactcatcggcctgatcagtgattttcatagccatgttaccttttcaatgttctatactaattcatgaccacatgatatccatcaatatttctacttagcatttcataatcctcagtccaaaagcaagttatgaacctttggaatttgtttttcatgattatgtttagttgtccctgtaataattgtttcaaattgacttaaatttcagagttggagaaacttaggcttctcatgattgtttctggatattatgattcgaataagaacttcaaggtgagagaatataacccatatgattatcattatgattcaaaacttgtaaccttgtctaatttgtgttgtacttatatgcaataacaataatgcaatgtacaacatgagtatcataaatcaaaacttcacatctcaaatatgatcaatatctgatctagtcatagaatttgacatttctagctatgtttattgtattttagagggagattctagtctctactgagtctgttgtgctgatgaagactctgctcaatttctttaactcaaatgcgacacttcttcctctgaaagatctccatagaccaggcaagtttttcttcttaaatatacatctgataaactaattttgatcggtgaacatttatcagatacatattatattgtaatcttgtttgagaaaaagctatatcataagatgaatttgtaatgaaggatattatttttctaaacaaaatcattc

SEQ ID NO: 25478 - DNA, 3309 bp, Cannabis sativa
  modified_base (84)..(123): a, c, t, g, unknown or other
cttaaatagaatttatacattatctagataatcatgaaataaatcatgtgaaccatgcaacgtaaaatgttatttctgatcttnnnnnnnnnnnnnnnnnnnnnnnnnnnnnnnnnnnnnnnnttagggcacaaaacccaacatcccattcatgcgcgcacagatgggagaagctcccacatcttgcttaaacaaaaatactctagacaagcatgtttgagttttctcggacaacatgctgtctgaaacgagcaatgcaccccaaatgagacttccaacagccacttccctcagttgttccccctttaaacgcgcacggacaatatgcaatgcatactatccgattttcaacatttttcaattttcaaattttctcattattttcatggaataaaatttcgaattttcagtagatatttgtgtagatttttatttttaaattttaaaactatttatcaaattaaaattagttattattcatttaattaattttagattttagaagacttcgaatttgaaaattgatattttccacaaatttgcttttatgtttattttttaaacttcataatttattattttattttaattataaggtaagatattttatattttattatatgaaatggacttatttgacaataacatatgaatataatttgaaaaatattctaaatatttttgaaatcttgccatatatctatcaatttttattttttttatatacttttattaaattaaataatgagattagaaaaatggtaaatatttaccattttatcttgttagatatttattttattaaatattttattaaaaaaataacataaattttgaatagttagttgaattattttttaaaaagacatttagggttgttatgaccctaattagtcaaatttaagagtatcaattattttaatataaaattgaaattaaatcttatacacactatttcctaacttcttacatgtttgtttatttattttaatttttttttaataaacctattatttatttgattttaatgaacatgattaacttattgatgaatataatgatccaaattaatcatagttaattgtcaataaattaaataaataatttctaatagataattttataatgttctttcatctgtgtcataaacttaataacatgataaggcccatccaaattagtatatatgtgagcctatatattttttattcgacttaagtgcatataggagcccattttaaattttaaaattaatggattaggttgctaaaaaataataagatcactttgatagttttatttaggctcaattaatattagatttattcaattactagcaattatttatttaaatattaaatttttctcttttggaccttgtgcaagagttggggagccatagtagtgggtacgacatactgaacccaaccctccccatctcacataaactagcccaactgtgaaggcccatttgtcttatttaaataattgtattaagctaaatataatagtttaatcaaatttaaattgattagtaccataattaattttaaaatatgtgaaattaatttttcattaggttattttaaaattaatttaagataattaatttctagaaaaactaatttgtatttttctgatatttaattcaataataaaattaataattaagttgatttattctagatattcatgttcattttcttaaaaaaatatatatttaagttgaagattacttgattaattttagaccaatttaaattagaatattttttaaatataaattaataatttagttgatttattcaagatacttaattaattaaatttattttaatatattaaatttaataaaaaaaaattatatttaagtttaaaatttaattattttagaacaacttaaattagaatatttttcaagatatttattttaatatattttaattaataaatttcaaaatatattttaaaatattacaagttcaaaaatttatttaaaaattaaattaaagttgaaaattaattttttattaattttagatcaacttaaaattaagtaatttttattaataattaaataaaataaatagattaaaataaataataaattaatactacatttttcttaaaaaaataatgagttttaatataagacattcgatctccattgttggtcttacatggttattgttttcaatgggacctcgaggtgctagatttcgtccctctaatggatggttatccattgaacctttaacaccgttagatctcaaaaaataagtactttgcaatttttttgctagtggaatcatccctgtggtgactacttagaattgaaatttacaattatgaaacaatagtagaagctcataaagtaagaacaatcttgactctcgcctaccgggacaatattgggttctcattttgatcgaataaaatgtttctaaaatagtgtctattttagatgagttgactactctattcaactaatattatctttgactctcgcctaccgggacactgcatatcatctagttggaaatattggaaaataatttaaatatattttattttctacttttattaacatatcttcaatacttgttcaatattttttgaataagtgtatgaatttatattgaactataattgatttctttttattgatatttatagttgtcaaaatgtaatttaacgatcctcaccccaattctcttttacttaaagcatttgcaaataaactgaaaaatgcaaagatgaatcttgatcagaatatcacttcttacttatgatgaatttaaaattctaaaaagaaccatgatgggaattttgttatcagttcgttgtatccttcgtgatcaacaattggaactcgtatgacatagacaagcttgacgctaaattgtgtgcttgtgaaaagacattgtcaattgcaaggagatcattccctagcattgcaaatgatgacaaaggaggaactaaaaatattgataaagaaacctccaacaatactacatcttgaggctcagttgaagagattagggaaagtttttctactttcccagtcactcttgaacaacagattgaactaacaataagaacaattaaagaatagttaagtaagcatattattatgtgttcctactatggagagaaaagacattttaaattaaaatgtcccagacttctcaaccctatgaaacgaaggtaataattcttatgcttttgtttttgaatcatgcattttagagaatgacaaatctgtttggattgttgattatggatctgctaaccatatttattgttcat

SEQ ID NO: 25479 - DNA, 1711 bp, Cannabis sativa
atgaatcacgtgatattctaactttagtaaagaatcaccaaaagttgaatgagttaagatgagaacatctagatatgagatgtttgaaaatgaataagagtgtagattatgtgccctgcatcctcaagagaaatgctcaaagattttgacctactcccataatctttcaagaatgatgagatttgtgaccaaagtgggtgagttggtaaatttaggtaagagaaaggtatatcaaaacccaattatccaatgatcatattgaaaagagatgcacttgctattttcaacttttcaaattaagccaatggtcattaggatttcccctataggatattattccaaataagtgaaagtcaataccccttctttatttgcattaaatttgagtataggaagtatcgagctttaaagagctgagctaacaaggattgagattgagattgagtatggatgtgttaggtttgtttcaccaacattacctgattttaagagaccatagatcttaacttaagcacgtattagaaatttggatgacaaaggtaggaccactttttacaatatactttttttgacatctagtgtgatgtcccacaaaattttagacataagagatacaagtggatgactaaacaaactaggaagttgaaaataaacaataataagatagaatcgcttaaataacaaatttgatacatgtttatttccccctttcgtgaaaaaaattatcactcaacttatttaagtaagttcatgctggtttttggttatgataaagtgagtcagtagaaaggttgtggggattcaaaataccatagtaatttatatagtggagcattatcaagatttgaacctggatcttctctccttcagtttggttaaccacagtctttcacactatgattgagtacttgacttgacatgagtgggcatggtactctatcactaaaggcttagaaattgatgaagaacaatgagaggaatttgaaattactaaaaaggaggctctcatttactagttgtctgacagagaatgaaaactaggttattagagatggatgagaatgagagtcatcttattctttttatagtatttcaactagggttttggactttaattatatgaattaaaaagataaaataaatggataaaaattgctttagtggctgggcacttagtgggcctcactagttacaattttaccattttattttataattcatgttttctaaggccatatttcactaaggccatattttctaaattcaatcctataaatgtcaaaactgtttatttcataattataattaattatcaaataaaattgccatttgtcctatttattaattagaccttacaagtctcttaattaacaaataaaccccaaaacctcttttcttcacaattaagccaccttagtgaaaattcataaataagacatagtctaatttggaattataattatttaactgagtgtacaaacagtattatctcaactagtgtggggaccatgaccctatgtaatcaagcttacaataagtagatccaaaatttaccaagtaaattttctaacttattaatttctccagacatagatttagaattgaactcttaattacatagaacacactattaccaaaaatagatgtgatttaaattacccattgtgccaatccaaatagtcaaaattcctctatagatgatctacatcga

SEQ ID NO: 25480 - DNA, 3007 bp, Cannabis sativa
gctcgagatgggttctggtctctaggcccaccggggattatgagtgtcctaagttagaattgccatgggcttaggaacccgcgggccatccaattcttacaaggtcttgtgatccaaaagaagtttgactttatgttcttgtgtgagacactttgttgtaaggatgtcgttgaaagaattcgcatttctttggggttcgatggtgttttggcagtagattcatgtggttgtagtggaggagtagcattgctttggcaaaataaagatgatgttagtttgttatgtctctcgtctaattttgtggatattgaagttgtggctgatgtatctaatccttggcgtttaacaagtttttatggtgaggccaaacagactcttcgtgctaagtcttgggatcaatttgtgagctagctttgattagttctcttccatggtatttgattggagatctcaataatgttcttttgtagaataataaaaaaggtggccatccttatccaaattggcttattaatggttttcaaaataccctccatgcttgtgacttatttgatgttgatctttttggccatgagtttacatgggagaagagtcgtggtacaaataattggattgaagtttgtttaggttgtgctcttgttaatagtgattggcttcaacagtttcttactaccaagctcctaaaccttgaagtttcctcttctgatcattgccctctattatttgatccattcttcaagcctttggtgaccaagaagcgtcattttttattcgaaaattgttggcttcgtgaacctctttgttatcaattggttaaagattgatgggagagcaatggtctagtaaaaattcaagaaaaaattttaaaatgtgactcctctcttctcgaatggggtaaagattgttcgggtaattttgcttctcatattaagtattggcagaatgaggttaagagatttaaaaggggtcatgacccagattctattcgcaagtataaggaggctgagatggaattgtttgaggtgatgactcaaaaaaaagtgttttggcggcaacgctcgaaacaattatggcttcaaaaaggttattttcatgcaaaagaatcctctaggcttcgctctaatagtatttagaagccttaacgtcccaatagaagttgggctgaccagaatacggggttgtcagatgttatgttgagctattttaatgatttatttgttccttctaatacattgatggaatcccaagttcaattactggtgctcagaatgaagctttactttggcctgttacggttgaagaggtaaaattcgctttatttcaaatgcatcatgataagtctccaggtcctgatgggatgactccgggtttttaacaaaagtgttggcatattgtgggagccgatgtagtaaggcaagttcgttcttttttcctttttggaactcttccttctggtttgaatcacactaacattgttgttattccaaagaagaagacctgctactatgggtgttttgaggtctattgctcaaagtaatgtcctttacaaagtatgttttaaagtcttggctagctgtttgaaggaagttctttctcttgttatttctgaaaatcaaagcgccttttccaggcgcttgatctcagataatattatgattttcttagaggttatgtattacttaaaaaggaagaatgttggtaaagaaggctatattgctctgaaacttggtatgagtaaagcttgtgactaagttgattgacgagctattttaattaacatggggttccatattcagatagttgaattgatgttgcattttatttttacggttagtttcatgatcattcacgggggtcgtgaattgggcccttttgtccctgggcgtggtattcgtcaaggtcattccctctcaccctatttatctcatatatgtggtgaaggtttttctctcttattaagaaatttattttaaggggtgatctgcatggctgccgagtttataatggtacttctgttattgctaatatactttttgcagattatagctatatttattgtaaagctacagaacgtgaagtaaggaatgtgattcggttgttgcagacatatgaggctgcttcgagacagtgtattaatgtttccaaatctaccattttctttagaatgaatgcttctcagtccactaaagatttaatgtgtgggattttaggcatggtggaagctcgtgctaatagtctttaccttggccttccttgcacaatgggctacaataaaaatgttattctttgctttcttaaggataagatgcagacaagaatacaaagctaggaaggcaaatttttgtttaaggcatgtaaggaggttttattaaaaactgttgctcaggctcttcctacgtatgctatctcggtatttttgttgccagttgatacttgtaagaaattggaaggtatgatgagttaattttggtggggttaaatttttactcaaaattgtgggataagttggtttagttggcaacatttgtgttatattccggaaattaatatagtatttaattggacatgttttattaaatatgtaattattttggtaatggagtaagattatgatcttacttaggataattagtaaggatttattaaatgattatataaagcgtaatatattaattacggagattatattgggataagtgggtatcgaagataccatttttgaaataaaaatattttcaggcccgacaactgtggaaatttaatgatgtggtcagaaatgtcacaaaattaatggatggattattttggaaaatattctggactagtttagaattttagaatgtcaatttgacgaattagctagaattactaaaatgcccatagaatttttgaatagtttaaagctttaggaaaaagggtattatggtcttttaagggtttagtttgcttgtcttgtagtgactattagggtgaaggttaattgaataaattgattaaatattagttt

SEQ ID NO: 25481 - DNA, 1836 bp, Cannabis sativa
  modified_base (787)..(788): a, c, t, g, unknown or other
catattttttttcccattcaatgagaatattccaaactacaaattaacacatatttatacataaaacttaaaaaaaaaaaaatagaagaatgttttagtgattatttatatacgatgattatttagagcatttttatcactttaccaacacgtggcccgataaacaaaaattatcttcttccgactgaattcagtcaaaaaacatcggcgtttaatcggaagtttttgtataagtttgtgcatgttgtgttggcccgtattatatttatccgtatttttttaaaaaatgagttttgtcgtgtcgtgtcacaaaaaatacaagtcatgttgtgtcgtgtcaatatttttaaagagtacgtaggcccgacacagcctgcaagcccagtattttcgtaccatgctcagattcgtgctgacctgtattttttaaataagtcaatctgttttcatatccgagcttaaattcatattttactttttcatattttcttacaattactaaaatatatatgtttattttataattttagttatacttatataacattttaataatattttatagataattatataaaaaatactattagtattattagaatttgatatttacttatatataatatatatttagatttatatattacaccctataaatgaattaatatataattttatttttcatattttaatagcgttaattatataattataatattcaatattatatttaaattttattattatgttaacttatttataattgataattttaattattattatnnttattaataataaattataagattttttaatatgtcgtgtcgtgtttttcgtgtttgtcgcgtgtcatgtttttttagactaatctattcatacttacgtgttgtgccttttgtgcttctcgtgtcgtatcatatttttcgtgttatgtcgtgccaatttgtagctttgtgtcctgtcgtgtccaagcctgtgctcgtgcctttcggactctcgtgccaattttatgtcgtgtcaaaaagtctaactcgttggaggtaatgaaaaggaaagaaaacaattttcatttcatttatttgttggttacatattaaagtatccgaatggtcattctatcaatttggtcgaatgatattattccattttaaaatagaaagaaagatcactccaatgtatagtgagaaaaaaaattaataatttttttatcaattttttgatgcattttaaattttatttcattctattatttctattcttattctttttcttatatatgttttcattccttccaactaaatgttaccttagtagcatccaagttttaatctcttaatgaagttttagtaattagataagaattatgtttagtgtaattaaatcaagtcttagaacaagtacttttattgaattttgtacagcgagatttatacaagtccgatttgaataaattaatcacgagtgattaacactaagctataattattgggtttatgccatgaagtcccataggcaaggttagccttagccaccatgattgaccctctgagaaagaccaaaaccatccaaattcagctatatgaattatgaaatgaatgatagggcaccaaaaaatttgtagatatatacatagctcatgtgtcataactattggctatgcctatggatattaattagatagcaatagattagatattatttatatatatatataggttccaccctagtcaaacaaattttatttcattttcttttgtcaatttccatgcttagagtataggcacttttcaagttgccatatttaatgcttatagagataacgatggcttaagc

SEQ ID NO: 25482 - DNA, 5097 bp, Cannabis sativa
tttttttttttttttgagaagtcttctaggaatattctctgttttcagcaaagattgagattcaactattttttgggacgaaacgtgtttacaccaaaagtagccctgatgacgtggacatcaatatttgacacgtgacaaagaaagataacatcttagagttgaatagtcccaagtcatagcaggtcgacctaggaggggtccctagccctatgcccaggttgacttcgtgaactttgggatgatagtttggacttcaataactttaatccaactcactatctttcaatattttgtaccatgaagacatggagcaacttaatccagggctcgggaggtaaaatcacacgaacttgtaacccgaaagccaacttgggcacctagggtttcacctagtgcccaagtttacatcctcaattagggtttcaatttttggggtcgtcttagtgcaagtggttaaaacttgcattgggacatcaacaagacataccacaaacatatttgaggcattagaatcaaatttggagcaagttgatttttgagcacctagggcctgaggccccaagcaccgtgctttcaggttgacaatctgtcaatatgggcgctttccaagtgtctaatcaaagatctgacttttacattgaatctgccttcatctaaaataggggaataggtccttcataaggaaaaacaacaatttgtgggcacaaataacaaggcccaacgcccatgttgacacctagggctggcctacgcccaagttgataattttccaacttgggccataaaaaatggaatttttcaagaattctttcgagtatcatctacgtctttagaaaatattgagagtcaactatttttagggactaaaccaaattttttaagggtaaaactaggaatcaacgcctaggttgacacctggggcttgacccagcgcccatgctgacattttgtcaacctgggctgtttccaattcaattaagcaaaaagtactctaggtatttttatcgtcataaaaaataatgaagattcaagtaaactcagggagaaaaccacaaactcgagtccctaaaaatagggcctagccctgaggttgacctggtgctgggcccagtgcccaagttgacaatcaacctgggacgctagcttcattttctaaaatgccaaatccgatgtgaccattgaatctggcatggtcaaaaataggggaggagaccctgtcctcaagttaaaaagccttagaagtattacaaagagaatcataaaagctcagttaaagggcctagcgcccaggtcaacaaatggcctggttcactaggttatgcttatccaaatttgatgttgttttgaccgtctgtctagttttttacaagtacaatgactcatgaagtcagaatatttaaattcacaacttcaattttttgacaaatagactcactcacaaatcaaaagttttgagtcttctatttccacaaaacaataatatcttcgggaactggtaaccagcttcgccagagcatataaatggactaagtagtgtcaaattatcacttaggcatctcaaaggacacccctttgacatttctacacttatacaacgtcaaggttgacgtcagatgtcaacttgggcgccgagatgtcaacctgggcactaggacctgaattgcttttagtaaaacgaccattattcactcaacttttatttgattgacacgattcaacttttgttttgaagctatttaaactctctatcaagtcatgtctcatacactagacttaattctgaagctatcatcatcaaaaatcactcccaagagatttaaaaaaaataagctctaggtaacctgcagcggcacccgtcgggcaccaaaaattggccatcaccaccagaagctaattttcaccgttaaatcatcatcaagggtggataacaacttatttttatttttcccttatttttttgggcgtccttcacctataaaaggactgctcccttagctcatttttcacatttataaaactacccacaaggttagagtttttctctctagactttatctctctatagtttggagcttctgatacttagtctatggttgctcaaaaacttgaagtagacatagccccattactatcatgatctaggggtgaactactaaaattattgtgtttctctaaattacttaactacttttatttattctcaccaatctagcgaacggtgtggcttaaaagtctagtccaaatttattagtcaacaaaattaaacttctaggtggcctaaaactggacctagcgcccaagttgacacctggtgctgagcttagtgcccaggttgacatattttcaacctaggtcatttccaatcatctttccgaaaaaggtgttcctagaaattttttcattatcaaaaataacaaagatacaagaaaaattaggaaaaaaacacaatcctaagggtttgaaatctgagcccggcgcctaggttgacctggtgctaggccagtgctcaggttgacaatcaactcggtgcactggtttcaatcattcaaatgtcaattctgctctgagcattctctctgaaatggtcaaaacatggtaggagtcctcatccttaagttctagaactttggaagtatcaaaatgacatcccagaagcttcaaaataagcacccaacgcctagtttgacaaatggcctggtgcgctacttatctgattctgattttgtctcgatcaatcgtctagtttttcaaaataaccgagagccatgaagtcagaatagtcaaatttacaacttcatattttcacacatctaacaaggtgatttactgggaaatcatgtagtttcgagtctcacatttctgtataatgacaacatctctaagaactggtgactagctttgccagtacacagaaaatggactaagttatgtcaaaataccacttaggcataaaaaattacatccccatcacgttttcccacatcacatgtcaacctgggcgctggatgtcaaccagggcgctgggccctaaataaccttcaataaaatgaccataactccctccatattaatctgattgatgcgattcaacttgaaattcaaagatatttcaattttatatcaagtcatatcttacacatcaatctcaattcagaggctatcgactccaaatttcacctccaagagagttacgaatttaagctacaacttacccgcagcgtgtcccgccgtcgcaactggaactccgaaaattgatgatcaatctcaaaagttaattttaaccattatatcatcatctacggtctaaagtagccaacatgtatttttccatatttttttattattttattcacatttaaatgacctcctttacctataacagaagagctcctttagcttatttttcatattctataaaagtagccataaggacagagcatctctctctagaaattagagcatctaggcttagccattttttgtaattaatctcgtgagaataaatattcaaagcagacgcagttttattactgtcgcgatacagggagtgagctactataaattattgtgtctctctatttatacttagcatatatctcattctcgccgatctaatgagtaggtgtggcttagaagtctttatctagatttctaaatcaacaactaattacgaaccaacaaaagggggattaatcactggaattgattatatcaatgaacttctatagtaaaacttagtaaatgtaattctataattactacgagtttaattctatatttataatagaatattcatgaaattaataaacaatattacttgattgatgagattcaataaataatctattttattggagtttaaaattaagatccatggtctctgtattgccacactgaaacactggaagggtagggataaaagttgtatatgaaagtttggaaaagtctattttgatttgtcaaaatagtaattatttaattttgtaataagtaatttattttcaaatttattaattaaataaattgggaaaaagaaaaaaaattgtttggacaaaagacaccaccaatgtcttgttaagaaataagtggcgtcacctacattaagttaagacacagtgataggcaccacccattggatttttttttgggttaatattaattcaaaagataaatatttatttaaatttgaaaagtaattatagatatttagttggttaagagattctctcaaagtagttgagagattctctccaagtgattaagatattctctcaagtagttgagagattcactcaatcggttattagaaataaatatctataatagaatggaatgattataaatatttactcaactcaaataattaaatatgatttaataattaatgtgaattaaaatatttaattaaataaaacttttattatttttaattttaatatactgtataaactaaaaacaaattcgtgttatttttggaaagccataaaagattaatcaaactaattccttttctatcatcattctaaaaaggagttcttctcatgtgttgataattaaactaaaaactctatatacactatatcctactagtctacactagtccactactataatttggtcttttagtgatccgcacaaaaactgtaggtcactaaagagttaagagtgatttttaatgacatgcacaattagattgtaaaatatttagtgttagtctcttataatacatgtcaccaaagatatagaaggtcactaaagagtaaaactcaatattttctaatttttgttaatttaaaaaatattgttctatagtgatgtgtcagggatgactgggtaaatatgtaccgacctacctggtatataactatatcataatcttaaaataaaagaaataaagaaaacatagctgtaataattaaaaagataaaagataaaatgcatattttaaaaaaaagcataatatgtactaagtaggggtgtgcaacaatccaatccaattgaactgaaccgatccaatccaattcaattacaaaaaattggatatccaattacaattggattggattggaggctaaaagttagattctaattgga

SEQ ID NO: 25483 - DNA, 3836 bp, Cannabis sativa
aaacggagataaaacatgaatgaatatagtactcaaactagaaatgattaaaccaataaacaataaaattaacgccacgatatatacatgttcaagtcttataaattgatgtgatctatggctttactctagttctaaaacaccaccaaaattttctttattaattgagcaagaacatgatacaatacacatcagagatcgattctctgttggattctctcaaattgtgtatcttcatacacttaccccaagaatcttcttcagctagaagattcttcatacaaaactcaaaccaatttctctcttttttttttttggtacctctctctacctctcaatcactctcttcgaaatcacccctcaaaactcgtctgtgaccctcctttataaatgatcctcttttataaatgataagttgagataagggatatggatcccaaagttggttgctggaaatgctaagtttttaagttagttatgacttaacaaacttagcaaactccgtaacaatatctccatgtcagcttaagttaaatggcttctaaatgagacgcacgcttcccggaagacaaaccaaagcgtacgctgaaaagacttctaggatagaaaaagtgacagttggagtcgactatccggaacttcattttaagagggaacaactagccatccgaatctccttttcggaggaagactagccgttcctgaagactccttccagatggacaagttagacttctgggaacgcctttctgggtgacatctaactttccataaagatgaaccattcccgaactggacaagctagactttcagaaatcctttccagacgacatctagctttccacgacattttcatgtggaggactataccacaaatttcacctagtttctttaaattaaaatatgatggtgatgaagaatgaatgcaaccatcatggtaagtgttccacctatttcagtatactaacttctaagattaatcatgtccaagcaatgcttgaacctttttactattaagaccttagtaacaacatcaataggattatcttctgatctaaccttctccaattcaatcagtccttcttctatcatttcactaatccaatagagtcttatatatatatatatatatgtttgctcttttcatgataaattgaattcttgcaaagattgatggatgactgactatctgagtacacagtcactcctccttttatttgtgttaagtcatacatatttcctcaaagccataaagcttccttgaatacttccatcatagccataaattctgcttgcgtggtggaaagagcaaccatgggattgtaactgggccttcaagcatatacaattttggtttgtcatgaatatgtggaaaatgatcaattttttagtatctctatttgaggcatagtcagcatccacgaaaccttccaactctagttctctttttgctttcttataggccagaccataatccttagtgcctttcaagaaccttactaaccttttaagggccttccaattttcaatgcctaaattagacatgaactggcttaggatgcttagagcatgagctatattttgtttggtgctcactattacatacattaggcatcctaaaaccactgcataaggaacatcctttatttcttctttctcttctgcactagtaggacattgttgcttcgataggatgaactgtttgcctaatggtatagatgcactctattcatcttccatgttaaacttctaaataactttcttgatgtatccagattgcttcaagctaattgtcctttccttcttgttccttgaaacatcaataccaagtatcttttgaactggtccaagccccttcatctcaaattctctcttgagcttggctttgatacttttgatcatgaatttgtctttgctcatgatgagcatgtcgtccacatagagcaataaaaatacagctgtagattgctccagattcttaaaatgcaaacagtgatcgtatgcagattctttgaacctaatttgttgcatatgagtatcaaatcttttattccatcatcttggggactatttcaaaccatataaggacctgttgaacttgcatactaattcaacttctttcacttccacttgaaacccagatggttacttcatgttgatgtcttcatccaagaattcattcagtaaagtagttttaacatcaagttgttcaacttcaaactctatttgagctgccaaagtaagcatcaatcttatcgtcttgtacatgaccacaagtgagaatatttcagtgtagtcaattctttccacctcagtaaagtccttggccactaacctggctttgaaccgtaccagttcattctcattgattccctctttcaccttgagaatgcatttgcactccacaatatttttgatctctaacttcggtagaacaatccaagtcttgtttttccagagcgaatccatctcctcatccatggactggatccatttttacgtgtttccacttaaaatttcctttttgtagtttttgcgctcttcaatttcagttggttgtactactaatagtgcaagcgcaattaggtctgcctcagcaaacctttccgaagggtgaatctctcttttggttttatcatgtgctaactgataaccttccaaacctgcctatctgaatcttttcagaaaatctatttggtcttcgttatcttttggcttaacatcaacttctatctacgcactatctttcagttccataatagctttcagctacgaaccttcttttggatgttttgttccgtactctatttccatgcatgtagtgttcttgtttcttgattttcttgcatcacacggagacacactacctttccccgttgtcaagcgggaatattacaattcattgaaaattacatttatagcaattactacctttggtctactcttttttggaaatgcatattctataacccttggtatctaatgaataacctagaaaagttcccttaactgatctaggttccagtttatcaatagattagtgtacatatattgtacaccaaaaggttcttaaatgcattatgtttggggttctattgtaccacattttataaggggctttcaagtcttataactctgtttggtcttctatttataacataaattgcagtagctagagcttccccctaaaatggtttctctaatccaaaaatgaatagcaggcatctaactttattcaataggatttggttcattctttcagcaacaccattttactctggagtcttcactatggttctatgcatagcgatctcatattcttgacagaacttgtcaaatttagagttaataaactctatcctattatcactcctaaggttcttaactttaagattagtttggttttccacatgagtttttcaagttctaaactgttctaggcattcattcttagtttctagcaaataggtccaaacacacttattataatcatcaaccatagaaagaaaatattgcttactagagtgaggagcaggcccttctttgtgtatggcccccaaagatcaacatacacatattcgagtatcttcttagttatatgccttgctattatgaatttcagcttatgttgtttcctaaaacacaagcttcaaaaaatggtaaggtagaagaatttaaattttcaattataccactaagagtataggtggtctgtctctcttttttgagagttttgctctgtctctctccttgagtgtgtctgttacgttctaaaagttctaaaagttctttcttgttttttttttctgtcttgtgtttctatctgtcgtgtgtgc

SEQ ID NO: 25484 - DNA, 2229 bp, Cannabis sativa
  modified_base (753)..(786): a, c, t, g, unknown or other
aattaattttaattaatcaattatgattctaaaatttgactgtgtctagtttatgaattttcactaagctagggcttaattgtgaaaaaaagagattctagggttttttttgttaatttagagactttattaagtctaattaataaatatattaaatggaaattatatttgataattaattttaattattaaatatatagttttggcatttaagtggttgaatttgaaaaattgcatttttgaaaaaaggagataaatagttgagaaaaatggcaaaattgcaaagtgggggcccacatccatggccggccacttaacccctattttaccatttactttattattttttaatgccaaataattcaaacctaaacctagttgaattcctataaatagatagtgatggcgtcaaattaaaagatgatgaatacacttgccttcagtcaaaattttgagccatcttctctatgccattcgaatccttcttgtctctttctctcttcaatatttcgaaccctatagtgatagagtatgtgcccacacacatcaagtggtactcaatcacagtgtataaggctgtgaagaatccatatcaagagaaggagaatcgggctcagatcttagtgatactctgctacacaaaggatgcaagggttagagatctgagcggaaggagtcatttaattttactgcacccaatgtaaggtttctcaaactttatatgtgttcaattacattgttttagaaattcannnnnnnnnnnnnnnnnnnnnnnnnnnnnnnnnnatctagatcttggtaaaatataatccaacatatgtctcattaatctcagatcaatagttattattcttttccatttctgactataaagccagcgaattttgaatattatctttatcctttaaataataacgattcattcaatatgcaataaatggtattgttatatcatttaatattgattcatattccatgcattggacacgtgtcgacttctaaagtgtagccgatttttgggtataacaattgctccttaaaaagtactttttgattaaaaaaagtactttttgattaaaaaagaactttttaaatgattaccatggtatttttgtcttaacccaattttgaaaagatgcatgccttggttttttggcagttcagaactttgaggcacatcattagcattaaatctgtcttttccaatttgcatattcccatccgttagatcagtcctcttttgatctaacggtgttttacaatagggtattaaagacaagaacattactctatttcgccatttttaaattttaagctttcaaatttcctttgcatcctttaattttcttctttttcaccttgcatgccctcaccgtccttaccttttttcttgtgcatctcatcagattacatttccattctcagagaatttcagaacccatggcctcagccatcgaacactcaatcgcaaagtttttcattaccgagaaactttcgtcaaaacagtaagtggttcatctcctcttcctttatgcctatctttttaatatttgcaatatgattttcgtgattgattgttttcttgatctactttgtttggttatttcttttaggtaatttttgttctgttagtttggttaattttagggttaagtaaaatttctaagttatcaggttattagatttttaggttaagttgactttatcttttctagaaattgtgattatacaagtctgcaagtatgactcaatttatttctggaactacaacccaagaattccttgaaactctatgtcctaaaaatttagcccttccattaataggaaccttgaacataaccttaccaaacatgttcataggtatagcacacaaactacctaaagaactactctcagcggttaggtttcaaactgtgaattctactaaaaaagggagtgaaatgaaaaagagccacattcatttcgttgttccttggaagagttgatggtcttctttacttgatggaaaaatgattcctgagttaggtctggtgagaagattgcacccaaatgagcgtgattcagtttgctctcttcgttgctggactaccaagtgagcagtctccagagatttcgcttgatcgaacacctcaatctagattgtctttcaaagtaaaatctgattatgtgaaagagccaattccagaaaaaagatttggaaggaatatatgggaaaggttatacgaagaa

SEQ ID NO: 25485 - DNA, 2087 bp, Cannabis sativa
  modified_base (946)..(949): a, c, t, g, unknown or other
tatttaacttttaaattcagccataaaagaaaaaggaatttagttgaaacattctcaaactaaacttacaatcaaatataaaatagaaactttagcaaattcatgagcactcacattaatttattgtttaataaaacaaagcgagacatttctcaaaaccccaagcatagtctttcatttgaattataatagcaaacaaagatatcatactcacagaatttctaataacttgcagtcttgcactaccattaaacaatcggtctctactattattggtctttatggttgacttttcaactaactcaacacttctcggaccccacgactttaggtaagataggttccacaccatacaatagtaaaaagcttagtacactattctgctaataggcctttaaaatctcgggaaacaattcccaaaccatattccttccttcttcaaacaatattgtatttgttagggtttatgccctcaaaagagtataaagacatttctgattatttatatggagttgaatattttgatatatgcataaatgctaaattattaatgattaatattgaataatttatatataaatatcagaaaaaaatttattcatatatgaggttgtgacttgtagctgtacaaagaattaagatcacttagccatgaataaaacagttagcaacatattaaagtttggtaatctttaatcaatgtttgcgtgtataaggttcactgatgctcgttcttcggtgaaagaaatctcagtttagaatactgatgtagtatgacatctaagtaaaggtgttgtatataatagagattatatatgagaatgaccgatataaataaagcagttcttatcaaacatgtcgtttactataaagacctaattaatatcataatgatgatcaatagttgatcggcctaaatcctaagtaatcatgaactcttgttcannnnattagtttctttgattcacttgttaaagtttctcaaataagatgattctaacagcgtttttttttttgaatctaataatgtggatggctgagaacatgatctacaataatagaatcccgactttcttagcaaaccgaatgttagttctctttatgtgttaattcgagaactaaaaagtagcatgtaaatttagatgggatctaaattatacttctactagtgaattaatggtactaaaggataaaaaaataattagaagagtaaacggtaatttgtattagaaatattttactaggatctagatttactaacatgtatgttagattataattctataatctaacatcctaaatatgaattctataaaataatgaattaaacacgtaaaagttatagaaatccttacattgatggcaacaaaataatatgactctttttgttaagatctctaacccttgatcatttccattacagaatatgattaaggtctgaacctgaattcttcttctggtgataattggactacatagtcttcctcactatgctgagtattgctttgaaatgtgtaaacaagttctcaatactaaggagcacggaatttcatgaagaaatctaagagaaaatagcctttgaattttcgaaaattaaagagaagaagtgagctttttggggatttctagcttagaaaatcatcattaaacaaagcactattctctttctatttaaaggcttcacttagggttaggtttagatgagagtggcttaaaataaaacttgggctgaatcaactcttagtaccgaattgcatatgggcttaagagttagatttataccactttattccatttaaatgaaacaatgtgtcttttcctattttaccacttatctcctctaactatttaaataccaatttcattttaataattataaataattatcaaatagaatacaatttaaatatatttattaactagagccactaagtatcttaattaacaaataaattactcttttttctcttttcttctcaattatgtcatttcttagtaaaattcataaatacatcaattaattgatactacaaaataatattattccagttagtgcggggaccgtgggcctatgtatgaccaagctc

SEQ ID NO: 25486 - DNA, 2341 bp, Cannabis sativa
cctaactcttaaaagaaaattaagaaaaaatatcgtgtacattttactacctaaaagagttgcctagtatactgtcaatttggtattcaaaagaatttatagtaagagtatttgtaaatttttttacaataacaaaataaaaataaaagttaaaataatttattacatgtgtaatttttttttgttagacgtgtgatacacaattatttaaattttatttttaatattttttatgtgaaactaaataattataatcttacacaggcatgattaaataaaatataataaaaaattattttcaatatcaaaacagatgagagtgtaaatattatctctttgggaagtgttttgataacttaggcaatatttaattagctataataagtagtataagacatgtgcaagttgtggtagggcctatggtgttattgtgggcatacatgcaattgcattatataaagaagatcgatgaatgtgaccaaattgattgattggtgtgaagtgtggaaacatagaattttaatttgaaagaattggactcactataagaaaggaaggtcattttgtctatgcagcaataaattttgttggtaaaagtaattttcactagtgcttaaaattgttggtgaaaatggggcattgacatttatgtgctagttgagccccattttgtataattttgcttgtcatatattgcgctaacaaaactttctcgcgaagccaaattatttgtgaaaaagttttgttagtgcagtttgaattgcttgcaaaaatttcccaaaaatgaggatatacgcgagaaagtttactgacactttgcacttcgctgacaatagatttttacaattttgttttttaatttttacacatttttcacggggctataaaatacatcagtaaaagaatttttgtatatatatttttagaaaaaggttaaatgaaatgaaatataaatataattttaatttaaaataaacctaaaattttataaataataatttaaaataatacattaacataatttaaaacgtatattattacacaaaaaaaaaatactaaaataagagttgtaataatttatagaaaatactaatgtttacactaaaaatactaaaataatagttcgactacaaattaatgacaatatcgtcatcgtcatcgtcattgttgtggctcgaaggggtggtttgtgatgaagacccaatgctaataggagggaatgatattggaaatggggccatctcaagcatgttgatgtcaggaataatgctgaaaaaaaaatacttgaactgctccttgactgtagtacggtattgattccgagtctgtgtcatttattactgataagtattctgtgcttcctgctcttctaccttttgcttcaatgcctcatagtcttcaacgttgataataggctgctcagaggtggaacctgccctgggagttgcccctggagttgctcctttggtaccctaagtctaggcaaacggccaatacctctcgagtggcatgactgctcaccaagaacttgtgtataatttgtgaaaaattgggtgggatgtacatcatactgacgagagtgatcactcgacacaggttgagatttgcatctcttaaccattagggtctaagaaaatataaaattacttacatacacttgttgcgtgtattcattgtgccaagtcttgttcttgtggtggaacttctcaaaagtattcgcagcactgggaagttctcccatattgggattagccttgtcaacccaaaaattttccctagtaacatggacatcaatgtttgacacgtggctagaaggatggcgtcatgaagttgagtagacctgagtcatagtagttgacctgtgaggggaccctagccctgcacccaagttaacttcaagagccccaggatgaaagttcatacttcaataactcgaatctaactcactagatgtaatattgcaaaaaatataattgtgtttaattagacatattttattaaatatgtagttatgtgaatattaaagtaatgctataaccttactaaagttaattataggataatcagggacatttgagaaaataattaaataagcactactgcaaatatcagaattcgtgacggtcctaaaaatgattttttttgggaaccgttgctaaaaaaattaagtaactatttaaaactgtcgggaaaaatttagtattcccgacgatttaaaattgtagtaaacaaaataggcgatgttttttttaataaaatgcaattttttaatggaactttataggcgacagtttaaaaccgtcgcctatactataggcgactgtttaaaaccgtcgcctat

SEQ ID NO: 25487 - DNA, 2206 bp, Cannabis sativa
aaaacaaaaacaaaaaaaaaagttccaaaaatgaattaacttgtttaataaaccatcaacagagcaacatagtttatgttgtaatttaagacaaatcatactgatcaatagcatcaaactaaactgagaatgtaccatgaaccaaatcaagattcaaaactaaatgctgaaatgaataaacaatgctgccagatggatcttcgaattacacagctgaaactagaaatgaaaaacacagattacgtgattcaaactcaattgagtctactctacgggaaacaagcactatgctttattctttattgctttcaataatggagttacaaatcacaaagattatacatagaaatcttaaaaactcagctcctaatagtacatcaaaatcctctcaactcccttggattaaactcaaaactcacatggagaaacactaaactctcttggagagacgcatggagaaacagttaattctattagagaaaacactcaactcacatggaaatgacaaagtacttaaacagtcaaaacttggttcatccctcatttcttcacactccatctcataccctcattgaaatgacttgagttggtctatatataagccaagacccaactacctttaactaaacattcttaatagtcactaatatcttgccccacatatttaagtagcttcaatcactccaaaaactttaataaaccaaatttgcctaaactatcaccagtaaaactatagcacattaagtaaaagaaaaacgagtctttgaaaagttggcactaagtgttgtatgattctactactattaatccttttactataatactatttgtaatcgaataaatgatcaaacaacatgagtacacaaaaccaaatcaacaagccaacaaaagtacaaacaaaagcagtgactaagatccataaacaatataaacacctgtgatccataaatccagacagaaccgtaatcaaatgaaagggagactgaaatctgctcttgctcaaaacgcttaacccggctatgaacccgagtcagaggaatgttaagttgaaaatgaatcggaaatgaatcaatttttattccattcttttattcggttacatttggaatgtgattctattgaaaaggaagaaagaccattctaaaccaacaatagagcaacacaatttaataagccaaatttgcctaaactattaccagaaaaactatagcatacaaaaacacccccattaataaaaaacgagtctttaaaaagttggcacagtgttataagaatgttccattaatcttagtccacgtactatgatattattagcaatcgaacaaatgatcaaacaatatgagtacacaaaaccaaatcaacaaaacaaatatatttcaacgaaattaaaacctgtaatccatgaaatccagacagaatcgtaatgagaggaaagggagactgaaatctgctctggctcaaaacccttaaccctgcgacgaacgcgggggtcagagtcaggcaaatcaacagcgttgccgcgtaaattggtatcgaaaggagcggtaaaggggtcaaagggaccttccaaggtggtgggaatagcagcccgaacagaagtgatgagtagactaaaagcaaaagcaaaacagagaagaagaagggcatgaaacagagaagccataactagggtttgattgatgtgttgatgggattggttagttagtaaaagtattgggaaaagacatagctgagttttgagagggaatgttgagaaggaacaaaggaatattccgaacgtaagcttttccgaaactatgcaaaacagtttaattttaatgtttgtaaaaatatttaaatgattgtggctgtacttgcgtgacacgtggcgagtttctcgattcgtgagtagttaatagcagttttgcgcgcctttttatttattttaataatttaagaacggttcccttctttctctatcttcactatgggaatttcataattatttctaccctttttttttggtaaatataatttgagaattattgaatatattatttttttattttttattttttaaatttacatttgggttattcggatagtttttatgtagttttttttttttttttaaagattttggtaaagattttggtacaatttagattgttatgttagttactatgtagattgctctgtgaattttcgtaaaatgcaaaaaaaaaaa

SEQ ID NO: 25488 - DNA, 2444 bp, Cannabis sativa
gcttggaggtcattgggctacgtctatcggggctgggggacaatcggggctgtgggccaatgttggggcctaggattggcaaggaaaccgaaaaagagagagtatgagaaagagatcaagtgtgagggagagaaagaaagagtggcaggtgagtagggtaatgtgagtttgtgtaatatttaaggttaggattttgttttagggatgtagcatgagctttggcctatttaacatttgtaaatttttattttagttttagttgcactggttttttactaaaggaaaagctaaaaatgttggtttttaatcgacccaaagtagtgttcgtcactcaactgaaaaaagtttaaactggtatttttattttagctttagatattgattgacatgttgaccgacacaaactaaacattttgtagtagtgtgaacgtgaaattcttttcatttggaacaatatctaaaagttcactacaaaaaatattacttttagtcacaaaaaaatatgtgactaaaaataaaaaagttgggattaattataaattatcattcatacgttgtgactaaaagtgactaagggctagtctggcacaacagtgttgtggagaaaagcaattgtagctgtgctgtgagaataaatagctgcaacaaaaccgtggaaaaaagctgagcaaagtgtttggtaattaataaattttaaagtgttgtaatatgttaagattctattatatacgataatgataattttgtaatctagttaattataatcacaatatataaaaaaattatttatgttatataattttttttttaaaaaatattcttaattattttctcccaaaagtataaatttatatatatttgataaaaataaattatagtagttttaaattatattcttatcatatgtaaaaaaacatgctttttatttgtccgttagtcctaattttaactgagccgtttactttttaaaattgccacgtgttgaaatattattggtccaaattattattttaattttaaagtaacaagtgaaatcattatgaaaacaatgttatttaaaaaataggaataggatagtatacccgatgaagtaaagtggagatggaaggagctggggagggggggtagtcggtggtggtgagatggcttagtggagtcatgcgtgtgtacctttggtcgttgctgagagagaaaaggaagggtatgctagggacgaacggtgggcagacgaacggtgggcagacggacggtgggcagatggacagtgggcagcggacggagggcgggcgactgacagtctttcgaatcagtgtctggcggggctgggtttcgaaatggggatgggtctgctcgggttttgaattgggggatataggacgcgtaaaaatgaaattacactttgtaaaaatggggatgggttcgtttcggttgacagccgtgacaaatatattaaccttaatttttaaccgaagcaaaagaaattggcttcaattttccactgatgcaaaatataaaagatattttaaaaattatcacattttacctcggttctactttttgcatcggggtacgagccgatgctaattgttatttttttagctccagtcacactcttaagcataaaatcttcgcttattttttgcctcagttaaccattttggtgagacgcgttgaccgacgcaaacagtactttttgtagtagagatttgagaaggaaatataaattttcttttctgctctatatttcgaaaatagcattgtaaataaaaagtaaaaaaaaaatattgcatacaaatatgcatcaaattgtaactgacgcaatatctcaattagcatcgattacagtttgaagtgaagcttcttgctccacttaagagctgacgccaatagtgaatgctattttcttcgattcttaaccgaagcaaaaaataatttgtgccaattttaaaacgaagcaaataacttgactgtttacgtctgctgttattacgtcatttttaccaaccgacacaaataatttatgtgtcactttacaaccgaagcaaaaagttatttttgtagtatattcgattcccattaattaaattatatttaattatttaaataaatttctataaccgaattcagttactgctattttagatgagtgaatctctcaaccacttgagagaatatctcaactaacttgaaatatctttaactactattcaaatttaaatatttatctaattgaattaattaacccaaaagaaaaatctaataaggacaccctatgggcgcctacattgtctcaattaagacaaggatggtatcttttgccttgacaatttttttctcaataaatattatcttgacaaaattgatctttacaactgttgcccctaatttcgcccaaaatatgtggaccaaccggatgatgtcacgtggatgggaaagggttagca

SEQ ID NO: 25489 - DNA, 3037 bp, Cannabis sativa
  modified_base (1552)..(1553): a, c, t, g, unknown or other
  modified_base (2372)..(2393): a, c, t, g, unknown or other
ataggctcaaagatcttagtcaatcacaaaattgtattttaagcacaaacctacacacttggagcaaatacatcaaatctatacaaaaataaatgctaatccatgaaataattgactactaatgagtgtctcatcatatccccatactcaaactattacttatcctcgagcaatgaaaaagaataaaactaaaactaaaaattaaaaataaaactaacaagtcaattattggatgacaaattaagaaacatagaccatatgtaatttatctcaaaatatcaaactctctttcaattattcaatatacacttcaaataaacccatttaaacttaacttttaatattgtatttttattaaaatgtccatatatcaattctactaactctatatacatgtaatccatgcgcataaagacttcccttaccacaaaacattcaagataactataggcttttataactaatttatctccactaatataaattaaagtgatgtagttcaaaaagactttataggcatgtaacgctaggcttaggtaaatggtggataaaaatatcatttaggctagtttcacaccataaacttacaaatctaaacaaaaatactaaaaaccttcattataaatttccttttttcccaacaatatttttcattcaatacctcttttgttcacacaattaaagttataatcctatcaaatttatctattgctattattatttcttttttcaatatgattttttttctttaaagctatttttttatacatatatggaaggagaactttttaacataatatatttagatcataactctctatgcacatacatccttttcaaacacaattctcagaaaaattttccatcctacttattacatcatatttttcatttagtacacaacaacttatgtttatggtgcgaaatagggtaagagtattttatttaagttcatggctcataatcaaggataaatatgcattttgttattaataaagaataaaaattggaaaaaataggctcaaaataggacaacaaaagataatgtattaatgttagtttttttggcgcaaataattaaaaacaaatgccttaatcttctctacacaacaacaatttaggatttagcctcaattagttaatcacacaagttctagttctctcaatatcaataaaaacaaaccaggactacataggcatataaaattgcaatatatatatatatatattgaacaagtacaatgacacataactcatataagaatatcaaaagcaagcataacaggtcaagtacacaattcacaaatttttcacacatactaaataatatcaaagagtttagcatgatttcatcatctaatcccatatgtcgcaagttaattttaatatagtcatccaacaataataaataaaagccttaaatctacccattaaaactaaaataataattaaaaaaacattaaaaatatccacccatccccaacattaaaataaatagtgtccctactgtgcaataaaatcaaagctaggagagaaaacaaaccagagcagnnaggactacaggtccatagctatatcaccggccgccatcagtagcaggtagatcttcatcattacaagtattaggttggtatagtctccagagctcatcaggaaactgaggataatcagtgtacgacgagtgacatgcaaacgtagtaaaacttagcctgaaaatttttcattgtgaaccgacgatgttgtaactcctcaatgttttgcatcatcacatgtgatgagtgtacgacgaatgaggagcgaaagtggcataaaacttagtcttttttttttttttcagttcaatcgctagggtgacatgtattatgggtgacatgttgctaactttttattcaaatttttttcacgtatttcacaaatcttggactaaataaaatacaaaataaaaaaaaataaaacttggttcgaatatgtaaactaaaaactttaaaacgaaagaaaaaaataataaaagatgtatcagttgcctctcataaaaggctttgtatgggttgcctctgataaagcgctttgttatcatctttaactagatgttattgttactttaaatttttttattacagagatatttaatcaacgctctactatcatggatgcccacctttagtttaaatctaaaaaaaaaaaaatctgaaagtacgattttaattgtgtaaaatctcttctctaaatttgttccattcaatttagaagaagagcaatatcatcatcaaattacaaattataaatctaaaaacccatatgattcgaaaattctcgtttttaatattaacggtgttacactttatttatttatttaattattattattattnnnnnnnnnnnnnnnnnnnnnnttattattattattattactttgagaatgaaaagaacgttgtccaatgaaattgcaatcttttagggttggaaagttataccagatacattacaatttattttattgatggaaatacattataatttatttggtaaaccgattagtagtgaatacttctttgacacaatgcgttgccctgtggatgaaactaagcacaaacaaacactcccccaaaaaagaatgacagtgatttattaatttataataaaaataacattttcataaaagaaacgatgacttgttagaagaacccatcttaacatgatgccacgtacgttgccaattgccattaccaacccaacccaccgactgtgacacatttcaatttatttttatttaatgtaacttttttttagacaaacacttgcataataatgtgctatagtactactaagttttcttctcattcacagatactctctctttcttctctttaatattattcctttcttcttgaacttaccttccattctttttataagcagagtaccgaagcttcatcttcaaaacatatgagagctattatacagtagcactttgattacaataaacacagaaaatcgatcacagggagagaagaaatggctgattggggtcctgttg

SEQ ID NO: 25490 - DNA, 1771 bp, Cannabis sativa
  modified_base (34)..(61): a, c, t, g, unknown or other
atttaaatggctataaataattttcataattaannnnnnnnnnnnnnnnnnnnnnnnnnnnaactaagcggtctttacagtttatatattacattataaatggtctatataacgttcccgcttcaagcttttattggactttctcctacaacttattactcttatacacgggcacatcactcttgactgcttcttagactgatgattgattctacaaatcatgaacacgggtatttttgacgttctttgtccccacacgcaagatttttggaaaaatttatcaagaggtcacccatccgaagattactccaagtcaagtacgtttaattttgtagttcttaagtgattggccgcgagaaaataagatacaccttatttgcataggtagtagcaatcaattcatttgagctcttttcaactgtgtagtctaatagttacacagtttcagaattattactcctaacttttattaagtgatatgtaattgcacaatttacttgatatttatcgttatgaatcatggaactaccgactgtgagggtctaacatccatgtgggtgttaggcaccccttattaataaataaaaggtaggttgtgaaatcattatggtaatgtgcctatattttgggctatgaattaaagtgacttttctctttttcgaaagggaactaaaagtgattcaataacataaattacattaattgatgaagcatcgaaagtcagtgagaagataatcattgtatttaagtaaggtatttagaatttaattttaattaatcatgcacatgtagatgtagttattatcatatacttaattaaatgaaacattattttttttttaaaaaaaaaaaaaagtaaaacaatgttttaaactaaagtccaagttcagaaatatatttcactaaaaaaaaaagctatttttctttttaatttcttacgaaaaagatcactgcatagatttagttcgatgtgttaaagatggctttgcttttaccacaagctgtacaaatatttataacgtttttcttagtaataaagtttagccacaatatatgtatatatacccatattttgtggtgttttttaaaatatgagttgtgtccgtgtcctaaaaataatgagttgtgttgtgtgctaacattttcaaatggtaagcccgatatgcccgatataacttggaggctcgatatttttgtgtcgtactttgctcgagcatatctatttttcttgaatagaccagcctattttcatattcagacttgaactcgtgccttacttttccatattcttacaattaatgagttaattgctaatatatgtatattttattgtttcaattatatttatgtaatttttttatataatatttttgtaacgctctaattgcttaaacacactatagtgatttttctattactgtgcatactcttgtgaatcaaaggatttctcgaaaaacatgacaaattaaagcttttcgattaaaattaaactttagaaaatacatatatttacataacttcaggatcctgttaaaaatttacagcagtattcaaaatatatttttcacaaaggcatcgtccaacgactacaaaatataagcccatgtcgtcccgaagaaccaaacactccaggcttaaccatcccgatatgtacaatcacgtgcaaactttggactcactactgctcaacatttacctttccttttacctacacatgaaaacataactatgagtcgataaactcagtaaaaaaagcataaaatatatatat

SEQ ID NO: 25491 - DNA, 1752 bp, Cannabis sativa
actcagccagattattctatcggtaattcgttccaatttcactgtatttaatttcggtataacaaaaactacctattcttttgtgatcttgatatccaaattttactttattatgtaacgcaattcatactttaagcccttaagatatgaatgtctaaaaaagtattgtgctaatggatcagcgactcgaattaattaaaaaaagctagagaaaaacacctctttctattcatatacaatattgtatcaatagtttgctcataatagcaaattaacactgtcttataccacttatgacatcaagattgagtatttagctagaactatgactattttcaccactttatggtcactaatgaaaataataataacaacatcgtcacccatattttacacccttccaaccagccaatgcagaaatagtaccataaatcgtactacacaaaaagattctttatgttagtgtgtattgctacagcagtaaacagtcccccagacaaaacaaagcaagatttcaccattaaaatcagagagaaaacacaaataaccttgaacaactaactattaaatcctgcctatatgcatacacacataactcatttttataattttttatatcttgaatagaataaagtcataatgcaatgaagtatattgttgaaatttatatgtcaaactgtgcaaagtttcaagactaatgacattgttttaacgaaaagttgtagcagttattgcaaactgcataaaagatttttttaataaaaagaaatagtagtgatagcttactgtctttagatggtttcccataattttgccccaaaacttttgaaaaggagttgtctctttgatcttggatcactgaaagaaataaccaaaaaaatttgaagatttacaatcatgtcgcatgtataatttaaaaatgttcaaagatcggcaagatcacttacattgatcaaaaagagtgtttctgtaatttggggttgagccaactaacagcaattgagctgcctctgcatctcttgctatagaatgttgactggatgagttaaggtaaatttcacgcattagatcacttactgaatgagttgcaagaatctaagctcagtattagatttattaatttcacgtacattacagtatagagaatgataatcaagatttcatttttagttgcaacgatctaagctcattattagatttatcaatttccaatcaacttatagaaatagaaaaataatatgagtgagatacctgacagcgcaacgacgaaggggagagagagagtagagaagcggtgaagtgggttagggtagagaaagaatttagggtttgctatgaattttgggaagaacaataacgtctttgggtttagcggatcatggaattggagaatagtaaaagaagaaatcagttgaaagttttgaagatttacctcgagattgttgtatcgacttcctctctctttctctatgttcttttcttcagatgaaaaacaactccatttcagaaatcgattttgatggtgctattttgatattttcctgttgaatacttattttttgcctagatatgttgacagattttttttaaacttaaataaattggagatctaacctagcataaatgggttttgatttgttttattattattttattatatataaataatatttaattattttattaaataaaaattgaaagtcacctataaatttctcaaaaaccaaaaattttagttatataggcacactt

SEQ ID NO: 25492 - DNA, 2502 bp, Cannabis sativa
aatttaatattggagtaatgttttatttcaggttagtacagcatggggcataggattagttattggccctgctctgggaggcttctttgctcaggtacttcctttccttcttctctaagttagattttagaatacccaatcaaagtgtaaatatatatattttttgtgacttgttatgtgatcaatgtgtctataaaaacttttgtttcaacagccagcagagaagtatccacatattttttcaaaagattcattctttggaaggtacattacttacagtcatatttttcaaatatatatgatacattaattttgtaactatactcactaatgaaattaatcttcaattaatgttacatacaggtttccatacttcatgccatgcttttgtatatcacttattgcagttgtggtacttattatgagtttctggcttccggtacacatcttatgtcattctttccaatctttgtcaatgatctacaaattgattcttttgttatttatcaatataagataatcattgacattttgatttgtttgttcttcattattagtacaaataataattgttaattgtttcaggaaacgttacacaagcatgatgggaaaaacagagcttcaattacagattcctttgactctttggaaaacgcatcttttatgatcaatacaaatcaaagtaaagaacaaaatcaagaggaaaataaacctaaaagtaaaagtcttttaaggaattggcctttaatgtcttccataatggtttattgtgtattctctcttcatgagatggcatacgatgaggtaacatttattatgctcatttttcttatttttataatacacttagctatgtttttttccccttattgtttgatatgtacatgatagtgttaaaatgtttaagtaaattttcagattaattaaataatgctttgcagcacatgcagttatattttgaaggattttataattctcattgtgtggtacatttgatgatcaaaattcttctttattttccttgtttggtatagattttctcattatgggcagttagtcctagaaaatttggcggtttgagttactcaacagagaatgttggtgaagttcttgcaatcacaggtaaagcagttttgcaatgttgaattatttaaaccaagctaaattttatgcatgtgaacatgcatcattactactacaaatttcaataaaattgattatttattcatttaatattagaagtaaatatgccatgatatcagtgatcactaacaacgtattcaaatttaggtattgctcttcttgtctttcagatgttcctatatccaatcctggagaatttttttggaaccataatggtttctcgcgtttcaggggtaatttcttcattatttttttctaagaaaaattatgagtaatataaattgttgaaaattctaaaacttgatgcacataatattttgtttaaaatctattcttaacttcttgatgtaaaaatagcgcagaaagttattaacaaatagtaaatttttttcttttcatttttgactttttgatacattttttttttttgagtttttcgatattatacctaaaataattttatttataaaaatatttttaagaaaattatttgtacaaatatcgttatgtcacgtcagcttacataccgaattctaaaaaaaataccgaaaatataaaaaaattagaaaatctcgtttcaagaaatttttactttttgagagtattaaaaaaagtaaccttttagttacttttaatgtgaataagatatcaattggttatttttctattaaaaaatttattttagaattttatacatatataaataataaaataatcattttaatatgtgagaaatatatattaatctgtctccaaaaaaaaaagacgactaatattaaaagaaaattttttgtttcttttttatatttttaagttataatatattattttattttttaagatacattgaggttattttttttaatgtaactcatatgatgttttagatatgtataagcttattacttagtaacttataaaattggttgatatattaaatttcctttaagttgaaagtttaattatttttgttaactagatacatagaaaagaaacttaaaagttactctttaaggtcatttatttttgtagcggcaaaaaaatatatgcttcccacatatcaaaatgattatcataaaaaatagattacaatagtgtaatttttgagtcaaaataataaatggtttagctgaaaaaactttttaaagttttggaaaagaaaaaatatatagggacacgattttgtcccgttattgtactttcacgggatgtatttcgtgatgtacgacagcagttaaatgagtctcagggtacgtaataatgggtcttagagtacgttaccattttttaaccctagttacctctagatcaaccctagccctcagatcaaataactccccatctaacggctgtcgtaca

SEQ ID NO: 25493 - DNA, 4229 bp, Cannabis sativa
ttaatgattaagtcttaataaagataaaataaataaaacagtgtttacttgaaattaaaatatttttattggaaggattttttttttttttgagaataaacttgtgcttcatttgataaacaataagtacaaagcaatcaagttacatggaaagtagagaatcattccaaactaactcattatctagtcataaacctaacttaacaaccttatgagccaaaacatttaaatccctactaacatgactaacagttaagttaggactgaactataacaagttcttagagaactattattctaggtacaagatttaagtttatccaatggttttacaatttgttttaagaacatccacaggaagatgaaacatttgaacccattgaatgtcataaagaactgcctttgcttcaaccatagagaaacttgcttcaacctgattcaatccattcaaaacaacaaccccaatactatgcttcttgttttgatgatcgatggctgcatcggtataaacctgaaaattatccttaaaagaatttggtgttggcctggtatgcacaggagtagaaatatttgactgattatgctgttgttgtgcatccagatacttaaagaaaaagctaaaacaccaatcaaaaatatcattagcaggcatagcattatgtctgtaaaagatattgtttctctgattttaaagagcccacaattaacagtataaaatacaaacataatctctgtcaaagcatcggtcatactcattaaaaacatatgagtatcaaggtgtttatatttataataataagtcacaaaccttgaagatttccaaactttcctcgatctagagcaatccaacaaagcatgctgtatagtttcggggcaaagcttgcaaatgggacaaataggagagtcaataacatgtttttgaaaaaggaaggaggcaacaggaacaacattcgaaacaactctccaaacaaaatgttttatttttgggggaactttagaattccaaatcttactccagaatttcttagaatcattaaaagatgaagaagtgggaatatcttgagtagagagagccaaatggtaggcaaacataacactaaaagaccagaactctccctggaccaaataagatcatcttttccattgtgacctgagacaggcacctcaagaatatcatgaacaacagcttcatcaaaatgtctcctaagtgtaggtagatcccaagattcggaatcatctatgaaatgggaaagcatacaagattcaagggagacattatccttatagtgtagaaatttattatgaggtagccaataatcctcaagagtcataatttgttcaccatccctgatcttccaaatggtaccagaagccatcaaatttctttcccaaagaaggcttctccaagagtaggaagggatatgaccaggagtaacctcaaatattgaggaatttggaaagtacctagctttgagaacttgacagggcaaagagttagggattttaaagatcctccaagcttgcttagtaagcatagcttggttaaaatgaattagggaccgaaaaccaagcccacccaaaaattttgattgacaaaccgatttccaagatttccaataaatttttttggtatcacagaagaaccccaccaaaatctggccatcgtagcctcaattcctttacacagtttgacaggttacctaaagtaggccatcgcataagcaggtatagcctgtataacagccttgagaaggatttccttacctgcctctgccttggaaaaccacttagcagaccacttcgaaagaacagagagaactttatctttaaggaaagaaaaggaatgatatttagatttgggaagacactgagaaagacctaagtatttactaatgaaaggtctgtcttcaagatggaaagtgttgaagaaaagatctctgatagtttgggaagtatttggggaaagaaggatagaagatttagaaacattaataatctgccctgatgctttagaataaacgttaaacacatcccaaagagaagaacaggagtttctattagtagagcaaaagatgagaccatcatcagcaaaaaaaagatgggaaatagaacgtgctcttctagagatagtaacccccttgagtagacccttcacttgtttagcatgaagtagagatgataagccttcagcacacagaataaaaagatagggggataaaggatcccttgcctgagtctacgagaaggcttaacaaagcccttaacaagcccattaaccaaaaaggaaaaacaagtagtagttatacacctcatgataagagatacaaaactaataggaaagttgaaatgaagcataatactcttcaaaaaataccaatcaattcgatcaaaagcctttgctatgtcaagatttaaggcagcccagccacatttaccactctttctagagttaatggtatagacaatttcctgagcaataagtatattgtcaaaaatgaccatgccagtcacaaaagcgctttggaaaggagagataattttatctaacacagtttttaaacgactggctaaaactttggaaacaaccttataaaaggttgtgcaaagactaatgggtctaaagtccttaacagaagtgacatgctatttttaggaataaggacaattaaagtggaattgagatcagaaaaatcaaccccattgttaaggcagtcaaggacagcattaacaaaatcagagcccaccgtgtgccaattcttttgataaaaataggcattaagaccatctaaaccaggggccctatcccagaaagatgaaaaatgactttcctaacctcatcaatagtgaaaggctgaccaaggaaatcaacttcagagtcctcaagaggaggacctaagcactccagaatcatattcgcagactcagcattaccactgtcagaatgaaaaaggttagaaaaataagaggagattaaggcacaaatatcctcaaaattatcaacaaaattaccattgtcatctttaagaaacctaatagtattattcttctttctatgggaagcaaaacgataaaaaaatttagtgttcttatccccaacttgaagccagtaaatcctagccctttgcctccaataaatctcttccttgtaaagaagagcatcaagctaagctgagattgaagattttcaatcttcccagcaacatccctatattcagagggatagtggattggagacaagcaatctcatgctgaagatcactaagtctacatttaaagagatgcttaaaaattaaaaaattttacaaaacacctcctaaaaaattacatattcacaaatatatatactaatatgttgatcaaaaaatatatatataaactaaaaactattaataagaaaaagttctttttctttttaaaaaaaataagcattcatagattagaaaaaattagacctcgcggtcattacaaagtatgttcttaggaatggacgatatagataaacgaccaaaccagttgtgtgtaaagacccactttactacattatgggtcataaaattacaagttctgacagtattacaaaataaatagtctacaaaggaaagaatgattcttttacaaaacaaagagtagtttctaatttttcatctaggtttcacgccattgatcactattttagaattagtttccacaataataaacttgtagccattatccatcctttgccaactccgaagccaagcaaacacgacatcctcaccacaaagtgcgtctgaaaaattcaattttgttgtattctcccaaaccacctcactaaggtggtctctagcaacaattgcaatacacatgtgctccatccccacttttacatcacaattctgtttgagccagtcttgaggaggagggcaccaatcaaccaagtggagcagagacgaggtagggataatggatgctctgtaatttgtatcagagacagaaaagatacctcacgaggatgaacgccataggtgaaaagccaaattgcaattgaagaacatgtgctcaagagattcctcctttacaacgggatttaggaaggcacaacttgtcccaagccttcagttggatcccgtgattcctttttttaaaatcccaccaaaaatttcgaaccatatcatcaattttcgaaacaagatgattaaagaacttgatagtttgaatgacatacataggcatactgaaaaagcttggta

SEQ ID NO: 25494 - DNA, 1371 bp, Cannabis sativa
ctaaacaaacaaaacaagtaaatatatttgtaatttctaataataataataataacagcaaaattaaatgccatcaaacacattgaataaaacaatgtacttcttcttagagccgcttactgatcagttgcagtacaatcgtggccccaccctaatcatcctccctcctttcctacatgttaccatctcttctctttcattaaaacgtcttccattaaaatatatactatattaaccaaaattgtttaggtaaaaatgaatagcagaccccaagctttagtcacttgaaaatcacaacgttttataaataacttgcacgagaacttccatactcctggccttaaatcgggcaaaataaatcacttgttgttcttgcagaattcaagctgcttagtaatccaactccagagtttttgcaccacactcactgagacactaaactagacgaataaaactaaagttctagtgatgtgagaaaaaaaaaaggaaagaaacaaacctctggactgtggtgtagacaccacccatgcaacacaacaatgcgtcttggtagtttttaattaatgatggaactaagtaattagcaaaactggatccttacttgaaagctgtcatataagtattcaactgcctgacgaagcttgagaagttattgtgcttgaaatacttgggcaatagatccctggcgaactgaggctcgttccagacgacaaagctgttgttttgactgctccaggagacgattgaattcgtggacgagtcgtccaccatgtcgtaagttttgctcaaaaatggcggaggaggcgagttgttgatagatgaagtatcacgacttcccgccattagagcagagattctcagtgacagaagatcgaaaatggaaccgaattgagagagaaaagaaaggaagcaggattagggttttaggaagaggaaaggaaagtgcagagagagagaaggaaggcgatgctctgtgtccccaaagtgtgaccctcttctctttcaatctctatgaatatctctcttcttacaaaatctcatacacagttgtcaaaatgacagatcgatcaagttcaagaataaatttctttttgtttacttgaaatattttttaagagattaatgtgttctgcaatgatattaaaactttgaataaattgaaataagaattaatcaaaatgaaattacaaaaatgactcctatatatagccaatattgagcaaaaattagactatgcatatgatgagggttaaatctacaaatacacagcaatgaagaaagacgatatatattcaatgcattacccattcatctatgaaaagtccttccccaacaatcctggggccagtgtcttctggaggctttttacgt

SEQ ID NO: 25495 - DNA, 2360 bp, Cannabis sativa
ccatagggtaggtgcaaaagcatattggtacttggtcaccctaatccttatggaccgctctattggtacttggtcaccctagggagcttgcttcttcttcttctttagagcctcttgctcggttgtaacctcctcaatcacttggtcgggttcttagacttcattagatgggtagagcccgtacttaataaaattagccttaatggccaatagtgaaatatttttagctcgctcctggagttgaagtattttctaggctcttgtcctaagttctagggtaaaaggaggacgacaataagagggaatgtgatggaaattgatgatttccttgacaaaatagtaatcctacacaaattcgctaattttggacacatctgtgtccgtagtaccgattagccacttacgctcattttgagaaaagtaaaaatacccagttagtgtcgtgggctgatggctggccccatttttaggaagcatacaacacgaacagtacgaatagatactttatgtctttgggtgtaagttgggtcaaacatatgtgatagtagttggctatttctttgaaataaggatgcaaaggcagcattgcacctgcttgacatgtggccccgaccgcacaaaatccatgaatgggtgaatatgaacaatttcaagccaaaatccatgtgtaatatgccgaccaagccgattaaagataaaaagaaaggatttcattctaaaatggaattcctaaactcaaaagttcaaaacctcaaagaaatatttagaaattttttgaaacccatgaatgggtgaatatgaacaatttcaagccaaaagttataagaaataagagaatcaagaggtataatcatatgttagtcaaagttaaaagccctaatgtcttctattctatgattagtcaagaaaagttcaaaaatgaagaattttgcagcaaaaaattcagagagtaatgcatgtacttaacggatattgcataaagaaaagggaaaaaaaacttactcactgttcgaagcaatatgaatctgctcggaggatattagcaatggagtttccaacaaagttttgttcgaagatttgagaataaaaaagaatttttttcgctttggctctctgagagtaaaaatagctaaaagaatcccctaaaagctttgaccccttttataggtatcttaaaggggtaattagttgatttgaaattcgaatattttgggtttccccctaagttgaatgttaacactcattacaaatggtacagacgtcatgcatgcagtgtcactcaaccgtcagtgcgtcattcgaggtacatctttcaagaggtattgaatgtcgcagacactgaagacacattcaatcaggtcatgttgatcatggatgataatcaaagacgcgtcttccatccggacaacttcctaataagtccacgtgcgactaagaagatcccgcgcagacttggagagaaaatgttatctaaatttttacagtatgacgtggcatccatctaagtgacacgtgtaacatatctcataaccttggtggatgattctactcctagtaggctgtacagattgttatgatgctcaaagtcacacataaatgataagatgttccaacagatcatgaatagacatccgaccagctccacgaagcaagtagctcgcatgcaccgaccagggggtgtgagttagcaaattctgagatatatcttgtatatcttcaagcttgcaagtcacggcacaattcctacatttatcggattaattcgtatctttagggaataaagacaatcaacctaaattttccattttcttcattatatttatggaaataaactagtctcatattttatttgttattgattaagggaaactattttcatataattaatcccgatacatagtgatctcatctcactattcagggacaggaaattattcagagagaaaacactcaagagtgaaaccttgatctaagaatgaattgctcagagatcattgtaaaagctttcgagagagaataatttattcttgctcacaagttaatacagcaaaaaggggagtacactattaccaactataaggggccgaacctatataaatctggtgttttctttacttataagctttactttattttatttaattattctcaatcgctttaatttgactcactgttgttggctaaaagcaaggtcaacagttattttttagtggttttcagaatattttttttgtccaaaaattattttttagttatttttttgttcatgtgtattttttatagtgtatatttttagtttcttcatgataatttttttggttgtatgtgtgttgttttgtagtttagatatatatatatat

SEQ ID NO: 25496 - DNA, 2323 bp, Cannabis sativa
ttcccaatattcataaagtgactctccagtaatttgctgaattccacagatttctttttggatgcttccaactttagaggctggaaagtatcgttccaagaaaacagtcttcatatcatttcatgtttcaatagttcgtggtggtagatagtacaattactctttcgcaacatcttgtagccaaaataatattcttttttatataaactaccaaataattaaattatattataaaatttagttaatttaaactcagaagtggactcataattttactaatgttgatgcaaaatttaaataacatatatgaatatagcatattttaaatattttggtaaaaaaataaatattatatgaatacttagaaataaaaataaatgaataaatatattaatataattgttttatcaatgtcttaaaattaaaaaatgaaattctttgaatttaatacaaaaaaaaaaaaaaaaagtaaaatacataaaaaataataaaaatatcaatatccaagtggagatttaaatattgctaataaaataaaaatttgaggatcaatttaccaaaataaaatttagggataaattcactaaaatgtatataatttggagagtaatttaccaaaaaaataaaatttaggaccaactcaccaaagcttacataatttaagaatctacagcataaataagctaaaaaaaaatcaatatatagggacggttggggtttcatgagccatttttaagtgctttagtgaagatgaagggagtgagaagtgtgagatggtgggattttgtgatattgggagtttctgtttgatgtgcgcttttactattttgctttttttatgaatcattatatatatattgaactggataatcattatatagaactcatcaattaagtgttctcacttctaccagtattattatcttattttattattatgaaatggatatcaacaggaaaagggagagctttacaattttttttttttttttgttgctgaaagggagagctttataattattcaaataaaacatttctttttgtgggtaagtaggccatacacatatatattatataaatatatgttggtatccgtatttgttttatgattttgcttaattaactatattttgtcaattttagtttgcctattctcatttgaggacaatattgacgtgttcaatccgtacaattatatattgtataataatttatttaaattcaaagccctctttataattgacataaaaagaaaatttttaagagatggtactactaccacaatttgcaaagcctaaacattaatgataccatttaataaaaaaaaatatttaatagtactattgatatactaatcatcatccattaacaagttttttggtatgatcattatataccctctagttttgtcgcgacattaagacaagtttccacgcaccttagctataggggggtgcgctaggcaaaagcattatgattataataccagaattataaattatatatgcttaattagcacaaattgcaaatcgatgaatgaagtgtatatatttatatatgtatattgtagtgggggtttcactttcactttcgaatctctctacttaagtgtttagagtcgaatagttatatatatggaccaccacacacaaagccacccatcattcccattcaaattttctaatccgaaaataacacaccaaaatatataaaataaaatcttcgttacaataatgccaaatgatcagaaaaaaaaaaaaaaaaaaacattattctatgtgttttagtttctctttccattctcaaaaaagcctctcaaactaactgaacccccccaaagctgaataattaattaactaatcccaccacaaaatcatcatgatctatataaaaatatatataaatattaaatgcttctacatgcaccccacgggttacacgtggcaatccgccgacgcaatctaagctcttcaattaggtaaactacatgatctgtcgccctctacgatcgatgattggctatgattaattaaacactaatcagttggctagctactaactattaattataagttagagagcttttttctcgttaacagggatcatcaggtttgttaatccatgattagatattcgaagatataatatttttttttcctaatggaactcgccgactcatgtgtgtgtaagtacggtatccatgtgtagggtttagttatctacatttgtaatatggtggggttacgaatacttgtatggttttggaccaaatgaatatgtagtacaaataaagaatgattaacaattgtactacatatatata

SEQ ID NO: 25497 - DNA, 4924 bp, Cannabis sativa
tttaaattatattactcaatgcgtaaaaatatatattcatataatatttacataaaaaaattataaaaactggacagcaccgcgcaaagcgcggcttagtttcctagttaagaagaaaaaaaatatatttgtgtttgtagtatgaggtaatctcaattgactcaaaatatatttgtgtttgtagtatgattattcttgtctatgtttagatttgagaattctcatattcttattagcctcataacttatagtgtgattatttattatgattgttatcgttagggtttgttgctttattattttcttttatttgaatgtgaataatcgggttgtcattatctaatttttactggaagaatatcttcggtagattgtcattaatagttataatttgtcacatgttcattcagattggaaatttagtattcttcatattttattgatgtttcattgttagtgacttattaatttttttaggttttttttttcaattattgtaaacattgcctatttattgattatgctctttaagcaatatcataatgtaatgtattttgcttgatttgtcaattagtaaaaattctatttttttcttggaaaaaaaaaaagaaaaagacaaaataaacatacaatagtgaatgattttgttgggggttataaaggactaacaccatttttttttagtaatttctcaaatttaaattatctatattcttaacaaaaaaaaaaaatatctatgtaaaaaaaccagtagttataatcgtaatttagtgttgatcatatatcttttcaaccataattgcacaagagaatcatttttcagataatcaaaattcattacaaggagagaatttttgttggattatgacaattaagaaaaaaataaaaaaaaaggaagataatttgaagtataaagaaacaatgggtacttgatgtactaattcaattcaattataaaaaaaattagatattcaatttcaattagattgtagtgggtgttataagttagtaaatgattagatagattattagatgttaattttaaaatttaattaaaaactaatctaatctaattacattttatatatattaaaaaattatttttatttaataatgtatgataaaaaatatattttcattatacttttactttttttttttgtattgaatttataatactttattgttttgtatatttatttttataattttgttatattttattacttaacaatatttttgtgttagttagtttagatttttaattgcattagactaataaggatgatcttgatggaatattaaacttaaatgaggagtgatattaaattttaggtattttttttttcatgttgttatgttaatattaagtatgtaattaaatattcaattaaaaaattaatctagtataattaataattagattgaatttgatcgaggatataattttataaattcaattactaattaaatttaatgggtatctatccctatcttaaattagcaataacaatagttattaaaggtgacaccctacttttattggcaagattattatcattttaaaggtataggatatatatgaatacaagaggtgacctctaatgatgtaacaccattagataaataaatgtttctttaagccattttcgtttgatgttataactgaaaaatgttattactcataatgacacttacaaattctctatgaacaaccttccacctatcttcaataataaaagaaattatgtcaaaactaaaagaaaaaaaaacatttttttatatcctattaatggaaatgagatggcaatacttacattagtctcttaaaagtgttaggtgaatcgattgtatggttaactttgtcaaaatagccattaatgatttgtgagaagtaattaaaagtgggaatgtagatagccaaaatactagtcttaaggaaggcaattaaaaactttgaatattattatatataacattaaaatgaacataaatgtaatacggtccacttttctttacccattttcaatttggtaaagaagaaatcaactttttttctttcttttttcctttggcttttgtataattattctactctcaccaaataagcattatagagtttgaaaaaaaaatcaaagtctattaaaattctacaaactcaatcataatatttccaactaataataaattttaaaaacgtttagaaaaaaaaataaaataacaataataaatttaacaaatcttcctctacaataaagcacaaaacaataggattatcaaaaaaaaaaaaaaaaaaacaaaaaagcacaaaacaataaagactaaaaaaaaattaaaaagaacaaccaagggcaatattgtcagaacatagaatagttcaaaagagtataaggtcccacttcttttttttttttgttttaaagaaaaaaacaaatctctcttttgattgaaattaaaatagtaaaatatagcaaatattacccactttctatttctctattctctctctctctctaatcaaacctcttctctcaaaaaaaaaaaaaaaaaaccagagctttgtgaagctacagaggaagcctagcctagaacccaaaaacacaatagccattatgttatgcttaagatcaaactcatttaggttcattctgtttatctccatttttgtttgcttcgtcactacttttggagcttctcatgtgtccgactcatttcgtgtttcgtctggttggttttctttttttgttgttttttttttgaattccatttttggagtgatttatcttttttttttttgtgtggtacggaaaaagggtttcttgtagaggaaagagaccttagtgggttgataccaccatgggagacgacgcggaggattcttgcggatggagcagtggataactcatctctgttgttggctgaggatagaactcggagaaaagacccgcttaatggtctcaaccgctacaatggcggttggaatattagcaatagtcactactgggctgtgagttactattaaattgtttattttatatgcagtttctcttaagtttgttggtgttatctttgccattttggttttgtgggttctgtgattctgagatttacaacgagtaaccgtacaagttttatgggttttattattgctttgagttattgaagttttatggtactttcatgcgttgaaagtaattatctggactcatattttgctgtgaatctgtgaaatttttaaggatttatattgatttacatttgttgtgggggttaaataaagttgagtcagttaccttatgactgatgttccaagttctctgatgaagggtctttgagttttgtttctttcaattgcatgctttatagtcttttgatgttgatttttcagtttaatttagtaaattgtgtttaccaagtttaatttattattagcattcatctggattaccattttgtgatgcagtctgttggtttcactgctgctccatttttcgtcatcgccctcgtctggtttgtgatttttggactttgcttgtccttgatctgcctctgttattgttgctgttctggagagccctatggctactctcgaattgcctatgctctctcgttgatcatgctcattctctttactattgctgcaatgtaagtctgtttctctcatttaatgttgattcaaggatgttttaacacttgcacatggctttgtaatggtgatagtgattcaggttactgatttgtgattccttcaatatatatattcaatatttcagcatagggtgcgtagtgctgtatacaggtcaaggaaagcttcacaacagtacaacaaacacgttgggttatgttgtacaacaggcagatgtaactgtcgaaagcctcaggaacgtttcagattatctttctgcagctaagcggatcggtgttgatgcagtgtttctgcccagggaagtccagaacaacattgacctaattgaaacaaagatcaactcttctgcaaccatgctttctgataaaactgaagagaattcaaagaagatacaagatggcctggatagcatgtaagttattcttctgcagctactataacaacctgaattaatgtttacagtacatttagataatgcttgtatttcttcatgttctatgctgcaggagattggctcttattattgttgccgctattatgctctttttggcatttcttggattttgtaagttattgaatttcttcaattatgattacaaaagtttccttctttcattaattgtaattttatacatgtccttgctactttttttgcagtgttttcgattcttgggttgcgaacacttgtatatatgtaagtaatgaactttttagctgtatcttgttccttattgctcctacatagcacaccaaaagatattcaaagttatgtttttggtagtctaatattcataaaacaaaattattattgactgcagtttggtggttgttgggtggattcttgtagcgggaaccttcattttatgcggtgtatttcttctccttcacaagtaagttctgtttgtttgagaggttgttggaaaattgcgacacgctcttgatcttatgttaataaaatgatggtggaatgaaatacgctaatctaccaacaaaaatgtgacatcttaaggagttgaaattaggattatatgtcaaatataaatataagggttataatgcactggaagtatatttattagtaccaatttttgagttgatcatttagtagcagctaactaatacaatgtatttaagggaggacaaaactgaatatatttcttaaaatgcttgttgttctcagtaagggtgcgtttggaaagccacaatgtaattggatttgtgtgtaattggaggtaattacacaatttggcatgtttgtctgaccatgtaattacactg

SEQ ID NO: 25498 - DNA, 2435 bp, Cannabis sativa
aaaaaaaattgattaaaagactataaaaaatttatttgtaatgaaaatatatttacttattaaaattaaaagatttaaaataaataatatttaaatattttttattttgttgtaataatatatttcatatttttatttctaatattagcaaattacatcaactaaaattttcttatatgagttttttaattatttattttacatataaaaaaatatataattttaaaagtataaattatttttatcaaatgcatatatatttttactttgaaaaaaaaataattaaaaaatatatagaaattttttatctaacataaattttttttatttattattataatgatttatattataacattatcattatcattataataaaatcttaacaatttacaacattttaaaattagtaattacacacttcaatttatttccatagttttgctacatttattttaactacaattgtttattcccgtacataacagctactttttcccttagttgtgctaaactgacaagtaatctattttaaagaacaatttttttttaccaaaaatagaatgaaaaaatattattaatttatttaaaaataaatatacactatatttttttaaaaaatgagaaatgtaatatattcaaaattatagtatcttttctttgatttatttttcaaaatgttatcttctaatatatcttaaattaataaacattctgcgtttcgtggcggatgtacaaaatattttaaattatataaaaaaaattaaattatatattttaattaataataattactcaatacaattatataaaaattttaaccttttaattaaaaaatttgcaacataaatacttaaaatattaaatttgttgctaataaatatcagaattcgaaaaaaaaaaaagtagcataattcttcaaatttctaaacttaacaattttattggtacctaatttaatgatcttgaatggagaccaagctaaagaataagaagaagacagatttgagtttgagtttgattcatttatgatttaatttttattttgacgtgtgtgttaagatttgagttcgaattttattgtgtgtgtttttgatatttaagttttagtgttaaattgggattctactatttgagtttgtgtttatgagatttgtttttttttattattattatttacatagattttgagaacttaaaatttttatgttgtttctattgattattaggattgagagtttaattttttatacgagaattaaagtttgcattttcgtttcattgattggaaaatattagtagaaagtttatagaatgagaattgatagaattaaaaaatagcatttgaatcgagaatcaaagtttattgttaatctccttacaaaaaaaaatattgttaatctgtaaaaataacatggttaaaagaagatgaaaaatgataaataattgatttttatttcatttaatatttatataaattttttgttttttgaatattatgaatttgttttaattaatttttattttttaaaattattttttctaaaagaattattagtatgactaatactatatttacatgtggtacatataaatgtatgtgatgtttttttagaaagttaaataattaaaattaataaaaatgataatatattaccttcaataaattaattatatagtgtaaattattaaaaaaaatcaaaagccatcactgaaattaatataaatgtatataatttattacaaaataattatgataataaaaatctaaaactcatgattaaaggagagaaatataataaaaatttaattattcattatgattatttacagaaaaaaattataaaaaaatcatattagctcttatataaagtatttgttttaagttttcttagatatatatatatatgtgtgtgttataatatatatataaattttatggagagagagataggaatttatcattttaattagggttgtacatcggtcggtttagtcgtgttatagtgtatgtttgccaacccaatataaatgcctggttgcaaattatatctatttgcaaatatctatttgcaacccgtccaatgaaaaaaaaataaaaaaattgttactcgatcaataattttcgttggtttggtcgggttaacccgtttaaaccaatcttcatttttttttttcattattgttagttttttgtgttcaaaaaattgatttgaaaaaataaatttatagtatggacctttcaagattaaaatatttataatttaaattaataataaaaaattagggctttttcatttttatacttcaaaacaattttttttttttttgcattcttacataattctacataggatcccctattgcaactagcgttgcaacctaaattacaacaaaaaatcgtatggaaacccttattgcaactagcgctgcaa

SEQ ID NO: 25499 - DNA, 3274 bp, Cannabis sativa
atgtacggcagccgttagatggggaagttatttgatctgagggctgggattgatctaaggataattagggtcaaaaaatggtaaagtacactaagaactattgttacgtaccttgagagtcatctaatgtatttcgtacatcacggaatatattctgtgaaagtacaacaacgggacaaaatcgtatccctatatatataactgtttatcttagttatttaaattattctataaatttttaaaataatttaatgtgttgtaaaaaagaaaataaaaactcattttgcacttttacacctttttaagctttctaagtactagagaaaacaacatttctttcgattttcaagaatacatttggagacttcaagcattcaatcttcgattttggctttggacatttcaatcagcaactctaatagtgagtaagtatcttaatttatgtacattttacctcattttcttgcatttaacattacacatttttacgcaaaaaatttgggtttatgccataaatgttcttcattattcaagtttaaacttgaatttatcttaattattgttgctaaatatgcttgctcagggatttaattgctgaattatcgatcatatacatattttctttgagaaaacttgatgaacttaggctcgtacggtactttggcaatttctaggtttttctcaatctttgtcaagttcttcgtcatttggatggagttctttccattgatctagggatttgtctggtcaaaataaaaaaattgtttcaatttgaactcttcacttttgttcgatacaaacctatttcttcttttgttgatgaatccaaacgactataggggaggtaataatcatattgatgaagaccttttacaattactctttgaggaccaaccaaaggcccgtgcaaaatctcctctttcaaatgataattcttcctctagctttaaagagtgagaagtatcaagcaacaattttaagcctacgataccactcattcagcatcacttttatccagactggattggaggcagcgtgtatgggaggtttgtttgggagtacaatagaggcttaaggtgatttttaccctctaactggacgtatgttgttcgcacaggtgtcccaaacacttttccagaagcggatcccaaaccttcactttgacctagggtcaaggtagaaatcatcattactgttgaagaccaccctttatcaagttattcattccgtttaagaaaagtagctcgtactaaacaaacaatccgaaagatttgcctgagagactgggagttcatctagctgatggccaagcaacacgaatagggcagggaaaactccaaaggagaagacgccttgcccgtaggggacccaaaagtccaagaagtcgaagagaaagtcaagaatgataggtataccatcaagcgttttgaaggtgccagttggtggtcagaagacgagtgaccttttgatttttggggccatcttttagtcatatgcatcaactacacagatgaagaattcgacgaggttgaaccattcgagcatcaggagccagaaggcctattgtgggtctccctgccatcgagctgacaaaaaggtgccttcaaaacttggataggaagggccttcttggggatgtacatgtatttattccctttgagggacaactcaccaacgatctaggcgagggagtgtgtgcgtggtccagcccgcatgctgagcatggggccctcctatcacttcactcatactttttaaagttggtcggctactacaaaatttccctgacatagttcacgccgaatgggattaaatatctacgaatgtttgttctctacgcgtagcaaggatgggggagccttctgagcatgacataaattagttctataaactgaagtcttccctgcatcacgagagctcaggatacttctactttttgcagttggagtgttcgtggctgatcgagacaaatgagaagcatgtcaataagatcagtggtatcctccacgactactatatggtcaaaaagatgatgaccaaattctaagttttccaacgtgccaaaacatacatctagcctactttcacacttggccttagggatagggccttggccattttaagcttgtctagttctgcttggcacattatcttgttgacatccttcgagaatttaaccaagtatggactctattcgagcctagacagtctgttccccaaaaagccctctgcatcggtaaagacattctctcgtaagaagaaaaagaccaagaccaacgagattaaggcttcgcatgtggaagcacccattcgtctcagggttctcaaggaagacctgttcatagggtcgtgcatcatattaaagggaaaggaaaggccatctttgaagaaattgaagaagaatcctaagatgatgatgctccttcaattcttatttgggagtgtgctcctccgtaggttcagggtagatattattaacagattatgtaattttattaccccaaccattattatgatagtttttcctcttttttatgcaaaaatgtagagcaaacagaagtcctcatacaaaagaaagttgggtggcaccttaggcaaggaaagcccaagaaaagtgcaaaaattgatcccaatgtctcttctagagatggggtggtcatcattaacattgaacaagagacggccagaaccaaatcctttacgaccaagaacttaaagggtctgcccctagctcctgccttgctgactcaataaccaaaggacaaagctgaagccacggtgcctgtaaagctaaagcgtgcaaggaaatttgcaacaattaccatgaaaggttccgtgcggaggctggggagctattgggaggagcagacactcttttgactgacttcttgatggggaattcgcttaaggactgcaacaaggttttccttctatttttctaattttatatttgtccaatccatttcgtgtcttctaacttggctttatgtactttcagataaacttaccggcaggctatatctattctctaaccaaagccatgggcaagtagtccatgacggacaaagttgaaatcgagaaggttccaaaggcaatggcttagaaggagaaggccatagagcaagccaaccgagatttgaccgagcaaaagaaaaaagtcgaagagttgactcaacagatagccaacactctatcaaccacccagttggagaaattgttgggttttatgccctaaataaaacgcaatttcaatgtaatccattttattcaacat

SEQ ID NO: 25500 - DNA, 3014 bp, Cannabis sativa
caatgagaagaatgacagagaatagagctaacctgggtggtatctggattcaaagtaaagatagcctcttgcaaattccccaaaaaagcatccatgactagagcacccgaaatcattataacacccaagactcgaaaattgggagatgtctgagcatcagctaaggtgaaaagtatcaaaccaataactaggagtattgcagatacatattcacgaagagggtatctccttctcagtcctggaatgaaggctcccatgatcatgacaggtagtacctgaattttcatagccaaaagaataagaacaaagaaagatactagaaaagagggtcaaatttaacagcaaatcgttttacagtgtgtttttctaccttagtggatttgaacatgatttgagcaggataattaagaaaagccaaagatcctttagtgagtccttgagaacccattagaacaccagagagctttacatatgtcttccatgagttaaccatttgtttggtggtgaatccttgtaggtatattagtataatgtatacaaatccttgtacaaaggtgaaataccacccatagctggtaaaatggaatgaagattaggttcatatttttctaaaaatattaattttcatataaataaatgaaagacagcttacctaaactgaagtcggttgtacacatactcctgagaataggcagattaatatgtcaatgaccatataataatttttttttttttttttaaaaaaagagcatagaattttatgaacacgtcaaagcaaatcattatattgttcatacaatttttgcacaaaaatgatgaagtgagaaatggtaaaattgaaaagaacaggggaatttcaagaactattgtataacaaatcagcgagacaaaatctcaaagagaaaattggtaatggcaaaaaaaacatctatattatatacggcgattatcatttacgaaaaaaaaaaatacaccgcagattattatttatacaaatccgaatatatatgaactgacctcgcaaacgccattaacaaggtaaccaaagaaaaacccagaagaacaaatgaggaactgttgccatttaggcctttccgtaagagaaatcccaaagagggatagagtttgatcatcgttcctcatttagagaccccaaaatgaatccaaaccttagaaaaccaatcaatgatcaaagcagaggcagagataaataaaataaagacagaacaacagaaaacaaaaactttctttttaaggtaaagaaaagatctttggaaaagggttgatctatctttttagtgggtatagaagagaagtatcaagaaagcaaaataaataataataataaaaaaaaagtctttgtaatttggttgggtttagtactcacttggtggctaccaaagtttgaggcatgaaagaaggaaggttttttcacttacaaaaagaaattgacgagtgtgaaagagataataaatgggatgggagtgttgcgattcacatgaatcatggtgcacatggacggttcactgagctcacaagtttatataaaaaagaaagatttacccggaaaaaaagaagaaacgggtgggagaattttctcgcgaaaaacaagtgatgatgatatatatgatgagtttgctggtacgagtttggtaatggttacagtctcattccgccaatctacaagtcagtcaaaatattgactttttaattctctatgtgcctcctcaaaaagccatgcagtgtggaccagccaataagatccacacaccacattttctatggagttcttttcttgacaagtttttgcagtatttgtttttgcatttacaaaactcttttagttttttttttctttgccttgtaattatttaaaaaattttgtcaatttttaaaaattataaataatttatagtgttaaaaataaaatttaaaataattatttattacacttatgaaaaaatataattattcgtgtaataaaatatttaaattttattattaatattataaattattaatttttttaaacaaatttatatataatctaaaataattatagcatactcaataataaaaaaaatgcactaaaattctttttaatgccaaaacatattggatactatatcaaatatctctttaaaggtgtactgttcttattcattataatattatatgtttcttatatttttggtggagatatttctatgtttgtagtctcatgaaatatggaattaaaattatttattttgaaaaaagaattcattaattaacatagaagacaattacataatagatgtgatattattctatgatttttttctctttctgaaaatggtattagaagagcattatattaggtagattatgaaattgaattaaaataaatatacttagatatggatttttttgtgtctaatttaagaagaaaaataaaaaggaatatagaatgattagcaaataaattttagaaaatttatttaaatttatgagaaaagcctgctaatcatattggaggctagctccggaatgtagaggtttcataaacttaattcactaaacaaattaatgaaataaaaatacgagtatttttattgggtactaatagtatttaatagtttttaaacgtatctttttgtgattggttagtaatattccttaaaaattattatattaaattatatgacacttgatatttaattatacaaaaacgatataacaccgaagatggtactaagcactactggtatcttttagcatatttttctaataatatacatcatatcattttattatttttaggagtttcgtcttccaaactataacttgtgcattatatattgtgccttttgaatttttcaccgggataaaaaaaatgactattttacaactctatgaatagtttggggactatatttaacggattgaaaaatttaagaatttaataatatatattggtcatagtttgggtacaaaaatcgtaaatagcattatttcaatacaaattatacaaa

SEQ ID NO: 25501 - DNA, 1461 bp, Cannabis sativa
tgcattaatttctaaaatgtttatcagctccaaaaattctatatggtgggtaataatagctgaatttctaattcatttattattatttggtaattctagccgctgactaaatatatttctaacaattaattagcacaagctacacatatatgcccacacacaaaaaaaataaaagtaatactaaaaaactaataaatttttaactatctcacaactaagatgttcataaaatgaaaatcataataagaaaagataaaagaaaaaacccagtaaagcttaaatgtttaattaaacaatcagagaaaagtgaatgaatacaacatgaataagcataaatgaagaaataacagttacctaaatagaggcaaagaaaacttgagcagaaagtggaaatgggaaaagagattgatgaatgaatagatatgatctgagattcaaagggaatctacagtttgatgctctttagactttttaggcactctataaagatgatagcttttaggctttgatttatgagtttttttctttctttatttttgattctttcttggtcaggttggtcttgcttctaatcttaatttcaaattcttattcatgtttcttttttattaataaaattggtcttcatgttttgttgttgttgttattgttaattttttaatattaaaaaataattatgagatggatttggttccattatccaaatgccaaacacatgttggagcatgggtgtctaacgttgaactaccgaaagtagctggcggtggctttcacgcaacacctttggataatggatatggtatcatatatttataagcatactgcaatttattaataaaaataaatcattccattaaaaaaaataaaaaataaattattagtttcactttttgtttatttatttattatttttttttcttaaaaatatatatttatattatatttgttgagtgttcgattctacgacccttacacacataccccattaatattttatatgatcacttaactaagcctcgagtcattagttttactcaaaattagtgctgtaaatacggattagactttttgacacgatacgaaactggcacgaacacgactaagcacaaaaaaatacaaatttggatacgacacggtacgatactacaaattgacacgaaaaatatgtcattaagcaggacacgacacgtgaagcacgaaagatacgacacataagcacaaatagaccagcccgaaaagcatgacacacgacatgcctaaaaaacacgacacaacatattaaaaaactttataatttattattattaataataaaatatgaatttattaagtataaatagattaaaataatattaaaacttaaatataatatttaacattataattattatattaaatcataagaaattaagattatatattaatttatttataaggtatgatataaaaatttgaatattt

SEQ ID NO: 25502 - DNA, 6428 bp, Cannabis sativa
  modified_base (2091)..(2091): a, c, t, g, unknown or other
  modified_base (2491)..(2499): a, c, t, g, unknown or other
  modified_base (2557)..(2562): a, c, t, g, unknown or other
  modified_base (2636)..(2640): a, c, t, g, unknown or other
attattgattaaatctcaagctacgttttcttcctctttctattattataatttttgcattttttgtgttgtttagattgttcatcatcatgttgtattttgtggagttggaagaaagaattgttggggttaaactatctttgaccagaatttgtagatgcatctgtgtttctattttcttttaaagtttttgtttgtttagcattgaatattttcaccaaatgttatactgtttttgcttttatcatgtttttagtatttcaagtttacctaatccatgtaatctcatgaattagttgtaaatatatttagattaaaaacttgtttagatgggtttggtccttcttttttgtattaaaaaaaatgtaatggcaataatgaatccactacaattcccattacaacagcaatactataataatgccactagcatgatcagtcgctctgggcaatataggaaactaaaacaatagattaagcctggtggtttcaggcaaccaaaatgaccaaagataaaacctttttctatcataataatgacaattaattaggattagtataaactcaagttcgtaagattcaaaattgggaagttaaatcatttcaacttcaaagtagatgatgaaaaaatacatcattatcaactaataatacaagaaagttcatgccaatgttatagcaaaatgttttaccacagaccccagaaattctcagcgggataatatcagtgggtttttatttttgtgcatatgatatcttttgcatagtttctccaaggttgcaacagaatgctgcaatgaattcaacttcatgtccatgaacataccctgccaaacaaaagaaactataataagatacagaaacaattgaaagaaaaaaaactcaaaccttccatcaacaatttctccttcttacatgataattgtctccatatttctcaacaagttgaccaatatgaactcgctgaatagttgtcaatggttgcagctgtgcagttttcccatctctccgttgctttcctaaggccgacttcaaatctaatgccgccattaaatatggtaacttttattagaagaatgaaattttagacatgaccaaatgaaattctcagaagtaccttctcacatattttgcaaaatgattatcaatataacttaggaagcatattttatacaaacccttatggtggcttaccctatagtgaaaatggtactttgctaatttcactattacttctttcttaaaattcagacaagacaatccacaagattttcacatatgcctactgggttttcataataacaaaataaacaagccttaagaaaataacaaattaatcctactatagaattttgtatatactcctataagggcaaacgcacaccagacatgataaatctataagaaaaaaacacaaaccatacaacgattgaaaaactaatataaaattaaataacataagctttgtcaaattaccgtcttcttcaaggtcgcttccggtatcaatgaggtcatcgaagtctttatcctcatcggtctgcgaagaactcggagggggtacgacttgaagagactcaagttggaccatgtgagatgtacgttttcgaacgccgagcaaattaggatttgaaacgaagccgaaggacttgtagttttggataacgctggctttgtcgtcccattcgggggcagaggcgttttctccgatcaaagatcgaagcttgggagggacgttaaatgctggcttgaaaacatgtggcttcttcggcggtagccccacgcgtaccttcgtcctcgatctcttgtactttcttcgcgaccctcccatctctgaaaacaactagggcaacagaagaagaacgaaaagggttttagattggatttggggtttaggttttaccctttgctctcgcccaaaccatttaaacgctgtcgcatcgatgcgaagtgcccaacaataaatatttaggctaattatcaattttttccgccgaattttgacatataccaaattatgcccctgaactttttttgccgttaaaaattccccttaaactattgagatggttaaatttaaagacttttgtctantttcattcaattttactgtttcaagtactaaatcatgcttcccagactttgatatctaccaaatcatgtccctcaaatttttatatgtattaaatcatgctccctgaactttcatccgtgttaaattttttttattaaaattagacaaaagtccttaaatttaacaatcttaatagttcaggggaatttttaacggccaaaaaagttaaaggggcatgatttagtacatgtcaaagttcggccggggggatttgctaattagccaaaaaattggggaatattaaaaaggctaattaaaatttttgacattgaactttaacatgtaccaaatcatgctccttgaacttttaagatcgttaaaaatgccccctaaaatgttgagattgttagatttaaggannnnnnnnnaatttcattcaattttaatatttcagtgatatgtcatgtactaaatcatgctccccannnnnngatatctaccaaatcatgtctctctaactttgacatgtactaaattatggccactaaactttcatccatgttannnnnttttactaaaattagaaaaaaatccttaaatccaacaatctcaatagttcaagaggcatttttaacgatcttaaaaattcagggggcaaaaattctagttagccatttaaaaataagatttttagtaggtgacagcatcacttttgctctcacatataaggacattttaaaacttttaatttaaaatctgatggtactggtgcaactgggctcatgcgaagatggtgatgaggccatggttcatgtgaagagaagttgaggatgatgatgagatgagagtgaaggtgggcggagggttttctagacttaggtcaatttctgggtttggtgatggtggggaaagaagagaggagaaatgtgattgggggtctataatagggtttctagcgaatgtaggtggagaagggtagatggtgatcgggggtggtcatggttcaggcgaggagaaggtagagacaatgtggctatggtggtcagggtatttgagattgttttggttaggatattatttgagaaattatgttttggttttgtttgtttgtttttcttttcgaaaattccttcacaactcgtgaagaaccctaacttacgcctgctgtagcaataatttcgcaaagatctagcaaaaatattttcgattgctccttaccttgtaccacttatgctaaaactttgctaaaaattgctacagcaggaaaacttttccaaatcaacaacaaaagtcttttgttcatgcccaattttgttgtagcaaaattcaattaaaaatctagcaaaaactttaaacctccaaatcacatctaaaactctaaattatgctctaaaaatacttaaagtatcaaaccaagtgtaaaatctacccaaaaactaaaaataaaaatgaaagtaaaacaaaataaaataaaataaaaataaagcaagagagataaaaagtgtttttaaaattattaataataatataaatatataaatatatatagttagtaattcaaaattaagttaaaaatttaaatttaatttcttttaacatgaaatggaaaatattttaaattttttaatttttattatatataaaacaaactatatatataagttttttaatagaacataaatctatcatttttagctacaacttgagcttcaataatagcgaaacgggtcacaagggtcgacacgaacacgactcgattttttacgagtcaggttagggttgaaaaaattaaacacagagtcaaaaacggatcgacacgcttgacacaaaatatagaagcgagtcacataaaatataatacgaacacaacacgataacacattttgtcacccctaatttggataaaaaaaaataaaagctttttctcaatttaaaaatcttttggaaaatttaagatttgtagcttctcccctaaaatgacttttgagaaactattttgaaaaataaaatactttacataatttttaatttactcataaaagattttttttttaatgatatctaaagactttgaaaagtagttttcattaaaaaaataaaaataagacaaaatttatgcttattttataccttatacttctaactataaacaaaataaaaacttagccaaacaagaacagtatataatacacttgcattaccaagtgaaggttacaaagtgtacaataatgagataatgggggtgcatttttttctctttaagagagaaagcaaaagtaaaagtgattattagactaagaactatcctaataaaatcataatcacagccctgatgagcgattggcatattcttgaaccaatgctccaaaaagtgaaggcctttcaatcaaccgagacggtttgtcaaattctttggccagtcctgttgtcattcaataaagaaaagtcagtatttccaaagacgtgtatatatatatgtataaaacaccttgaaaagtcagtattagacctgcatcaacgaccaaaactctatcacagtccatgacagtgggaattctatgagcaatgctgatgatggtacagcttgcgaaatcctctcgtatgattctttgaattactgcgtcagtttgtgaatccacagaggctgtggcctcgtccatgaacaataagcggctccgcttaagcatcaccctacccagacacagaagctgtctctgtcccacactccagttatctccattatcaacaactgtgatgttacgtgttatatattacgtacacaccaaaaccaaatccattagtgtcacgtcaccaaagaagaaataatgataggtgtgtgtttgtgtacctggagaatcgagtttttctggtttggaagccaccacgtccctcagttggcatcgttctaggctctacacattacacacagagagaccattataactatagagaccatcgttctagtcttttgtgacttgtgagagtaaattaaaatacaataaattttgctgtatctcctgttttctttgagtgagattgctataataaaaatttgaacaatgtcagccaatttttggtaaatagaatcaatttttcttttgtgacaatgtttaaagtgacattattgaaagcaacaaaaaacaagtcaaattttaacttgtgcaacaaagacaaaattcaagaacagtggagatatggaacagagtggcaaaaatatctataataacgacatagtaaactgtagaagaagatggataagttatattaaatgaagttctgcataattgaagcagagtactgagtacacataccttccatatttcttcatcagagtaatctccaacagggtcgatattggttctgacagttccctcaaagagaactggttcttgaggtataatcccaaatctagaccttagatcatgaagtcccagaacggtaatatcaatgtcgtcgatgattattctacctcctgaaggctctacaagcctgaagaacacttgtatcaacgtcgatttaccactccctgttcgtccaacaacaccaaccttctctccgccattgatgctcagagttattcctttaagaaccaaaggtgtgttcggtcgataccggacctgttaaatcgaaacaagattagtatatttggtaacccaattaacccatttggttaaagttttattctttttaattattgatttatatttacctgtaagtctttgaggtgaacgttgccatgtgcaggccaatttggaggaggaagaaggtctttgagtctccactctgcttcagatggaatgttagtgaactgtttcactctctcaactgagaccattttgttctcaacgaagcaactcatgtagatggcccagaacatgacaccattaagggacaacccgtacgagagtgatagaccaacgttctctatattggtaagtaatatattccacagtaagtcatttgagtttgagacataacaaaaagaaagagaaatgaagtaattagaatttggtgtacctggttttataatactgcttggtaacaggaccatgaagagagtagacaaacacaagatgatgctgcctagtagctctaatctgaaacccaaccactcatttgatccgttgttgtggaaatccatacgcaaattggcgttcacccttctcaggttttcattgcagaagctcccttgttttcgaaatgatcgaatggtcatgaaccctgatatgctctctgagaaatggtgaattacaggtgcctttgttattgaatcaagacgagtcaattcacgagatgatgcgaggtaataaccctgcacaaaaaaaccataacacttttatttttgctatcttagaaa

SEQ ID NO: 25503 - DNA, 2069 bp, Cannabis sativa
tttaattggacatagtcattaatatgactctatgacatactactaacatatatttatgatgttagagaccttagaggcttagacataactcacttgcgtacttaacaaaagccacactatttcagaatccaaccactttctttaatggttcagcccagaaaaaaaaaaaaaaacttaaattcatttgatatttatgtctcaggcagaaagtaggaaaataataactttatacgttatagtttatttccatatggtcccttaaacaacaaccaattcttacacaaaaacgaaaaaaccactacaactgttggttgttgtgagtaaagtcacatcataataagttcacatggcataaaaacattcataataagcaagatatttttttttctgttaataaatatagtatataaatggtcaactatagttctctttaacatttttctttgactttttcagcggtaagtggtagaggattcatagcaagagacataacatttgagaacacggccggaccagagaagcaccaagccgtggctctgcgctcggactctgacctctcagtcttctaccggtgccgcttcaggggctaccaagacaccctctacacccacaccatgcgccaattcttcagggaatgccacatcagtggcactgttgactttatctttggtgacgcagcagccgtgttccaaaattgccagatattagccaaaaggggcctcccaaaccagaaaaataccatcacggcccaaggtcgaaaggacccaaatgagcccacgggcttctcaatccagtttagtaatataagtgctgattctgaccttgtgggctttgaaaactccacgtacacatatttgggtaggccttggaagctattctcgagaacagtgattttacagagctacattagtgatgctgtgaagccccaaggttggctcgagtggaacggagatttcgctttggacaccttgttctatggtgagtttatgaactttgggccgggtgcgggcctgggtagtcgggtcaagtggcccggttaccgtacctttaatgattcgaatcaggttcataattataccgttgcgcagttcattgaagggaacctttggttgccttctacaggtgtcaaatatagtgcaggattgcaatcttaaaatcattacataataattatattgatggtcgatttttctgggttctgttttgagatttggtttatggatgttactttttcctcttatataaatagaattataagccactaggaatgatagtaagtttatgtgatgttacaaaatgaaaatgatgtatacaatttgtttgtcttccactaattttcggaaaagtcccaattaatatattaataataataattcttggtagtactgttcttaattctatgtacgtagtttggttttagaaaagttaatgttgattagtcttatttttccacttataacttttaacatacaaaagaacaagaagagagtggttgttaatggtaaggagtaaagctgtaaagcacttcattgatagaacagcactactaaaacttattaacttccaaaatcctcggttggtgcaaataaaaattactttagagaggataacagacaacttctctaaacttatgtaataatactcttgacacttttttaagtacccttcctatgttttttgttatttactatcgttagatgtttaaatgatgatgactggtgagacgagtaaggctcacaaaagtcaggcaagtgggataacaggacaaagtcaatggataaaaaagagctcaaataaggcacaaaggaatcctagacatgtgagataatattaggtggtagatgctgctggggacaaaactatttatgaatgccatatatttaagattcaaactcccgtgggctctctcacacaattcacaactttaaatacctcaacttgctctgcacgctatttaacctttgaacagttccaaactgaaatttcagaatcttcttaaatttcttattaaccataaatttcttgaatttctcgttgaaatatgcaactatgttttttttttttttttt

SEQ ID NO: 25504 - DNA, 2214 bp, Cannabis sativa
agactattttgcccttgcctaaactaaaaggctttcttacaacctagtggtaatttggtcatttctaataccttgaatatttctgaaatttccaatctctacctaagtttccccgctattacaaaaatactaaattaattttaagtgactctataggccgcacgtcgcattccactgttaccgagcataaaacatgaaattcataaaaatttacatataacataattaatgcatctagtattcaaatatatctccgtaattgagaaaatatttttctaagacttatttcagacaataagccctaattcctacttagaaacacaaaattacataataattattgaacctcttaattttctgctaattcctatgatttaattatgcggtcattacaatgatccccctgttaaaaagattttttcctcaaaatcaagtctaaaattttggacactgagcccacaaattggattctagtttccaggtgtttcccttcaccttattgtttccttaagtatcttatctaatacaaaagttcaatttcagataactttgtctttcttatcgagatccataacttattccctcaataagataggcctaagtgaagttctcaaatttcataattgaagatatgagtcaaactcccccacatacagtttgaaaaacattttatgtgttgcaaaggttacttgtagggtttagatgagaaattaataacaatctgattctttcgggaaattccaaaattcatagtaacctatggtatatttatccttgtcttcaaagttgttccccatatttgagaattctacattgttgaatttcagattaacatgtccttattatcaatgctgagaaacaagtatcctatccatattcttttctatagtcttgtcaattattgaactaacctcaggcttagacgcttcctgttctgggttaaaacaaaacaacttcacataccatttagtattctgtagggacccatccctgttacactatggtaactattgattacacgaaaacttgatcaaacttgatatttgctccataagtccttgcgatttgccacattaatttatagtatatattgtaatacctaaattgtccctctgaattagctatttgtccaagagtagaaagttatataagctttaactacaatatgtcagttctttgaagacttcactaaactaggagataaatttcaatatcttatctgatataatggactataaagtcgcataaagtcatactatctcccttatggtttccatactagattttcagcaacatttctcactttacttgaaaaattaaacccatcaaatccaccttataaacttctggagattaaccctaatccacaacgaattaaatatttgaatactacaatgaaggagtggtgaaaacttccctaaaaatataacttctgagctcaaaattgttcgaaagacaaacttgagttttataatgtaacattccataatccaattgcaagcataattctgagctatatctgttagggctttcccaaagttttatatccattaacttagcatttctgttcttattgattaaatctggttgaattgttaacttgctgaactcgcctaacataaactctgatcttaatttcgattatgacatttactaactgaaacatttcctgcttaagacttctgccactgcattggccttcttggagtaataaatggttatgtagtaccaatcttaagctagcttcaaccactacttctaatctacatcccaatcctttcgagtaactaaatactttaaattttctccatagagttaacttagccaaattcttaagtacagaacccctgttcacaagttccgggtagtgatttgggtattgctacttatacttctttaatttacaaggtgaataaatagttattctatcaattactttaaatcaccctctagatcctttctgactgcctcacaaaagaccaagaacttttcttgatttaatagccatgttaacattaaagttgtattcaactgtaacttcagctcttggaaaccagtttatcaattgcctgttcacatagctcattacttcctcttaattagctctgctgtaagcttgaaatcttaaaataatccttccagattgtaactccatattttgtgtgatctggatcattaagaatataccatttaaggcttttcaggagcttattg

SEQ ID NO: 25505 - DNA, 4259 bp, Cannabis sativa
  modified_base (1589)..(1589): a, c, t, g, unknown or other
  modified_base (4154)..(4171): a, c, t, g, unknown or other
cgctattataatgtaatttaacaggcttaactaacatgtacgctaaatatgtaaccacaaatgcatatcattatactaatcttaccatatttttgaattcatgtgttccggccaacctaagtggaacagctgttcgacgatttataggcccttaaatcacattattcgtaaaattggtaagtggtgacatgctagacatgctaaaaatcacttttcggggacttaaacttgaaaatagaagttttcctatcgatggataacatggaaataccctaaatattacagaaacgggaaaaactagggttccttaaaacccgtagagaccgattccccaactagaattccagttctgtgaagttccctagggaccaaccgaaatttcggttcctacaggtccccttgaactacaattatggttcagtgcaggaaacaccaaactcactccaagcaattcaatttaaccccaaatgttaccaaaccttccagacctgctaattacatcacaatgaagaaaattcatgcaacaaaaaccagaaacaatccttgaaactcaaatcaccattaaagactaaagtttgagttctaaaactcaaaccttgtccaacgacaaaatcaagccacaaacaaactctaattcaactcaaataacattattttaacttcagaacaccaattcaaacaattgaaacaatcacagaaccctaattctaaaaagtatgcaaacaccttagcttgagcttaagaaaacctaaaggaaaaggctagggatttttaccttgtattgaacaactaagaagctttctaaactaccaagaatcagctaaagaaacaccaacttgctgctgagtctccaagggattcgagagagagagggagtgaagagagatgattatcttgattttccttaatttcttatatttctaataattcactagatggaaaataaacctaaattatttaatcaaattgtggccagctgccacactaaaaaccagccacctcacccaagacaaaatgacaaaatatccttcacacaagcttaactattaaaatggtctaggggtaatatggttatttctaaaacctcaggtattcccgacattcccaatgtctaactaggttgcctcgctactactaaaatactaagatgtgactctattggtcaaacggtgcgttccaatgttgccgggcacaaaacaagtaaaaatataaatttccatatatgacataaataatacatcctgaattcaaataaatctccataaaatgataaatcataattaatattctagtttcataattaaaccctaattatgtgctaattctaaatgttaaactaagtgatctttacacctgactttcctaactgatcgaatgttggttccctttatgtgttaattttggttttggaaagttacacgcaaatttagatgagatcttgaattatacttctactagtgaattattggaactaaaggataaagaagtaattagaaggttaaaatgataatttgaccaaaactaattacgaactaatgtaaggagggctgatcaatggaaactatagttaaactcagtaaatataattntataattactaagagttcaatttcatattttttatgaatcaaggtgttatattgctcactaaactgatttgtacaaacaaatagcatcctcataacagagaacctaaataaacctgtgcaaaattccatatgtcgctcttcctgtttaagactctggtagggagaggtctaacattgctggtgctgatgagagatctccgattgatctctcttcggatgaaactgagcacagtgctctaatcttggggtcagacttaatagagtaattacgtgagcaaggctcttgtctccttgcacatagtgatgccttgaattgtgccaaggctaagaacatcccattgcagcggctggttagcaccaagcctccgcacgtcactgcccaaagatgcttcactgacatttttggggtaattgttttatcatatctccttctagcttaactttctcttcttttattatctcctagcactattttcttgtctttaggctcgtgttggttatgcctacaccatggataatgagcagaagaaagtggttgagcttactaagaagctaggggtcgtagaagaccgtgctatcactgcagaagaccaggtaactactttgaaggagaagattgattctatttaaagtgaaatgtctaaactccaagaagtggctattggtgccaagacccgagagagtaatttgaagaagaacttggtggctgctcaaaagaagaacttggcggctctaagtcaaggtcttgaaagagagagagtaactaccctcgaggatcaggttcttcttgatgttaccttctatgatggcttgtgctttgatgccgtctatatggcttgggctaccaatggtggagctaagtctatcagctagaagggcttccctaaaaaaaatgtgcctgacttcatcaagcggtgtgagtagcattttggtgaagacactctcaaaaaatcaacttcactgtaaatggtggtgagctggtggttgaaacgactttaggagttgaaggctaaaccctgagcatcccaatttccctccatctactggtgatacacctcttacagagagtgagggcagggaggaagctattgttgatataacgggcttccaaaaccttctctaagtccattcttcttttttgtttttagcatttacctttagtgtgttagttgatcattttcgggcagcctttcaatgtggataagccttagtgaaatattattaaaattttgttttagttaattagaaattatttctaacttaataaaacttttattccaatacttattttttttattttactttatccgttaccacttgaccatttaacattttcacagtacaccatgtcttaagaaaatttattactgggagtaatgtcattgcttcttaaagttatctttaccatgagagtacttacacagatgtcaaaaaaaatttgaatgctcgtgtaacatataactcttgtataccataacataacctatgtgcccccaagttatcaaggaagtgccttcattggtcacttgccgtacaaaatcccactgggccttcttgatcatgactcttgagtggtcttaacctgggcgctgggtcctatttatggcacccaggaagtggtgtttcttcttcgaaagggcctacttccccattttttatgaagatgaagaatatgaaaaagttgattctccaatctgatacttggaaggtacctagattgacagattgtcagcctgggcactgggtgctcagggcccaggcgccacaggtgttcaaaaataaacttgctttgattctgattatgatacctcaaatatgtttgtggtatgtctagttgatgtcccaatacaagtttggcccttttccactaagacgttcttgaaaactgaaactctagttaaacatgtcaacctgggcgccgggtgaaaccctaggtgccaaagtttgcaaatgggctgcaggtttgtgtaattttagctctcgaggctttaattaggttgctcaatgtcttcatggtaaagaatactgaatgaaagtgagttggatataagttattggagtccgaacttccatcccgaagatcctcaagtcaagttaggcgcagggcgagggtctcatcccaagtcgactgctatgactcgggtctatactaaaccctttgatatcatccttcatgcctcgtgtcaaacgttgatgtccacgtcacttggaaaagttttcgggttaaaaaatcccataatagcattttagtaattggataaaactatgtttggtgtgattaaatctatatataagtgtatacatatatatagtttttgtcttatatttttattttctctctctcttgcacttataaaaatcttattaaccctaaatttgtgatcgtgaaatacaaacagaaaatggagatatgtatctgtaatttgaaaagaaaaaaaaaggttttgacaagatagttatagctaacgtgattttagttttacacctagataacttctaataagtaacttaaatgatatagtcagtttgagaattaactcgtcacaaaataataataataataannnnnnnnnnnnnnnnnntaataataataatatgatgatgatgatgatgatgataatgatgatagtgatgatgactgttgacttcgcttttagccaacgacaatga

SEQ ID NO: 25506 - DNA, 2072 bp, Cannabis sativa
  modified_base (2027)..(2033): a, c, t, g, unknown or other
cttggttctgtaggaaggagagactgtggcagtgggtgcttggttgccaaataggactttggcttgactataccatttagagatcttgtgatcatggcatgagtgtgagtaggggctgcctgtattgatattcctgcacagggtaaagatgcagcagatggttctggtgcagagacagtaggcaaagaaatattttggtatggggcagtgtttatggcattgttgctgatgggagtagacacgggtggattgatgatgatatttgaggatgtagtattggtttgtgatggagcggatgtggtgttgggcagattaggggatgcagtaggtaaagtagtggaagctagtataacaggttcagtagcttgggaatttggtgaattgggttgtaatgtctcagcaccagatggtggtattgcagcatcagtcacaatattagtgtgagataaaggacaatttgtagtaaagctagcagtagaaggagaatgggaatgaaattgtacctgatctgatgcatatgatgagagaattccaggatatcatctttcattgaaaataaaattgtgtgctataaagattcgaccttgagcattttcacatagaaaacctttgtgataggacgaatagccaataaagagacactgttcagacttaaaatccattttgtgggaatgatacggcctgagatgtggaaagcattcacaaccaaaaggcttcataatactatagtcaggtggtatgccaaagagacattcaaagggactaatgttgttgagaacaactgtaggcagcctattgatagtgaatgtggcatattgaaaggcatgccaccagtaagtaaaatccaatttgctttgagcaagcagagtaaggccagtttccacgatgtgtctatgctttctttcagccctcccatgttgctcatgagtatgagggcaaggatgagagaataagataccttgatcactgaggagtcttttaaaaggtttgtattcaccaccaccatcagcttggacagcctttataggaagtccaaattgtttttctgcaatgcctttaaacttaagaaacatctcaagagcttgagatttgagaactagagggtaaatccaagtgaagcggctaaagtcatcaataaagtggatataatacttgaaaccatctttggattgtatatgggagggaccccagaggtctgtatgaacaagttcaaggggtttagtggctctataagtggaaattgggaagggtaatttgtggcttttaccttgttgacatacatgacaaaattgaagtgtttttaaggaacctgtgtggggtatatgagataatattttgcacaaggtagaagtagaggggtgtcccaatttgcaatgccaagtattgatgtcattagaggcataattatgtaagacagaatgtgcagaaaagagagattgatctttattgatatgtaactgattacaagtagtggaacttatagtattgttacaatcaaaaggttgatcatcattatagtaatcataatctttactgggggaaatcaagttggtggtgagatagcattgttgatgttgctaatgtgagccagaaccttcactcaacatgtacaacccttctttatgccttcctttgaggagaggagctccggttcgcttgtccttaacaaaacagcaatttctatgaaattctagaaaaatgtcattatcatcaacaagcttagaaatgctgacaagattcttagtaatagtaggaacttgtaataccgattttaattgcaaaggacatgaagggttgaaggagggaagaaaggactgaccaacactaaagatttggagtttcttaccatcccctacagcaagagtctcattaccgtggtaaggctgttgattttcaagattggcagcatcaaaagtgacatgagctgtggcccttgtgtcagcataccaagtgtagtcatccccaaagtcttgaacaagagtagtggagtaggcttgagggtcatattctgttgggttttatgcccnnnnnnnaactccatttcaatgtaatctattttattcaacatcaat

SEQ ID NO: 25507 - DNA, 2217 bp, Cannabis sativa
aatcacgtaatacgcctatgctagttagggtgttacagcttgcaatcaagaccacgatcgaagagaaaatgttagaccacattaggaaagttgaatcaccaaaggaggcttgggacactttcgtcacgctcgtttcaaagaagaatgatgcaagacttcaacttctagagaatgagctcttataaatctcacaacaagagatgacaatcaaccaatattttaacaaggtaaaatttcttggttgtgtgatttctgatctatcgcctacttttaaaatgttagaagcaagaataagaataataactatcatgggttaaggcccgaatatagaagttttgttgctgcaatacaaggttagccaaccaggccttctcttgtcgagtttgaaaacttgctagaagatcaagaatttttggctaagcatatatcgggatttcaataaagaatgaagaagatcaagcactcttcaattacaaaagacaagggcgacccaagcaacaaaataacatcgggagtaatgaaatattacataagcaacatagaagctctaagtcaaaaggagctcaaaagaatcatgatataatcaaacgagtaaataaaagaactttcgatgttataagtgtggaaataaagggcatattgctagacattattattcaaagaattatgtcgaaggcaatgcaacaacctctagcaagaagattgatgtcgaagaagagtgggatttcgatacatcatttgtagtaggagaatctggcaagaataatgcaagctctaaagaatggttatttgtggcagtcactccagagcatattaattacaagagcaactggattattgattttggatgctcaaatcatatgacgagatataaagaagttgcgaaatgcggcagagtacaaaggagaacgagtattggtaacgaataatttcagtttgtcaatcactcacattgttaaggctgatgtagtccctcagtctagtcctgatcaaatttagtttcaaaatatttttcatgtacgagtaatgaaaaaaaatttactatcaatagctcaattggtatcatcaggaaattatgtcattttcgatactaatgatgtcaagatttaccaaaatcttaagatatttaggacaccatttataaaaggttgaggcttaaaatttatctacgttatgtcaactgagatttcttacatggataatgttcgaaaaaatgagacgtcagacttgtagcatgccaaattaggacatgttacttaccactaatgaaagatgatgatggagaaagtggtgctcaaaggtcttccacagcttaatgtcaaaagcgatattatttgtgttggatgtcaatatgggaaggataatcattttctatgtaacgagttaaacttcaatttgcaacccctttggagctagtccatcttgatgtctttggacgagtcaagcaactatcagttagctaaatgtgctacgtggtgacgtttattgatgacatctccaggtatgtctgggtttcttttataaaagaaaaatctcagactctagaaaagtttaaagaatttaaagagcaagtagaaggagaagtaggaagaaaaattctatgcatgtgcattaataacgacagagaatatacatctgatgatttctcctaaactttacaaaagtataagatacgtcattagttgacgtgtctgcatacaccataataaaatagtgtagcagaaagaaagaatcgacaccttgctgagacctgtcgaagcatgctacatgcaaagaatgtgtcaggtagattttgggctgaaggaatgaaaaaaatagctcatataattaactagattccttagccaaatcttgtatttatatcactctttgagaaattatggaaaatgaaacctacagttagtcactttcatgtttttggttgcgtctgatatgtcttcatactagatcatctacatagaaaatttgataaaaaaaaggctatcaggtgcatctttgcgggatatgacagtcaaagaaaagggtgtaaatattgtgatcctactagtggtcgatgttatgtatcacgaaatgttgtctttgatgaatcatcttcatggtggtctcctcaaatgaccgtacttcctaattccaaagaaattgaagaaaaacttcttttgaaagaataagaacgagtaggagaagcaaaccctcatacactactacaaacacttatac

SEQ ID NO: 25508 - DNA, 2666 bp, Cannabis sativa
ttgtgccttttgtttagtgggacatctggcttttcttaagtaaatgataattaaaatttcagcaatagtgttttaggaggaaggtgagaaattggaggaataagcctagagtcttctccttccttccttttcttctttcggttctgagcacacagtaggaaaccagcttcaatcactcagttttttgaagttttggcttgaatctaaagtgattcaagtaaaggtatgccctagaaaactcttttctttgtttggtggtggtgttgtcaggcttagggtgtgaatttgggaaattatgtttctgtttggtagaaattcgattagggttattatctacaagttattaatgatgttttatatctgattgaactattattgatgggtgattttgggtttgagcaagtttgagttcttggaactcaaatttggctcagctatgtcatgtttagttttggtgcgttttctttgttgtttttgtttgaaaattgttctaggctagtattacaggtatcttggagagtatggttgaatttggggttgaattggtgaagtttataaagatttgggtttttttgcaagagaactggctaaccgattccctagacatgccaaaaaacgggttcaccggtttggggattttgctctgccgatttttgcagggccagaaccctagtttccatattttctcgaggtttagtgcagtattagatttttttatctttaagactacccttgattataagtttaagattttcgggaaaggtttactcaagttatttacctgtttatgtaatgtgacataggacattcgttcagctcgtgaattttccattcaagtcggccgacacacttgaatctggaagtgaggtgaaattggcataaattatgtatatgtatgtgaatgcatgttgtttatattgtttacactaccaacactagaataattataatattgagtgtgttggtataatgtgtaatgtttaaggaaatgttacggtgttaccaacacgagtacaagtgagtatggagttcatgtggtaacacccagtagcacccgaaagtataattgggccctaccaactctagtacgggaatggtacttcagtgcatgtggtacaaagatcgtatttccgttaagaacgttcttaaccatttggtgagtcttgttcctaggcacaggagggcctaagtacgagtcagcattacatggtatatatatattttatgcatatcttactaagtctgttgactcatcagtttgctaccttgtgtaggtaagagaaaagctaaataggaggaacagtgagttgaaggctcaataatgattgtacatatcgcggcagtgcaacttggagtgtttcgatcatattgtattttgagtttagcttttgttgtcacgatgtgacatgtaaaaaataaaagtatatatatacatatatgaacgtacgtattgtataatctgaaaacagtattttaatacaggatcccagcgtgtaaaaactttatatgcgtatcaatatataattataaatagtttatatagcttaagtctatattcaagtggttttcaagtttgggtgtaacataatagctaattaggagttttatgttctcaactttgacacgtaatatgcatttaaaaaatttctaattgttattttttttcaaacaattgaaattattaaattcaaaaaaaattatttcgtttcgttcaattttactaatatagtaatggtctttgtatggaatcgtgctgccaaatagagaaatgctaaaagggaccagtggtgcttagcaccctccttcgtgtcaatgtcggtattagttcaactaagtatcaagttccatatagtttaaaagaataacttttagggagcatcactagccaaccgcgcaaagcgacatatcttgatggtgctaggcagcactagtgcccagtaggcaatagcaatatcaaatcttgtaccccaaactttgacatgtatcaaatcgtgtctcttaaacttttatcacgccaggtcgttagtaaaattgaaaggaagttcttgaatacaggaatcttgatagttttggaaaaagtttaacgcctgaaaaatttaacgaacacaatttgatacatataaaaaactaataaacaaaccgcactttgtgtgcggttgtattttatttagtgataattaaaaataaaattatattaaatcaaattttaatattattttaaaaggaaatgcaccaaaaaaaaaaaaagaaaaaaaaaacaactaattaataataaaaatagagacagagatgtatatatctaatcaaatttaaattcaaatgacggtaagttgtggatatttttaattaacttctttaatttttaatttttttataaatcatatatcgaatagaatattatagaaaagattaaaaaaagacaattaataaatctataaaaattatcattatatttcactcgtagtcacatcattgcatctcacttgcagtcgttactatcattattaataagtttgttatacataaaacaaatcaattaaaaatgagttaaagtactcactttataataacgttataatgaaaaaaaatatttgaaattgaacaatctttaaaaaaaaaaaaaaaaaaaatctaacaaaaagataattaataaatttatagaaaat

SEQ ID NO: 25509 - DNA, 4743 bp, Cannabis sativa
  modified_base (965)..(970): a, c, t, g, unknown or other
  modified_base (4277)..(4295): a, c, t, g, unknown or other
gtacgcagtggttgcagtcgactattttaccaaatggacagaggccgagctactggccaccattacgtccaaaaaagtccaagacttcattgtaaataacataatttgtcggttcggattgtcatacaagatagtctcggataatggcaagcaatttgatagtcagtccttcactgatttctgtgcaccatggaatcataaaaagtttctcggcagtggctcatccccaagcaaatagttaagtcaaagcagttaataagacactcaaagataacctaaagaaacgacttcaagttgctaaaggaaactggccagaggaacttactgaagtactatggtcatactgcacaattgagaaaacgtcaaccagacaaattccattttccatgacatatggtgatgaagctatgctgcccgtagaactcgaaccaccgtcccacagaagactaacatataaccaagaagttaatcatacactccttgcagaatcacttgatgaagttgaacaaaaactaaccgcagtaaacttgaaactgatagcccatcagtaaaaggtagatcggtattttaacaaataagagagcatggaaattttttgtaggagatatggtcctaaaaagagtatttatgaacaccaaagacagtacgacaggtgtgctcggaccaagctgggaagggtcatatcaagtggccgaagtgctaaaatcggaagcatacaaactgggtaagtatgacgaaaaaatgcaactcgttctagtaccaaggtattggaacaaggaacacttaagaaaatactaccagtaaaagtaccaggtaggatgaccatgttaagtacaaaacaaaaaaacatttactcttaaactgaatggccttctgggcggaccacgcccaaaggttcggataaaattacaaagtactcaggtcaaatgaccacttatgaaagtacaatttttattttttgcaannnnnnttgtttatgctaagctaaagatcaaattagattaacataatagcttcaatgtaagttactatggtaacatacatattttcgaccaataaataaataaagatccttatttcaattcaaattgagtcgagttcattagcatgttataaatttatcattgaatgtgtacaaaaggtttggtcgtacccaaagccccaaacagacaaaaagcatacttgagaaaataagtgaccaagagtcaaaagtcttctctgccacttggggggcacctatacctgtacaaaacatttggtaaaaaaaaaaatgaacgcaattgcacaacaattataaacaagggatgacattcattaaaaataacaaaagcattcaaacccgggattaaaggctgcccggtcagccagttgttcaaaaaaataaaaaatatattcaaagtttaaagaccgcttaaccagtcaccttgtcaaaagacggcctattggctggacagacataaaaaagatagtaaaaagaaagcaatgaaacaacaggagtctcatgctctttgtacgagtcaactgggtctgaatgggtcggaggatcatcattctgggcagaaggagcctcaacactctggtcggtaggagaggtggaagtggtcgcctcaggattcccgtaggctgcctgagcagtgcagtagtcgagaaacatgtctttggaagtgccgagatattcaaagtttgccttaggattggccttccgaaattcataaaaaatctcgagaccagctgtctctaaggaattcaccttttccccaagcctcaccacctcgaacttctggcttttaatctcagcctcaagttcctcctccttagtcttcttctcatcctccaacctgcggagaagagtctggagaccctctctttcgtcttgaagactggcaacgtcctgagacaaagaagcataatctggctcgagctgctcagtcgacgacatctcctgcaattccctggtcagctcggcaactttggtcttagcaacaaggagtttcttgttgacttctccaagtttcgcccacatagtcttaagctgagtctgtgcatctttatcctcctttttggccaagtttgcatccctttgcagtgtgtttgaagtggcaagattcttgacagcagccgaattagctcgggaataggcgtaggccatcttcaaagcagtctgtgcaaaaaaaaggcattaaaatctgaaatagtcaaagaggaataaaagaaaaatgttagaaaggacttacccgcaaaagctccttcaagactccttctaagaccagcaccaaagacaagttatccgccccagccaactgtttgttcacctctgggatcaaccggctcacatagtggttgagcatgtctctgcctctcttcgtctccatgcacaattccaaaggtggggcaggagccttaacttgttcagatttgcttcttaccagctcggatccagccttagcctgctcaggtccatccgaactccctcctcaggaacttttaaacttggtgacttttaaggcaagagggtccacagtaggttgctcctcaaaaatatcaatgatctcttcagctagtgctttctctttgttcggagtctcactgcccttagacttcttggctggaggggacaagcccgagcttccccctactcttttcttcagggcctcgatcatcttcggagacatttctgcacggaaaaaacaatacagtcagaagaaagcataaaatatatgaaggcataaaaattaagaaaaataagcgcaagatgaaatactctgcacactggcaggagcatctgcccgaacaaacacggatggggcgtcatcctccaaaaagtcttcctgctcctccaggacagctttttcctttccctcaatagggggttgatggacgagcaggtaaaccaggctccctgatccgaatagtatgttcaataggcctctgctcaatcgaaagggttttcttcttctggagcggcctctcctgctctgaatattctggagcctccttctcctgctcagtatattcctgagcataatgcttggctccagcatcacccttcaacttagtctcacgcttaagttgaatgagctacttctcttgctcagctccctcagcccggccagccctatacttcttcttcctccccttcacaggttggggtataaagtctgccgaataaagtttatacttcacaaagttttcctccaaggtcaacaaagtgatattccgaatccgagcagcatccggcaactggagaatctcctcagccctgtccctaagtgtcaatgtaaagggtggacggcagtatacagggatctcttgaaaccgagtataggtggtatccatgccttccacgaagtagtactcgtcaacaaaacccctaatcttgctaacctccgtgtccacggtgcccgtcagccacttgtagtccggctgtgagaagtagaagtaccccgatcttctctacttaagggtagacttcaaattaaaaagtcagttgacctggtgtggagacggcacaccccatccttgaatggcgtagaggacgaacagggcagacaatagggctgcacatttagacccgcaaactcgaaaaacccaaccacccgccccgacccattgccaaaaaaaattgatcacctaaaaacccatttaatcgggtctggttcaacccaaaaaagactacaaacgggtttcgggttcgagtaaggttaatggtttttttactggtcaggttataacccgtaacccgaaactataatttgttttattaaaaaattactacttaatatacttaattactaatttaatatcacatcattacgcaagcctattcgtattctaattcttcacttcaattctgtatctatagtaaatagtaatactattacattcaatttcaaacaaaagctaagcctccctacctattcgtattgtcaaatctcaatagtcaatattctgtgaatctgtaaactagtcgactcgttgtcaccgactcacccacaccagtcgactcgagtcgtcacccacacacacccaaaggttcttcttctccaagatcggcgacggcgacttgttatcttctcgactcacttcggcgtcccgtgtccaaccactagtcggcgatggcgactggttctcttctccggtgaggtatgttttccattttcgtacaatataatccataactcatatttctgttttccgttttcacatttttattaaaatatatatatttattaccaacaccactatatataaagcattaaataataataataataatnnnnnnnnnnnnnnnnnnnataataatattaataataataattcaagttggtacaaagaagtgattgatgaagatctcaaatgatcacttgctttgaacaggtccaaataatgttaaaaatacaaaaaaaaaatgacatttttaaaaataaattttatttcaacccataaattaaacattcgggctcatcccaataggacccgaacccgactacgcccaacctgaaaagcccgacccgatatctgatgcacccgaacacctaaaaattgggtttggttgtgcatttccaagacccgaagcccgaaaatccgaactcaaaaactcaaaaacccgaaaacccgacccgtgtgcagccctagtagacaagtacttaatgctcttgggagtgaactgggtcggacaaaggcaaaaataattcgcaaccttcttgaagtgcgggtgcaaaggcagaatcacgccttgtttag

SEQ ID NO: 25510 - DNA, 2032 bp, Cannabis sativa
cataaaacccaacacttttccccacggcttcccttcaccatctaggtttctttggttcggatcatagggccctcaaagtggttttcgagggcaactccatgatgttttgacgtgactctacttttcgtttcgaaaaccattagcttcttgaacctgatttctctgatcttgtcaaaagtaattggacttcggatactctcacggctaaccctaatgcccctctccaaagttttctctcaaagcaacataactgtattgcttcaatgacttcttggggacgaaatcaaaatcattttactcgggacattaaatgtatcaaatctgaccttgaacaccttttggttggcccagttatttctccttctgaggctcaaaaagctaatgaccttcaacgtactatggaaaacatcatgctcaaggaagaggttttttggaaacaacgatcaagagccaactggctcaaagctggtgataagaacaccaaatacttccataatagggcttccactagaaagcgcactaatttcatcaagtcccttactttggatgacaattccaaagtcactagcttaaatgatataactaactcttttgttcagttttactctgatcttttcgcttcccaaggtacggatcctaaagcaatggccttcacccttcaagggatcctaagaaaatcactgccactcaatatgcttttcttaccacccctttggactttgcggaagttaaaaaagcccttttccagcttgcgggggataaagcacctgggccagatgggttgaaccctagctttttccagaaaaactgggactctgcgggcattgatctttgcagtgctgctttatatgccctgaacaccaatggggatcttgctcctatcaatgacacgactttggttcttatccctaaggtcaaaaatgcttctcgcattaaggactatcggcccattagcctttgttccactttctataaggttgtgtccaaaaccatcgctaatcgtctcaaatccatcattccggatcttatttctcataatcaaggtgcttctctcagtgatcgcataattttttgataacatcattattgccaacaaagttattcatgcgatcactagccgtaaacatggaaaagttggctgggcggctttaaagcttgatatggaaaaggcttttgacaaagttgagtgggcttatatccaacacatccttcatcattttggctttcctccctacttcatttctcttatatttaagtgtatctcctctgtttctttccatctccgtatcaataaattgtctttcttcccagatctttccttcccgtggaattcgtcagggggatccactttcgccttatctcttcctccttgttgttgaaggcctctcagggattattaattttaaatctcgattgaactcttttcagggtatatctattgtcgctctgccccctccatatctcatctcctgttcgctgatgacagttttcttttcactggagtttctacctcctcttgttctgaaatcaaagacattttgctcatttatcagcaggctactgggcaatcggtcaatcttcataaatcctctattcttttttctcctaataccagttctcttgatcgtgatatatttcgggactccctgaatatggataataagccatttattgacaagtaccttggagttcctcagtatttttctagatccaaaaagccttcctttatctttcttttgcaaaaagctagctctaaattgtctacttggaaccaaaacctgttctcgagagctggtaaggagatccttctcaaatcggttattcaggctataccttcttacgctatgtcttgcttccgaattcccgtctccatttgtagacatttcagtggccttatgtctaaattctggtggggttctcttggtcataaacataagattcattggaaaaaatgggacaacctgtgcacttctaagttttttggaggtttgggtttccgtaacattgttcatcataaccaagccatgctggc

SEQ ID NO: 25511 - DNA, 4600 bp, Cannabis sativa
attttattgtcctaattattaaattaaaatacatgacattaatattttgtaataaagttatatgatacctctatatttataggaatatactcattattgatatatttgtttttattggtgatttattttggtagatgtaccggatagtgctcttataataagaaagcatggattgaagagcaacctattctcttgcctaatgttcaatgagttggaaggttttaacccaagagaccaattggcttttgcatttgtgagagaccaaatgagaccaaaattggaaatgaacatgtttgaagtggaagtgtttgagcaaattgcagttgaatataggcataacatcataaagtaccatacaagtcatcatcatgatcatgataatagcaccattcttggagggtctcaatctcatcattctcataccaaaagctcaaaaataattaatcattctcttgatttgatcaactatggaagcaacaagtgccaaaagtatctttccaagatgtgggatgaatctcgttaatctcataattgattttttttttctcatatagagtatcacttttgtgtttattggtagggtgtttaacttttaatatttagaaaaattagaatttaattctctaaacgacagtgtacattgtagttataatatgtgttttactagattttaggaaattttaaataatttataatactcgaaacataattcaaaataattgattgcacaggtgtaactcaatatttgaagttttaaactatgtttttcaataatataagttttttgttgtattaaaacaaaaaaacataatatacctgctaatgtataccgtcatataaaaaaaaattatgataaaatttctttaattctaaaaggtaaaagtgttcctaccatttaaaccaaaagtgatgtctctactataaaatttacctacattgaagttaaattaaaagtataaaattgagtatagcttccttctctttttttttttttttttgtatattagagactagtttttgctttttggtagttcccaactatatttatttatttatttaattattattattgtaaagagagatagaaaggtcatgtattatttggagatcaaacttcaacaaaataaataaataaatggtctaaattgaaaccacgtagctaagaagtaagaagaggcttaatacaatattatcaattacttaatactctttaagtggaatgggctgtcaaaatgtgtataatttaagagtgtgactaacattacacataaagctattaggtaaaggatgatgcattttaagtgacattttatgagttactgaatttaattatttgatattctaaatggaacccagtttcaaatgagttgcaactcaaataatgttggagcacattaagaaagatggttattttagttattttacaaagatgagttttgagccttggtacacaaaatagtttcaggtcctaaaaacactaacttttcaaataatataataatggctgcaataaaaagcagaccctttttttggtatagaaattttttatctgtatcaatctgttgatgatgcaaggcctaacaatggcaatctttcctcaaaattttgcatagtgaattttcatgagaaccattgcgattttcggcatttgccagaggattttgcaataccttggctgatcatgaaactccacttctggtcccatgtcattgtactcttctgatttctcaagaatcaattctaacccgaaatcagtttgattctccatgctctccaacctaacattcttccattcgaacgcctcacgtcccaatgtagaatcactttctgaattgagtaggacaattatggaggatctcccatatcaaaggctaaagaactcttgacatgaatgttgacactgccaatccaatcccgagttcacggtgcagtagacattgcatgaaaattatcacttcttgtctcgttttcaacacggcgttgatgattcttaaccccaagggttttaaaatgccacactgtgtcagctatctcatcttgaggcaaactcaaaccatgtttcttaattgatctatgcagctcacaaaagaatttggggttttcaagcttaatatattcatgtaaaaccctctcatgatcaggcacccaattcctcggaaatggagtgtaatcacacgaaggaatcaaagacatatgcaagaattgaacaccttcaatggcgtcgacaagtcccatcctcaatagatcagagtactctggtgcagcattgttgctgctctccctcaacggacgactcagatcacgagaagctattccataaactttagctcgagatttcaatctgtacctcgcagcatacaatttagccaacgagctacgaatcacataagcacaaaagccaacaactttcttacgattatcagcatatctataccaatcagccattgtctcaagaaacttattcatctgagcattggtatgagcttgacccgagtaaagcataggagtacaaggcaacggctcgggatccttatcacccttaacaaaccgaagcctcctaaaatggcgtatacattgttgtaagctagcagtaacagagagcaatgtcccaacacctttctggctcacaatgttaccaccactagaggtgtaccgaagcgtcgggtgaatcaccctcctgcatatgatatgatccaagaactgaattcctctactaatgtgttcaatctccaaagttgaattatctaatctcaacccaaatctccattgacaaaactcaattatcttcttacgaatatcaactgcatcttctctaggacctctaatcccaatgaagaaatgacccccatatcttaaataatccatttttctagtcttttcctttccacttgaaggaacaaattcaggccaagatgggttatgacaaccatcaaagattgaatctttccaaattgaatcaacactagatggcttaaagaactcaactatcttatcttcaatcatataatctaattcactaagacatatattagcaagtaaaggactaagaattccacaataaccataagaaggtaccttagaagcttcttcaggagcaaaatcaaagaatgatctaagccaataagggtctggtttaggttcattctcattaagaatcttcttcttagtagaacctttcttagtcttcttcttcttccaagcaatatctgcattaaaatctcttcttactgaatttggattatgagttttcaaagctgatttcatcaaacccaagattttcttatccttaacaactttctgtaaacaacccataacaacatctctctctaaaccatacaaaatctcactcaaatctcctctcaaaaaccagagatacccagcaaaattactcctgattgtacggattacagtatgagcattcctaccaggtcgaaacccatgagatttcttcgagaatcgtgcttcgaaaacaggctccaaaaccatcaacaaaacctcctgaacaaccctatcttgaaaacaaggctcgtccgattcgagcaaagctccaagtttccgttttgacatgattttcgcagtgggtttctcgttagggttccgtacgtactgatcaatcttcctattccacgagaattgaccatgaacgacggcgtttcgtagcgaaagaagggaatggaggatttgggtatggatggcattccgaggagggaatgttccggtcacgtgagcgcacgtgcgctggtaggccaagacccagagatcgaatttggagaggaagccagtgaggttgggaatggtgattacaggtggagaagagaaggctttgacccacatggctgaacatatatcaatggggtcttctttgaggagtgagtatgggtcatgatgctgagactgagcttgtggtggagtggagaagaaggaatgagagagtgagcgagtttgggttttgaataacaagcttgaggttttgcactccaagtgtttgatgaatgttctcatatacattttagactgtttttgtttgattcagagctttggaatgagtaaatgaatgaatgaacatgttcttcattaccttcctcctgtgagcttctccatggaaggtttgtgtacagttacagcagcaatccaatccaagctttggttatggctattggggttagtcttcttcttcgccatgaaagtgtgtttaaatttgtttttgtatgaaatggaattgaacctaaaatgcaaaaatgtttataatgctggataattttgtaaatacgtaaaattatttactgtttttgcaattcaatccctggtaattttattcctgcaaacaaatccttaaagttttttttttttaatgagaagagaaaacctcgatcgaatagccaaatctatcattacaacattgttgataacagaagcaacattgctactaataaaagtacaatttgattaataacaagcaccacgaataagataatgagcgacattattagtaaattatttgacaatacaaacttaaaaattaacaaaagagtcaattaaaactttatctgaaactataaagaaccaaaaacagaagtgtcaaggatgattagctgttatt

SEQ ID NO: 25512 - DNA, 1728 bp, Cannabis sativa
atttataagacaaatatggaattaccatttagggtattgccacattatttattgataagaaaacttcagatgaattatagtcccataaagtgttttagtgagacacttacgtactaatttaccactaatgtgacttagggcctctgatcgttgaacatatttccactcaagtttgccgacacacataactatggatactaggtaagaaaagtattcagatgcacatgtttagttagacatattttatgatactgttaacctagtgtactagagatatcaatatacatgtacataaagttttatttagatattgatatctagtgatgttagatggtatcaaatagtatcgattaatgctaccaacaaaagtacgactagagtactgaaattagattggtattatggttaatcatactacatgtacaaacattcgaatctcaatatacacattggatgaggttagtagacttatggtaatcgagtgtattgatgctcagttacaagtcagttatatgatcgtattatgcatggttttcttattaagtttttcaactcatagtttctttgctttgtgtaggttatgtgaaagaaaactgatcggcagtggtttgagagctacaatgaagattgtacatatctgaacgactagacccgaagggttgagatctatgagagatcagctagcgtaactagattttttttgttagatgacattctcaaaatattacagtatgcatatgtattttttattagaaacaggatctcaattgtaaacttttaagtacaattgtttttaagaaagttttaactattacaaaatgtcgagtaaatcacgctttattgtaaaaccctttggttagcaaaagttagcacgatgattaaaaaatacatatgtgccttaggtattagagcgttacaaaacaaggttcaaaaaataatcttgaagtaaacaaaaatagaacccccgatggctagagagggaatgatacttcggcttaggttaggggtttgttgtccgacgaacatagtaaattgtcgataagagagcaacaataaactaaggaattgaaccacgaaatttatcataacgccaccaaagcgataagcaacgagtaaggcgtcgaccatcaagatgtgtggcgtggtaaaaggtggtatagtcactaactgaggatagagagattggaaaagaataagcatttgatgccttagactcttttttgtttcagtaaaaaaattgcaaacataaacatattatattttgtttgtatatattctattgtaatgagagttatcttaaataaattcattttcatttttctttttgtttcgaattgaaaaaaaaaaatcaattagtaataatttttcccaaaaataaaacaacaacaactatatcagtatattgttttgtctttgcttatttatttttgtcaaagcattataacatcagtatatgccatcaacaataatattcacaagaattgttatcttgtcttacatttaaaagattttaagaaattattatttattttttttaaaaaaaaaattatcatgaaattgatatagaccataatattaatatataggcgtatatagatcgatccatcctctcctcttattcttcatatgatcaattttgtcttatgagtttaatctttcttgtagcaaacaaaattcatgaaatatatatttattctagataagatgtggctatataaaagaattctt

SEQ ID NO: 25513 - DNA, 3545 bp, Cannabis sativa
ataactctggccaccgattttagttgagaaaacgttgaatctcaacgtccattaaagtgtaaatatgacttctattcattattgtaatgtacattgttttattttttgtttttgtaaattttaggattttttcatatttttaacattgttgttgtgtatgtgcatggttatatgtattttgtgttttattgaatatgtatgtatatattgtgtattttatttatgtaaatataatattgtagttaagtcccaaacaaatttccctattgtagtaatgttttaagtaacaatgtctctgaaacccaatccacccactgactttggggtacaaagtttactccaagcaacattacctggtccaattgattctacttctcctttccacaagaaactccaacaaatagcatttatcttctgcagaatatgatgcttagatctaatccaataacaaaaactgctatgctcgtaagcatgaatgatgtcttatgaagaaagcatgaaatcatggacacaacttatgagatactggaatctcttaaggaaatgtttggacaataatcaaatcaaagttgtcataaggctactagaacctacatgaatgctaagatgaagaaaggataaactgtgcgtgaacatgttttgaacatgattagtacgtgttctacatgaagcttagatgcacagagtaatcatggatgaaaagacacaagtaagcatcatacttgagtctttaaccctttctttttctacattcacaacaaactatgtcatgaacaaattagatttcaacatgacacaattgttgaatgaattgcaaacttttgaatctttgaacaagatcatctcgattcatcttgaagtaaatgttactgaggataagccttcttcttcaaagaataagaaaagaaaaagtaatggctatgcacttgaaaagactatccgaaaaaggcaaagaagtcatccaaagcatttgagaacaaaagatacaatgacctcaaaaagaaagcacttaaggaaaatatttctactgcaatgttgattgtcactagaagagaaactatccaaagtatctcgtcgagctgaaagaaaaaaagaaagataaatttgatttacttgtacaagaagcttgtatagtggaaaatgataaatcaacaatggataactgattctagttccattgatcatatttttttcttgtttatagatgctttagttcccaaaacagttagaacaaggagaggtgactatgagagtggaaagtggagtgcttattttagctgaggcatatgggaccgttcacttatttttttagatttttttttagttttgaataatgtttattttgttcctagattttctagaaacattgtttctttatctttgttgcatgaataaaatttgggtatttcttttaataatagaattattcttatttcaaagaatgaaaacaatatttatcatgcaaaacaaaggaacagattgtatatgcttgacccaattgaaagaacacttaataattctgaattatttaaattagctaatccacaaagtaagaaaagataaaatgtttccataaaagaggtatcttaagcacttaaggttaggtcatattagtatagataggataaactggttaaccaaagatggatctttgagggaactaacagttggaaccctatcgatttgtgaatcctatttaaaaggaaaaatgaccaaacaacctttcacatcaaaaggaaatagagctaaagagccactagagcttatacatagtgatgtgtgtggtataattaacattcaagctcaaggtagttatgagtattttgtgatattcattgttaactacaataaatatggtcacgtttacctaattcttagaaagtctgaaatctttgataggtttaaagattttaaagacttagttgagaagcaataggtatatctttaaagacacctcagtcttacagtggtggtgaatatttggattctaaatttaaagatttcttattggagcatggtattctatcccaactcacagcacctgcaacactataacaaaccaaagttttagaaagaagaaaccgaacctcattggacatggtcaagtccatgctaagctactcttcattccctctatcattttagggatatgcacttcaaggtctgaattacattttgaatgtagttccatccaaagttgtgagtaaaatatcactagaattatagaatggaagtaaagtgagtttatgatattttcgtatttggggttgtccaacttatgtgctaaatttagaaaactagattcaaggtttaaagtgtgtatttttgtaggatatgctccagaatcaagaggtgcatatttctatattccaagtgataagaaggtatttgtttcaacaaattcaacctttttagaacatgactatatatatgaataactataaacctcggagcaagatagttatagaagaactaatgacagataagatttcatctccaccttcttcattagttaatgataaatcaaccagagaaaccaaaattcttgcaaaggaaaattcggtgcaacgtcgtaatgggaggattgtgagacaacctggtcgctgtgaactaaaggcacatcttcttgtatcagatacagaaaaagacaatccattgacttttaaagaagcaatagaaaaccctaaagttggtaaatgcaatatagttccatggatcaatacctggaatcaatgcattctaataagtcctgacatattatagatctacatgaagatgtaaagcccattggatgtaaatggatatacaagaagaaaagggatgcaaatggagaattaatgacttataaagcaaggcttgttgccaaagcctacgcttaaacactactataaaaatgggtttcaaatacacacttagagtgactctaaaagtttttagtgacacttcaatgcgcgtcaataatgtgggtaactgtaaaagtattatttagtgactctgaatacatgtcactaatactttttagagtttctcaaagcgtgtcaccatactcttttacagtcccacttaaagataacagctacacacaaattgtgtcactatatctatttttaaatttatttttttaaaaatatattcaatcaaattaataattataaattttaaataataatattcagggaattggattaatttttttttgatactaaaaggtaaaataccaatccaattttccaaacaacttatgattcattcttagagtggtaccaaaaaaatcagaaaaacttttatttatatttttacaagttaatatgtgcatttcagattggtgaatttaaacaaacttattaagtgtaaatcaaatgtggaataagttacaaacaaattacatgacaaaatgtacaaaaaaaatatataataatttccagatctatatcaaaaactaaaccaaaactcaaatttagaaactaaagactaattgagtaaataaaaaacacaacatagactaatcaaaatagagaaaataatgaacaaggcagcctcaacca

SEQ ID NO: 25514 - DNA, 1927 bp, Cannabis sativa
caattgtaaatttttctagccacaatatattatatgtatgtttttttattattacatatatcatatgtatgattgacgaaaattgacgcgtgaaaaaattacaccaaaaaggaaaataaaaagaagacaagacagagaaaaaaaaagaaagtgaaatcagtcttcacatctacttttcttgattaattaattcttaattatgattaaattcagtagccttaattaaagaaatttgtatgtaatgcatgaattcatttataccaagtactcaaatctatgctaattaattaaacactaatagtctaatctttggacatatacgtatacattttgtagatcccaattcccttaattagttttgcatatgtaaaacttttaagagtaatttacggtataaatatctaagtttaactcttgattgtagatgaattcataaatttaaattttgacgataataatacttaaagttatgtttctagaactttcgtaagcacctgccgattaagtgagtcaataatcacgtgatagtctctggttgattcaggtcattaaatttttattttttatttaaaaaatttaaatacactaataagaaagtgacgtgtgaataataacttaaatattattaaccggtatttacgatgcaatatttaatgatataaaaattccaccttagctaaaaattaatgccaaagattataagtattatgagattaaactatgttcatctacttaattagttcaacagttaaaatttaaaaaataatcattaaagcaaaaaaaaaaaaatgcctaaacttaaatactgccaataatcaataacatatatataatgtataaattttcacattatatatgaatgtatcaatggtcaataatacaaaggagctgttgttcaaaataataatcatacaaaggaactgaaaatgagatctacatttgaacccaacaattatgaaatttataccccaaattgacaaataaataataatacatacgtagtaagtttgtattataatggggaattcttttagttttccccccaatctaatcatcatccttagactttggctgtgtttgtgtgcacaaaagcctcttaatccttcctcggcttgccatgactttcttctcttctttttttgtttcaactttttgtgggatctttgtgtcactctattaaagattttatagtcttttcgaggttttgtgcttcgaattaggagtggtgttggcaaattcagaatagtgatgtggatttttgcaaagtcgacgatagtgtagccaggggcgaagccaggaatttatcttgggggtggccaaggccacagtacatatacatgtacgtccgcctctgagtgtagctctgtttgaatccaaagcggactcttgtattagatcttttcggacttagattgtgttgtgggagtggtctatcaatatgcagtagtgtcaacaattggaatattttaggtcataaatttgctatatatttattaatttattttgttgtttcttaatttttttttaaaagagtttaattatatgtatttttttataagattaattgtttttatataattttctaataatattttacacataattatataaataattaataaaaataattaaaatatataaatatttattaataaatacatatgtattattattattataagaaatttttatttattgtgtttttaggttagtctattcctatttaattaagtattgtgtttcgagcttgttgttttcatgtttaagcttattttttttttgtgtcatgctatgctaattttattatcatattgtgtcgcctaaacctataattttttgtatcgggttatgctcatactttcctaactcatactaattttgtgtcgtgtcaaaaaaatggaactatatatactactcttctatctca

SEQ ID NO: 25515 - DNA, 1665 bp, Cannabis sativa
  modified_base (1033)..(1041): a, c, t, g, unknown or other
  modified_base (1639)..(1639): a, c, t, g, unknown or other
atcttaccataaaaaggaaaaattattttgtcacctaacttgccaaaaaaggactttacataaagaatgactacttcataaaataaataaatataaaggaatgactaccatattaaaatagagtgtgtttgttgttatttgtattaattgttttattcctaaaaggcctgccaaatctgaacctcagacgcaacaagcttcatcttatttgtttgcttcattctaagactttggttgtacatcaaacacttacaaaataactgtagttaatattaatcatgtttaaaataaataagataaatcattatcattcaatttttttaataattttaataaacattatattacaaatattgattccgattattttttattattccgttatatttctctattaatttatttaaataagaataattaataattttgcccccgaaacttttgaaaatgttaattttagcccctaaaatatatagcttgttaagaatccctactgaacttttacatttatagaaatttagtccttctattaggttctgtcccattattccatttaaataatgacatgtctttgtcaattagcaattttgcccctaaattttgtcaactatcaaatcatactccctcaaaataaaaaagaaagagtcaacagtttttagtaaatcttaaaaaattaatttagatcttaagtgttgacctcgaaaagtgatcaaccgatagcagggctgtgcaaatctaatgcttgccatgtgtacgcacaaataagaatgaaaagtactataagatttgttatagaggtctgacccccttgtgatagcaggtaatgatctacttcccttttagttgtattatactgagggaattactatccagatcgctataggtgggatctgctatagtacccttaggattacaatgtatgaatcaatgcctggcaaaactcaagtgttggatagcctaggatgttggacagcctagggtgctggacaaccttaggtaggcgtgtgggagagaatgagagagagagagagannnnnnnnnagagacagagagagagagagaaaaagagaatttgtcaagcacttagaattttagatcatgtttctagcttggaggcaacttaggcaacataggaattcagtcaaaggttaatgcctttatataggaagccttaaaccataggtttacaattcaaatcccttaacaatcgtatagttagttggatatttacaaaagaccaaaatgcctttgattctatatattatttagccattttgttgggcttttagggcccaatgcccaacccattactcctagccacgtgtaggattgtcaagtgaggcatgtagagcaatccttggccaaccaagcccttgtgctagccaggatatcccaccatggtgctatccctgggctggccggccatagggctgatcaggggtagtcggccagatcttgagagtgagttggtctgtcacttgatccctgtttaagtgttggggttttcgtttgctcgagtgctgacttggccttccatttagtgatatgtaatgccacatggtgctggttttgtccacgtaggcaccccacgtcatgaggataaaacttgggtaacatttttttgggttttatgccctanataaaactctttacaatctgattagt

SEQ ID NO: 25516 - DNA, 3083 bp, Cannabis sativa
cttaattacgtacttggtatctgtaagacggccatgcaaactccatctctggcgaaaaccttccaccccttcagctccacttgcaagaatgaagtgcctgaaattgaagtaatggcacatgaaaataattctcaaagatgcctaaatgatttacataattagtaactgtatgtaagaatgtttccgaatgaccaacatgttgttgcttaatattaaaatgcagatgtgacatgatatacgctgcaacgttttctaatcatgacaccctaagcaacggagttaagaaaaagtttataaaggtgattcttaaattccattagacttgctcaaaaaccatgtttggatcccttctaatttgaaattcataatgaacttattaaaggccaacaattggaaacgatttgatgtgctgggctaaaaagttcctaactcgtgcagtaaaataagatgtacccaagataaaattatagtttttgcaaaagttaagcaaaaatatgggaatagttgggccgtgagcacgatatatggtataaatcattgtgatttatctctatactggtttctttacctttcagtcaccaattatttatcctttttttcctttcttatattcctattcctcacatttctatctactattcttatctctcttatctttcaattctcatctattttctggtttcatctttcattagagcaacaaacattacttgaattaaatttcgcacatcactataataatgtataaccgtgaaaaagatattgaagtgatgagaaaataatacaaggaactgtgaatgaatacggcaccagaagcaacaataacagcacaaaaatacagtaaactcatcataatatacctctctaatgatgtgatctctgattcaagctggatagccctttcctttgcttgctctaaaggcattgataatcccaatttgtgctcactctcctcaagtcgtttccttagttctttatcctgaatttttttagaaaaaaaaaacatttttatctatgtaattttagtaatttaaggaagtagagaaagaaaacaaaaggaaaaaacacagagaacaaaaccacaaaaatctagtccaactaaaagataattacagagacaagaacatctttacaatcacttggcataaactgaagccataatttcatcctattcctatctagagacacattctttgaaaactgcataataaaaagtcaacacttgatacttttataaagaacaccttctttatatggaatccagatttctatccgagcacgaattaaattgaaaaccatacttttataaactcatgtcaaggagaaattgactatatgaaaaacatctcacccttttttcagcacattcccgatacaatgcaatctcatcctgacaaaacggttcaatgtcgttgatttgcaagcctacaaatatacatcaattactgtgacacattatttagaaacatgaaagtaacaattaagtttcaactaaacaatcccatgccaatgggaggtgtcttcgaagctgttgattatctacaagctactacaatcatcacgcagcatcttattcacatttttcctttcttttaaataaaaagtggaagaagataagtgtgtttagaattcaaatgaacttctactgcacacaacttagtagtctcactctcacattatgcattttagcctatttacaaagtaattttttctccagtgttcatgtatgtgaaacactttgacataatccaattaatcatgtcaaatgttctttagtgacaggttaacccgccacaacaaatgattgtacaactacaatttgaaataggaactatagcctataagttttttttttttttttttgaaaatgaaatagcaattagcaacttcattgaaatttagcattcggaatacagaagggcttgtaaatcagccggaacattatgactaagaatgctaccatcagaaagaaatcaagcttcctagctacatagtaagcaactcaatttgctgattgtctaacaaagcaaagactggcatttaacaatttgaaataggaactatagcctataagttcatcaccaaagtaagagtcaattttaaacaatgaattacaaaactcagaacttacacaagaatagatttctcaatagcccgtcacacaattcaacaccttcaaggacatgagaagcaatctctggtggaatgacaggtgagggtggtcccgtcatcagatcatcaccaaccaaaatagtttcctccatagtttgctgtgaatcaactgaactccaaaaacagtagcaatgcacaagtatatcactatattgtacattgatttaaaaactaaaacatagattcaagaaaaaagctgcactgttagaatcttaagcaaaatagctcactatcttaaaactaagtacggatttttaggcacagcaatatacaaaaaattctggacaaaaatttggaactcaccaaaaataagtgaaaaaaaactatatacacattttgttgttttacacacaccataattgattgttttggaaaagcataactatgaaaagtagtttttaacataccgtccatgattgcttttcaggtggaaaaacccaatactcgattaagtagagtgagctgaagttacaaagcaatctattaactcccacctgctccagaaacaaagattgaaaaagaagaaagaataaattcagtggagagaaggtatagtaagaagataattgaattgacggggtcatcttacgcgtggtcgttgggcgaggaagcgcgaaaggaagaaatctccggcgcagccaaaattctatggagaggtctagggaggcagtagagttaaaaagtagattattatatttacatatatatatatagggagagaaaggttgtgttgagcgggagatagatattgtattcgtagaaggtgtaaaatgaggtggaagtgagccgaggatgtagttgcaagcattcaatcgatgctcagggacacactctcactctgggcttccaatcgctgcttggtagaatttgagattgaatggtgttcatctcaaaatgtttttttttttttt

SEQ ID NO: 25517 - DNA, 5455 bp, Cannabis sativa
ttaagtttataaagtagtttcttcggtggttttcatatgcgttgttatataatttttagttacaatttaaattattctgttagttataatagagaattctatataaaatttcgtaaaaatatataaaaaaaaatattttaaaatataaaaataaaaaaactcctcaaatgtaacctcaaatatttttttcattacgtcatatgtgacttcgtagaacgttacggataattatagtaggatttatttatattatcgtaaatattaaatagaaattaattttataagattaattattgtggaatttattaacatataaaagtggcaagtgagtaaccacgttgcattgtctttgtttgtttgtggtagctacttttggagacttccaccctaaccactgacaaatgattcacaaaaggcatcaccattcatttgttttgttatgatttctgaattagtcaaacctaagtacggtacatgtctttgaacatcactatttttctttgaaatttcattgaattatcaagcatatagaggcccatcgcttgctgtaaataccagcttaattttaagataatatgagatgaattttgtgatacaatactaaattggtatgaactcaaatattaataaataattctttatcaattaaaatataataattaatatttaaattctaataattttaattattttttttatatgattgtgtataattattgttaaaaaaattatataaaaataactcaaactataaaaaaacataattatctcattaattataataaaaatataaaaatatagagtacaaattcgagctcatataaaaaaacgaattagtctatttaggaaaaacaagctagtctgattaaagcatgacacaaattccagcacgacacacgcataaaaactttgtgtatttttattttgttgcactttagttctttaattgtttgctggtctgtagctagtagctacagaatatctgttttagtattaattttattatttcgcatttaattaattgattaattaaataataaatagtaattataaaataaaaaatcttaattttgatgttattttcttattattttgatgttattttttttttcttgtttttaagttgttttcacatgacaccgtaaaattgtaattagaaaaattttaaaattgaaaatatatatatatttaatagtaataaaaatattaaaattttgccaaaaatattttttttttcagatattaaatgcaattctctttcttccaagaaaaacataataatttgggtaaactaaaagaaaaagaagacttttcaaaatctactaagagcattttcaattctctactctattttttaaaatacaatattaaaattaattttctctattttgcctaaaacttttacattatactatagatcagttttttattttctatctcttatttaaataatatacttttcaaaatatatactatcattttattattaatataataagaaataagttgattagattctgaaaagaggtgtatagtctttagtactatcatattattatataaacctttgtatattactgagtaattacacttcactgctctcaatacaatagagaatgtttccttttatatacacagagaatatactagaaggtatcacactattagttgatacaataacagaaatatattctctatggcccacacaatgatatgataattgagggaattaattatttttcctatgattgataacagtaaatgaattatgcctagtcaatatcattgactttatcctctaaatgggccgactctgggcctttcatttcaacgtgtcccttcaagctgtgctgtggtgagtggcaaacaataaccttgtctttgagataatgaaaggttgtaataggcagggatttggttaatatatttgcattttgttcctctgatagtatgtatctaacttgaattgatttgctcatcactttgtctcgtatgaagtaaacatcaatctcaatgtgtttagttctcgagtgaactacaggattggaagcaagttgacaggctcttgaattgtcacaccaaattacagccgtgcggttatgttctatcccaattttagtaaagagagactgcagccaagttacttctgtacatgcttgagcagtgatctgtattcagcttcggtgctcgatcgagcaacagatttttgttttcttgagctccatctgatcaggtttccaccaaagtaaacacatatgcctgatgtggatttttggtcatcaaaagagctagcccagtctgaatcacataaactttcaatgatgggattagttgctttagtaaattgaatgccttcaccaatacttcctgcaatatatctcagtatgcgtttgcaggcaagcctatgattttgtgttggagcttgaagaaattggctcaatttgttgatcgaaaaggaaatattgggtctgcttaaggtgaggtattgtaacgcaccaatgacactcctatattgagtgatatcttcaaaaggtgggttgtcctgtaggtgtaattttttactttgaatcaatggtgtaggactgggtttagcttccagcatgtgtgttcgtttgaggagatcaagagagtactcggtttgagataagtgaagaccatcttgccccctacttgtctcaaaaccaaggaagtaagtgacagagccgagagtcttgagagaaaattgagtgttcagctgagaaatgatattcagaatacgggtggcgctgatacttgtaagtaaaatatcatcaacgtaaacgaggacataaagtcgagcatcaccttcagtaagaaaaaaaagagaagtgtctgagacagagtttttcaagtcaagacgtaaaagagcatggcaaagtgtgtcgaaccacgcccgtggggcttgtttaaggtcgtaaattgtacgattaagttcgcacacagcagtagggaacttaggatcaacatagccagccggttgtgacatatagacttcttcctccaatatgctgtttagaaaggtattttttatatcgatttgttggacatcccaatcatttgtgacagcaagagagatgatagctcgaatggtggatggcttaacaacgagactgaaagtatcaaaaaagtccacatcgggttgttgtagaaagcctttagctacaagacgcgctttatagcattgatgagagccatcgaagttgaatttgtggcgaaagatccacttgttatcgaattatgcatatgaggtagtctaggaacaagataccaagtcttaatcttcttgagagcaaaatattcgtcagtcatgacatttttccaagcaggggtggttagagcgatttcgggtgaggcaagggtggagagggaaagagctgggaggtgaggattatggagaactgaggtaaggaaggttctaggtttgaaaagtctgaattttgagcatgtgaccatgggatgtgagggaactggaggttcgggtattgggaagggcaatggtgtgggttctggtgtgggtgttgaataggaggaatggttggatgatgatgatggtggcagaggttgtattggtagatgtatggctagtggaatggtggagtaggactttgtcatggagggactttcatgctgagttttggaagatgcacaatcggacaatggggaagtgggaggtgtcgtgggacctacgaaacaaagagatacatcatttatagagtcaggtgcatcatcaacatcattgtcctgaaaagtaggagatgaaatgaagggaagccaatgactgtattggatgattggtggggagggagtggaggaatctgtggtctgcccgaaaccagtagcaaatggaaactctaattcattgaatgctatgtcctatgtataaacgaccatttggatggaggcatttttaccccttatggtttggactatatccaagaaagacacacttggtggatctaaagtctaattaatgattgttgcaggccgacacgtagatgaggaaagtaagcactcccaaaaaccttaagaaattttaagtttggagtgactttgaataatttttctatgggagatttatgtgctaaggttggtgtggataagtgatttatgagaaaagtggttgtgctaaagtcatcccaccaatatctcaagcgcattgaggcttgagatagtaaggttagtcccatttcaatgatgtgttggtgttttctttcggactttctattttgtgcatgtgtatgcgggcaagggtgtctaaagtgcacactaattgattccaagaatggtgctaagtttcgatattcacctccccaatccgattgaagggtcttgattttagcatcaaatttcctttctacaaacttttgaaagttaagaaaggtgtttttaacatcaaattttaacttgagaggaaatatccaaatgaaattactatagtcatctatgaagtgcacatagtatcgatatccttccttgcataatatgggagaagggccccatacatctgtgtgtataagctcaattggtgagtgagatttagtgtgtgaggtgttgtagtgtttatattttgacttttctatatgtgacaggcattgtagaaaggtgtagagtttttgaaagagactttttcattaaccaacatgtgttttaatacattgatattgggatgaccaaggcgcattagccacacattggcatctgaattgaaactagactcaacaaataaggatatacaactattgaacatctttgattgattcaatttaactaatgactgtggatgtttggcaatttttctactcttggaggaaacaataaaacttgagctagagttggcaggaacatttgatgatgatgatgcagtgagtttctattgatataacccattgttaagcactcaccgaagcacctcttccttcgtgattaggtccttcacaacataaaaattagcataaaattccacacattctttgttatctttggttagttgagatatagacaagagattttcagaaattttaggtacacaaagtatatcattaagcactaaatagccagcagtgttatggattttacttgagccagatttggtcacggttaagggaatccattaccaataagtaggtgggttgtacctttcatgtcagtcttgtgctgtatgttggatactttggaagtggtgtggttggtggctccactgtcaatgtaccaagagttgtcgacatgagcatctgtgctagtaaagtaagcctgttgatcattgtttgagtgagtgttgttggtgttttgagaggcaggtgactggctagatctaggagcttggaatgagatgtcaaaacggtgatagcattttgaagctatatgccctggtctgctacagagttggtgttgggttttatgccctaaataaaactcatttcaatagatcggaagagcg

SEQ ID NO: 25518 - DNA, 3825 bp, Cannabis sativa
aattttgtttataggactagttgtagtaaacatatatttctcattaattttttcaagtgtacattgctgaaatcaagcattacgttagaaaaatctactattatttaatgtgactacacattatttttctacaaataatgatattgaaattaaatatttgtcaacaaaatattatttttagattaaacataatttttaatgaaataagtgacatcaaatctatctttgtacgtaattgctctttaatttatttaactattcgtgaaaggacttgaatgcttgttaattttgggcaaatttgataatgtattttctttgggaaataaagtacaatatcctatgattaaaaattattagagataaattaattaagtagatgagaataaaagctaataaacaagtggaagtatatagctcagtaagtgttaaaaaaagaccagaaaatataattaggacaattgtggggtataaacagaagtcattctttgacttttatcaaagtttttgggttgaaacttttgactatttatatcatttattgcaaggaaaacacgtcatagttaagaggtgtacgtaagaacaagataataccaagtcaaaaatggtaatactaattaatcatatataaatatatatatgtaccctctaattctaattaagtataataaaaacatgtttagattagtaggcaagaattaatgttttttttctgagaagaggcaagattgatgttagttaggatgttattattaagggagaaaaaatatataaaaatggaaatgtataaaaccaaattaaattccttacatgttttttttcttgtagaatttcttggagaaagataaataaataaataacaaaaaatctttgacaatctataagacatattttacaaactaagacaaaaaaattaaaataaaagaagtatattaaattttattcaaataaatatatataagaaaaaaaattattaaaagctgtaaattattcaaaaaaaaattaaaaatgcataaagttctttgtaattactgttaaaaaacaaaaaataaaaaaaaaagattataattagagctacttaatagttattagtaactattaactattagtattagcagtattgtaagaccatctccaatgtaaaatgtaaaatttatattaaatttgacattaaaaatgagtttgtgttatatttagctcacaattctgttttaatgcacaagttgtaaaataaataaaaaaaattaattttattgatagttatattttgttgaaaatatataaaaaaatattatttttattatttaaataatagtaatatgataaataatgaatgaaaaaattagtaaaagtcaatgaattataataattaatgatattttggtaaataaaaaagtataatttactgtaaatttaatttgacacaatattatattttgtactaaatttagcgtaactctaacatatgtcaaattagcacacttcttaaaatatcattagagtagtaacttttattaagtgtgctaaagcaccatttttaggactttggaaatgctctaataaaacattaaagatgaaatgagcttgaattaattagttgtctagtacttatcaatttgggactgagtcaaattcatctaaaatttaaattctaaaggagtaaatgcacatgaggtctttatgtatgctccaattgttgttgatactatttggagagtctagaatgataaggtatataataataatctagataacatgtgaggcgttgtattaactatatttctcactcttatgtaaattatagagcttccctcatttctactcttactccaattttggtggaagtttggcgtcctcctcttcatgattggattaatttgaactgcgacagtaaaagtggatttagaaagtatgagctaagaaccatgaaggcgaggtggcttgggtaagcaccacaaagttgaatttttctgatgccctttgtggctaggcagctgcgtgttgtttggccctagacaaggccaaggtaaaagattgtaggttcattattgtggagagtgacttaaaagtagtaatcaattctcttaatggcaaggagactcgatggaaagttgagaattactcttcattttgtaagtcttttgccttattttgtgggttgtttattttcctgtattgatcgactatgtaattttattgcccataatttggcaaagtagacatttacccacaatcaatatgattgcttatctatatcctaaatcttgataaacattttatgtaatgatcctataaggtttaattttttatttatacacaaactattttccttaaaaaaaaaaaaagaaattgtctacttaccaatttggggctgatcgggaaaaggatttgaaatcaaagctttataaagctttttaatccatgtgttattttatcttaatttttctgaaaagaagtccatgtgttattagtttaacttaactaacaaatttgatcaaacagtttggtaatatggtcataatattcaacaagcttgatattggactaacattttggcagtcaattactactcctaaaattcaacttgaatccattacaggaagacttgttaagtcaacttattagtcctttgaccattgattaaatacacattaattaatgacatcatattgtgcctgtacaaatacaaaaccaccaattaaaaagttacctaacaaacctcactacatttaaagtctcacttgtcttgctgacccaaaaaataaatattcaaaactaataatcaaatcatttatttcaacaaataaataaaataaataaataatcaaaacatttaactaaaggattaaaataactacctcaaattttccaaagcaaaaacatgcacaacttactccaagctttttcccccaaattcaacaaaaaatcacaaaatggaaaggaagagagagagagagagacagaggcggattgggatgaagaaacccaaaaaataaatctcattttggctgactattttgttgaaaaaataattaacttagttagggttactaattcagttattaaaccttagggtattacaattcgtatctttagagaagacaatcagcctagatttcctaatttcttcattgtaattacagaaacatgctactttcctattttatttcttattgattaaggaaaatcattactatataattatcccctataaatagtggtctcatctcactattcaagggacacaaaattatttagagagaaaatactcaagagtggaatcacaagctaagagtaatttgctcagagatccttgtaagagctttcgaaaggaaatacttcattctttactcacaagttaatacaacaaaaagaggagtaggctatattaacactatcacagggtcaaacctctataaattctggtattttctttacttattactctttgttttctattatttatttattcttatcacttcaattaagactcactgttgttggctaaaagcgaggtcaatattttggtactttcattgagagcaaaggcatccaagttttttgtcttaagtcttttacaagacagtacatgatggttgtaactcaaaaggggaatcaaactgacacagtcaatccaatggtgattgatctgatcgtgcatacacctagaaatgcaagagatccagttaaagcagcccacgaacaagttaatattgaaccaccaacagcaggccacggagtgacttaccctctggctgggttcactccaggtgtgcaagaaacttggaaaaccagtataataactggaatcccatccacttcaaatac

SEQ ID NO: 25519 - DNA, 6355 bp, Cannabis sativa
atgggcttggaagtatggcctcagctttcgacacacggtcagtaagataaatgtcaacttctcaatcataggatacgtggattctacacccagcaatcttttgcttacgtagttgactaggaactggaccttttcttcctctcgtacaattgcagcactaatggcatgattagacactgccaagtacaaatacaaatcttctccttccacgggcttcaacaaaatgggagcttaggttaagtgctccttcaacttcaataaagaaattttgcactcttcagtccatttaaagttcatgtttcctcaaaacatattaaagaacgatatacacttattcgtagacttcaaaatgaacctgctaggtgcaacaatctaaccagtgacactttgaacatccttgtacttcttgggagaaggcatgtcaatgaaggctttgatcttttccaaattttcctcaatcccacaagagctaacaatgaaccctaagaacatcccggaagaaacatcgaaggtacacttcttaggatttaacttcatcccatacttcctaattactatgaaggcttcctcaagatctggccatgtccctcaaaggtcttggatttaactaacatgtcgcctacatacacctttatgtttctccctagctaatttttaagcattcagttgatcatccactgatacgtagctctagcatttttatgcccaaatggcgtcaccttgtagtaataaatgttttaatcaattttgaagctaggatgctcctcatccgctatgtgcattttaatttgatctatccatgttggaacttgtacccagacgtggcatctaccatctgatctatccacagaaaaggaaaacaatccttcggccaggacttgttcaggtccgtaagtcaatgcaaattttccatgagccattgggtttcgggaccagaactgggtttgcgagccatatcaaatataagacttcccaaaggaaattgttgggagtcaacttgtccacttctatctttccagcttcaactcttaccagatctaaaggtctcttcttctagccgacatgtgttgcatcttcttaaatatttaaagcatggaagacggtgttttgatcaatcccaatcatgtcagaatggctcaatgccagcacatcatagtttcctttaactgtgtcaatgatattctcccttagggacagaggtaggttccttcccactctaatagtcttcatgggatctttgtaacatatgcttatcttctgtacctcgtccattggttctagattcttcttagtcccatccttgagatccaattcatcttaaaaatctacccagtcggcgtcaatgtctattagatcttttgctctagaaattgtaagtgtctcttcccgaaccatgaacattatttgtgttgagacgttgtaataatttattacactcttctgattacctttaatcgtgccaatacatctattgtcgcatgggaacttcatgcatagatgcctaatcgaagtcactgccccgaaatcaactaggattggctgccctagtattgcgttgtatgtagtcgagcaatccaccacaatgaaggttgagttcttgaaagcacttgcattgttccctcccttgaggatgataggtaactggacctttcccatcatcattagggtatccccattgaagccttgcaactaaatggggcaaggggttaagtctactttagtaagcccgattacgtggaatgtaaaattttaaaaggatgttaactgagctcccattgaaaataatcctggaaactcgtttgttggcaatttatgcatcaatcactaaaggatcattatgggggaagcgcatatttttggcatcatcctcggtaaaggtgatgggcaaattcatcattctagagtgctaagcagaagattgcacaagcgcacacacttcccgttcttcaaccttcctcaaatatctcttttgtgcagtttgagtacttctggtgagatggggtccacctgagattgttgctacgtgttcatccactgaaggtggagcaagtctgggaggtattggggttcctagtcctggtgcaagtaatgccaccctagcggaggctggcagagcaggaagtgtcgacaatgatgttcctggagctttagaacgccttacccccttgcaaaggatttacaactttctgttgtttgggaacgattatgtgtccgtgtacaaccccctgtctaggatagatgatcgagatgcgaatccactgcccaagatatcctgcttggaccaacacttcaatttcatctttcaaataatcacactaatttgtgttgtgatccttctccatgtgacacttgcattctttattttaatcttgtctgtttcttgtaatggaccatctttcaggttgctttgtaaacgttttctcgagtgtttcttagacttgtatacttgatgtatattggatcagactccttcctcggcttttataaagaataattccaattatggctcttactctctcttttactttcaagaatggcttgcattagaatttgggacctcagtttttgcttgtcttggagcaatactacatccagtctgtgtctccctgtacccaaaaaaatgggtttgcgtaggggcaagaccagaggtagtaggtccataaactgttggggaaaaaactgagctcctagaagagttaaggctggaggtagaacttggggtgtgaagttaggggcagtcccagaaggagctggagccggagggactctaaaagcttgtacgtaggcttcctcaagattgatgatgccttgtgccttttcgataaactcactcaaagtttgagctctctttctctggatttctccccatactagagagcggacaactaacctagattagagggccatcaatttcatgtcatcactaactttggtcttagtggtcgcctccaacatcctttgaataaaatcctttaggctttcattatgttgctagttgacgttggtaagagaaccaacttccatgtccttgtcacgcacaaaaatgaactgtttgcagaaatttgactgtagatccttcccgctatcaatcaatcttgtagctaattatttccaccaatcttctatggtcttagtcaaggtcaaggaaaaacataagcatttggcatcgtcattgacccgggcaacttgcatcatcttgttatgcttctccaagtgtgctcgtggatcagttctcccctcatactactcaatgtggggcattttaaagttttctagaagtgggatctctgcgatcctccttacacagggttccgggtgattgtcttctgagtccgagagggctctactttgttttttgaccaagttggttagagcagctatctattcctctaacctctttgtatcactcttgggaagatcacgtcccctcatcttatcactcaagtagtttctaaggtgacccccacttggccttgcttttcactcttgtacttctcgtacttggcatccaatcgttgttggaggtctgtggtggattagctgtcctcaaaatatcccacggttatccttctgtcctgattgacaaaatcactggggtggttcccttgccctttaggcttaggtacctttgcacttcgtccccgtggtgcggttttgcctctaggatcagaaggttgtccatgctcgaaagcaccgatggcctttggtgtccttgagtgctggccaacgggattcgtatcttttcgaggtggtttacgagtagatttttgtgggggcccggtaaccttgcttatacctttatccttgcaaggatttgaggattctgcttttgtttactggtgagcacgttgttcggccattaactccactgttcatcgtctgactctgccaagtcgtcaagcttgttttgaaggcgttccatcattcttttattttttgcggtgagcttcctcttttctaccaactctgtttgcgtagcttccaaatctttggtcactcacaacaagtttttgtcatggtcatagtaataaccatccttgtagtactcgtcatgcacatactcattggcatcgtcttcttcctcgcattcaaggttccggtcatcgttaaggtcgtcaaacacgttcttagcatcctcccctcgattatcggcatcggtcgtgccttcctctctaacacttcctgtttgggggccagatgcgagggagtctgcctcctccataatagtgtctaatggggttttcttgcttgcattcttttaggtattcaccatggtcgatgtgatgcagcaactagtaaactttcctcagctatcaatgaaagcaccaaaatatttattaagatttttggaaatcaattaattagagcttaaagaatatgtaaaacaataaattatagacaaatggttttttacgtggtttgggcgttaataatccctagtccatgagtctgttatattagctttgtcgccgagtattcaagtattacaagtgtttacaatattaactctgtatctttttttatttctcttggagaagaaagcttcttaagaatttttgtagaggttttgttagtaaaaaatgttcaccctttgcctatgaaaaagtagggatatttataggctcatgcgtgggtgagggcatacccttcacccacataaatttcgtactcatcgcgcttcattaggtggccttgaaaacatggagattcgaccgttggtagattgggaacctcctcatcgtacggtgcacaacttttgtatcccaactcataggactaatgacacgtatcacccaaaggtttcaccttgcaaagttggtgtatatatacaagttgtttggcaaaaaggaactacagagcacgtacgcgctctaccaaggtctaacgcaggggacacgatctgatttggtgtcagaagatttacaaccgtcgagtttagctctagattaggcgttggggagttccgagaccgtctggttaaggctttcccagacgaaactaatttgctaccatcctggagcatgtgcaacttctgttctcttccggtagcagcatgattaatgagaatcccggagtcttctctgcctttgctagcagggagagcatctgggtactacaacgccttctgcaactccaaaaagcagagggcgtactattccaatgcataatctgacatggcgtccttacgtcattcccacgtacaattcatctgggaacacggataacactaactaactctataattatcataattaatgtggcctaatcttaataataagaatatgggctaatacattcattaccaattaattttaagatagaactccataattttctacaaagtatcaaaactatatctcttgcgggcaagtgaccatatctaatcctcacatatacagttgttttaatccaccaacttctattgattggagttggtttaatgatcataattcatggtaatagccgagttagactaggatgatcaaaggactagggttaattgtcaacttatgtctatttgcatagagattcttccaaccccattaattattataggtaatattttagtggttaaacaaatgattagtcccctattcttcaaccatattcttaaagtagattcttaaatatttgtcatattatgcttatatggttgtagtcaaatgccataagcagttatataagcattatcacatttcgaaggaactgtatactatatagtgtttgccagctagggttattctatttgcgtaattatcagtactacataatgtcaaattgacagtttgacaccgactaaatagggcctctaaactaacaaaaccataacactatgccactttctaatgccttttatcttttttttctttctttttttccctgtatggttgtaaatactcattaagcttttctttttttccaaaaaccagaatggcaagtggattttcttgggggtgtttgtgtgattttttctaccgcagttgatgggtcaatgtatggccctttcagtcagtttaaaaattgtctttgtttcctgaataataattagtttggtaaattattggtcactgcccattgaacaagttcatataaaagtcgtatatcaatattgaactaaacattatacataaaaaactcatttataagaaaaaaatattaacatcattaagaaaaaaaaccctgttgtaaaaaaaattcacataagaaaatgctgtaaaatatgctaaatactataaatagtggcatatccttattggtactaagcaccacaaaaagtaggaaaaaaaaaaaccaaccaaaattattgtaaaaaaattacaaaaatacaaaataatctttttcttttcttttcttt

SEQ ID NO: 25520 - DNA, 2605 bp, Cannabis sativa
  modified_base (420)..(421): a, c, t, g, unknown or other
tgtttctttcttgataattgaatagaaaagattacatcaaaatagagttttatttagggcacaaagcccaacaacaatatggtccactacagaaaatctccatggatgtcacatggaggaagaaatagacgcgatcacaacaaagaatgtaagtatcatgaggagaagggtcacaccactaatgagtgtgattatttgaaagacgagattgaaatgttggtccgagtgcgacatctgggacaatgggtctgaattccgatcatttatcctggataggggatcttccataggcacatgatcattctcaaagagtataacactataaatcccctacaaggggtaggccgttctcaagctcctagaacatcattacctacactccatgtggaagaaggggaagtgtgtgtgtgtgtgtgtgtnngtgtgtgtgtgtgtgtgttggtgcaatatcccgcacaacaccccagaatgatgtattttcccatcacctttaccgaggatgatgctaaaaatgtgtgcttcccccataaggatctcttggtaattgatgcacagatcgcccacaagcaagtttgtagagtcctagtggacaatggaagctcagtcaacaccctctttaagttcgcattccaagcgatacgacttactgaagcagacttaaatccttgtcctatttagttgcaaggcttcaatggagataccttaatgtcgatggggaaaatctagttacctatcaccctcaaagcacaagttctttgaagcactcaacttttatggtggtatattgcccaacgatgtacaatgtgatactagggcggccaaccctaatggattttggggcaacaacctctatcaggcacttatgcatgaagttcccctgtgacaacgaatgtattagcatgatcaaatgcgatcaaaaaagtgtaagaaactgttacaacatttcaacatcggttgtcttcatggtcttggaagagacatctattgctcctggaatggaagatgaaatggacactgaagccgtccaagaggattttcaagatgagttggatcctagtgttagaatagaaagaaacttagaaccaatggaggaggtagatgagataagcttcagtgatgaagaccacacaagaaccattagggtgggaaggaatctacctccatccataagagaaagtattgtaaacgcaataaaaaagaaccaggatgtgctggcatggacccattctgacatgactgggattgaccataacaccatctaccatgctttgaaaaatttgagaggatgcgatgccagttttccagaagagaagacctttagattcagtaagggcagaagtcgtgaaggcagaggtgagtaagttgactactaatgatttcctccgggaggcattataccatgcctggcccgcaaaccctattttggttctaaaacccaatggaacgtggagaatatgcatcaactttaatgacctaaataaggccatcctaaaagactacttttagcttccactgatatatcaaatggtagatgccacgtgcgggtgcaagttgctcggcttcatggatgtcttttctgggtataatcaaattaagatgcacatcgtggaaactctaattgtgactggaacacaaacattaggatctacagtcatagggtcttgaggaagactcgatgaggcatatgtcgtagccagagttttctttgggctaaccatgacgtttgatcaaataaattaacaacttgctctcaataaaagcatcaaactattgacctcagatttggccaatcaacagtggagtcgaatataatattgatgcttgccgcatgttatacaattagaataatatggtaaatagacacaagattttatagaggttcggcccctttagttagtgggtaattacctactccccttttagttgtatctataccgagagataatactacttagatcactgtagtaatgggatcggaagtagctctcttagacttacattatgagaatcagagttggaaaatctcatgtaagagaagagcagtggacatgagagagagagagagacataagttatctgacttagagcacaaggcttagggtttgagacttcagacttagacttaggattttagggtttgactaaggctctttatataggagagctacatccttaaaatctcttgaaaataggtaaataaagccataatttatatattaaattaataaaatgcaaatgactaaattgccccttaaaaatagggaagttgctgatcttttccctctattttcgtggactgctaaggctcaattcatggtctgacttactttccacgtatgaaagttgcacacaaaaatcatgttaggatataagccagtcggccatgcacctacagagtgcatgttggccggccatgtgatgtccagaagctagctggcctatgttggccatagggccaaccttgaggttgttggttcgtcactttggcatcctgtttgagtactcacacctctcattggttggactcgtgagtagatggcttgaccttcttgttggtgagttgtatttgttgggaatattttaccaggatctagatttaccaaca

SEQ ID NO: 25521 - DNA, 6023 bp, Cannabis sativa
caagctttgttgtatttgtgatagtttaattattggtgatagtctaaactgtagaaaccacaccgcaccattttttgtggtgcggttactgtggttttttagttttgcgtgcaggggtagtttgggaaatcgaaaaaaatacatgtgcgagttggtttgaaaaaatggtcaaaaatcaccagcaccgcgaacacccctacttccttccaatttcgtgaaacttcgataccaagtatcttttgaactaatccaagctctttcatctcaaattctcctttgagcttagctttgatacttttgatcacaaatttatcctttctcataatgagcatgtcatccacatagagcaataagaacacgactgtagattgctctagattcttgaaatacaagcattgatcagatgcagatcgtttgaacccaatttgttgcatataagtatcaaagcatttcttccattgccttggggactatttcaaaccatataatgatctattaagcttgcacactagttcaactccttttccttccacttgaaaattaggtggttgcttcatatgatttcttcatccaagaatccattaaaaaagatagtcttaacatcaaggtgttcaacctcgaactccatttaagcagctaaagacaacatcatattgtcttgtactttaccataggtgagaaactctcagtgtagtctgtaccttccacctgagtaaagcctttagccactaacctagctttaaacctcaatggttcagtctcattgattccctctttcaccttaagaatctattttcactccacaatcttcttattctctggcttcagtacaactacccaagtcttgttcttccggagtgaatccatctcctcatccatggcctgaggctatttagacttgtttccacctaaaattgcctcttcatagcttcagggttcttcagttttagtctattgaactgcctctagtgtaaatgctattaagtatgcctctacaaaccttgtcggagggtgaatctctctatcccgagccaattaataacctctgagacctgtctgtctcaatccttccgacacctctattttgttttcgttatcttattcttctaactccacaacagcttccgtttgggcattgtctttcggttctagactaacttacaccaacaaaccatcttccgggagcttcgttttgtactctatttccacacttacagtgcctttgtttcttatttttcatgcatcacatggagacacactacctttcctagaggttaagtgaggatcttccaaatcattaaaaataacatttttagcaatcataacctttggtttacccttcttagaaatgtggattctataccccttggttttgaaggcataacctaggaaagtttcctttacggatctaggttccagcttctcaatagattcatgtacatatgttgtacacccaaatgttcttaaaagcattaggttggaaattctgttgtactacatttcataaggtgtttttaagcctatcactttatttgggcttctatttatgagataggttgcgattgctaaagcttcccccaaaaaggtttttctagcccagaactgaacagtaaacatctatctttgtttaataaggttcggctcattctttcagcaacactattttgctctagggtcttcaatactgttttatgcttagtgattccaaattctagacagcttgtcaaattcggagttaataaactccatcccattatatgtcctaaagttcttaattttaagatctgtttagtttttcacctaaaatttccaattttcaaactgttccaaacactcatccttagttgctaacaagtatgtccaaacatatgggtgatagctgtcactagcaaaaaagatagttggcatcagtaaaaagcatatgggtgatttaaggggcagtatgagcaacctaatagccctgaataatacaattttctttttgaatcggggaaaatcctttagtgcaaatgatgaagaggtaggttgagagagggtccccttgacgtattcctcgtgaaggaataacaggccccataacatgaccctcgttgacaatagagtagtgaacaaaagtaacacactgcatcactaattgtacccatctgtcagcaaactccatactagacataagaacacttaaatagtcttattcaactcgatcataggctttgctcgtgtcaagcttaagagccatacaacctttcttaccttttgtcttgtgttttaggtagtgcatgatttcgaaggccaccataatattttagagatattttaaatagaatatctgcaaatcttttataacatgttaaacatttatgttatttgaaaaggataataaaagaaataaaatcttctgaataagattgatatttaataaagggaaattttaaaaaatatcattcttttatgttttactcacaattttaaggcctaaaaaatttaattataaaaatacgcttgtaaagttttaaaattataaaaatatactttgctgagtaaaaagtaaaaaaaaaaaaaacaactaaaacacaacgagaaattaatctcacgacaactataaaccaaccataaataaattataaaataaccaaaaataaccagaaaagtaatctcatgacaactataataccactataaataaactataaaacaactaaaaaatagattattatttttactgaagatgtttttttataaataaaatagtttaaagaataaaaataaaattatttcatgttaacgtttataaatttttagtttattgtctatttttttttaataaattataattataaaattttaggtttatatacttaaattagaagttaattaataaagacttttaatatttttggatagaaaaaatgttagcaattaatattcttgggggagaatacaaagtctgttaatcttttactgagcaattcaattaaactggtgaggtggctctacattttgagaagtagaaaaatcaaattatgtataattaagaagtcatgggtaagaagatgacaatgaataagagggaaaagtagagtttaataatgtttttattaattgccatttgtattatccaaagtaaactattccaataatttcactaatcattgtcataattttagattacatacatgaatgaataatcattgtcataatttaaatataccttttttatttaaataattattaacaattaattttatattacattctctcaatttttttaattattttactaatgtgatataatattgtctaatttaattttctacctaaacaaactaaactagaaatacattttactaaattttattttaataatctttaatatatttcaccttttaactttttttttcggtggtaatgaaattagcttcaagtttcaagtttcgctttttttagtttacaaatataatttttaccttaatattggggttttcgttgtaaattagtttaattatacttttcattaagttttttaaaaaaaattaattatttttttattttttaatcacgtaaaaaaattatataaatggacacataaatatattgtctaccatgtcacaccttatcagtctaatttataaaaaatttaacagaagtctttatttttactaattgataaagttaaagaaatatttttaacaatagtaatattagaaggggcacaatcatataaaagacaaaggtcaggaggcaaaatattttattttttaacaaaaattttaatttttactaacgaagttttagggacaaaataattttttatttttcaatgtaatagctgttttttcaataataaatatcttccatttcaaaataaagaaagaaaacatgaaagtttaaaaaacgaatataattttttatagagtaaatactattttgaatcatgtgttttgcaaaggttactaattagaccctctgttttgttaaatgacaaaaagcacattgtatttttcaaaatggtaaaaatagaactctgagcttaattttcgactttttttttttaatattactaacttgaagacaattcttaacacgaacagatataaaaaatgtaaacagttttatcataacacctttagatcagattaatattaaattttattttgacaaaaaaaatcagttgaggctattttggaaactacatagttcattttatcatttaacaaaacagagagtctaattaataatttttgcaaaatacaggattcataataatatttacccttttttatataaatatgtattaaatttttttatcaattttattatacaaataaatggatcggtacatatgaaaatgaaagaataagatgaaactagtttttatgtgactttttctcacaaggttatacatttatattttattcaaatcaaatttttctctagattgaaatgagcacaatggtctaatcaagccttgtgtcccagttgaacatgatgagaatcactagagaaagaagaagaaggtgctgatgtggaagcctcgggttgagccgacttggcattcaaattttcaccaaccttctcagtcttcacctcctccctctcaaaatgaacatcatcctcaactgacaataccacagcttcaggtccatgacgaccttctacaatggcctcagtcaccttcttgtgctcgtcgaaatggattatttcatccttttttaccgccttcttcgtcctcttcttgaggaaacagaagagagcagctgcaaagaacgcgaagaagacaacacaaccaaccgaaatgaacacaataactataaccgttggatggttgtccggtgatggtggctgaggagggtgaaagttgttctgtgatgatgccattttggtgattggtctttacaaatgaggagaagttgatggtttagatttttagttgttgtgtgaagaaatgagagcatttgctaccctatttgtaagaatggtttttaggccaatcttggagagacttagaattaagaattagtggcaggttttaagtgacttgactcttattctaagatttctaatggattggaaaacacttctcatatgcatatgatttaatgaaatccagctcttaaagtattaatttagtatattgtaatgataagcaaaaattcagtacaacttagctacaaatcttagtagaaaacatgagtagagagtacacatatagatacaccttctctgcaatgtaaacttattcagcaatttattatttttatttagatttttttttcctaagaatggcttcaaaaagaattatcttacaagttagactccaatcctgtttcatagctcattggagaggaaagttattcatggtcagctagcagagttgacaagagaatctcattccacatatcaggcacaccaggtagacaccaatggctgcaatccgacactgatggattatcgccccaagtaccaacatgcccgtcgcttctgaatgctcccatccgtgtcacgtgtagaagtttaacaggtactctcattttctttacaactttgattatattgtctgaaatcgagcttcgttcgtgccctctggtgtttgaccatggatgtcgggtcaccttgcatgtgttacggttctttcccctgttacatatgcaagaagcataagatttcactcactttccacaaaaatgtatgtcaactcagtaaaaaacaacagcatagtttgtgttagaaacttagaacaaattctagtgatcgaaacatacccccagtgggacgattcaaaagttcgaaaaaagacacttgttctgtttgtgttgattgttgtctcaacccaagatgcccaagtgcttaatgcttttttgaaggcagtcttgattggcattcccagctttagtgatttgcctacctgaaaatagcagcccctgtctgaaaaactagcttagaaacacaatcatgaaaatacatcttcctaacataaactttcactttatgaacagtgaatcagataacagcattctacttactta

SEQ ID NO: 25522 - DNA, 2161 bp, Cannabis sativa
taagtataatttagtagtacttagtccaattccctgtggttcgacctcacttgcgtgagctactacttgattgcgtatacttgtgtggtaaccataatttttcgtaacaattacaagaaaaaatgtcaaaatctaaaaacacgaaacataaaaactcaagacatgtgagtcatgtaacctaaatgtttacccttaagttgctaaaaacccatataaaagacaatcccacacaagtaattgacgatacaaaaatatatgggaaacaataagaaaagaatagtcaaaagagtaaatggtggaaatacacttactggtttactgagagaaagaagtctcgaagaattccccgctaagaacttctaatattgagggtttggttcttgacaatgctaagattaggagaaaaaactggtaaaaactcgaaagaagtatgtgaaagataaagagggcatgcaatttcagagagaaataaaggctggaatttgaattccttcgaagctttgtaaagcggtaatggtaaaatatggggaaaatgctgaccttatatctaaacgatggaaatcgttcgatcgtaatgatgactgatcgaatttatgaaaactattgggaaaagatgagtcaaattaataaatactgaaatgatgtttttcttgaagtactgaatagccaaaataaagcttgcattttcttttaaaagggaaaatacgatcgtactctctgttaattaaaaagtcctttttagttcaaaaaattactttttaggtgacaattgttatacccatatttcgagcaagtaatatggtcatgacacgtattaaaaagttggaaaataaaccagctcgtgttatggagcattaaatgcgttcaataaattcgcttcggataatataaatggtagaaatatttaaactcatccttcggaagataagggcaagccatgaataataactaccactttgtgagaccagcaagatgaataagtcaatataaaaggtccatttcgggatacatggagtacataacagaacgacactatgttagaaagggtagataatgaattttttaagtagcactactataaaaatcagaatttgcgacgatcctaaaaacgtttttttttacccgtcgcttaaaaaattaagtaactgtttaaaaccgtcaggaaaaattaatattcccgacagtttataatagtaattactggaataggtgacagttttaattagaattggtaattttattgggcccttatacccagggcccaataaaatatcgttacctacttctcgccacaattctcacgtgcccacctatttcttttctattttctacatgctcatctatttcttctcacctatttcttctccatttctcacaccctaaaccgtcgaaaagttcacgttaacgacggtttttaaccatcgcctattttacccgttttgctatggtcgtataggcgacagttatagaaattgatgggaatactttgaacgactgtttaaaaacgtcaagaaaaactatttttgagtagtgtaagtgtacgcagtaacaatctcaattaacaatagaatttaacttgtgccttaaatttataaaaaaaaaaaaaaaaaaaaaaaattaaaagagtattaccactaaaaaaatcataagttaaatatataaaaagtaaaatataaaagagtgtttcctccaattactcttataaatatgctcgtatgattttaaatttttatttctattttactaggtacgttttttatcattctcataacataagtcgtaagtagaaaaatgttaacatcaaatttaattactttcaaagtttaattaattctacgtgaaataaaatagtttctcatgcttcctggctaggattaaaacaaatcatcgatcacttttatttttagaatgatattagtgaaaatattaatatggaggatttttatttgtatggactttaaggtacaagtttgtaaaaatatgattcaattaaacaattagtttagaaaaattgaaagtttattacttatatatcttattgggtgattctacaatgcactattagaatattttgtttatggaaattattttctaattaaggaaatgattttctatttaaggaaataaataaatgattgattttctgataaatgaatatttt

SEQ ID NO: 25523 - DNA, 2213 bp, Cannabis sativa
  modified_base (836)..(839): a, c, t, g, unknown or other
  modified_base (1072)..(1075): a, c, t, g, unknown or other
cgcaataaagaagagaaaagaaaaagagcatgatatttgtgaacaagaaagttcacagaaaaagctagagtaaagaagaaatttggttgcgaattcaagaaataccctttttttttttccttttcactaggcgcttcaagatgacacctttatcagttcatcccctctcttttgcttttcagtgatgaagtagagctttgatgagcattggtttttatagcttaaaatgtgttagatttatattccttattttggttttattatacagtcccactccaacataaaactgaaagggacaacaacgtgatttcttccgctttgttgtatatattattacagcttaaggttcgaaagaaagaatctgtggtgtgttggtagagtttgttgtagtaggaggtcctaaaacaatgatagtatgataccaatttttgggttgggcggaattcccatcatttacccaattatggttgcatggaactttggtgataccccatcaactttgtttcaagcaaaaaataaataaataaataaataaataaataaaaactttggtggtacacatttttccatatccttattttatttttcagtaatttgcaatacaaatattaaaattttgttataaatgaaaacattgcggtaaaatctcaaaaatttaacttgttagcaattaacctctaaaatttattttttagtcgtaaaattttcaaaattcgtgttttgttagcactttacaatttctattcattttcagatgttaagtatcatattagattgggtaaatacgattttggaccccgtgttttacaaaagttaccaattagaccctctatttnnnnaaatgacaaaatggatcctgtatttttcaaaatggtacaaataggacccttaatttaatttttgacaactttttttttaatgtaaccaacttgaaaatacgaacagatacagaaactgtaaatagttttgtcataatacttttagattgaattattattaaatttttttttgacaaaaaatcagttcagggttttatttttactattttggaaaatacagggtccattttgtnnnntaacaaaacagaaggtccaatcggtaacttttgcaaaacacagggtctaaaatggtatttaccctattagatttacacaatacaatgtctacatgaacacaatgtacacataacacaaattaattggtccacctaatttaattatttaaaaattatacaaattatttaaaaaaatattaaaaattttaaaaaataatatttataataaattaattaaaataaaagaataacaattaaatttagtaaataaataaaagaataaaaataaaatactaaaaaagaaacaattatccttaaacattctcatctcctctctcgattctgcctcttctcacatccgttcaccttctctgacctagatggataccgacgacaaaattgattggccccgaaatcggttttcctccattgatcttacaaattttgctcttatacactaatgtgtattgcttataacaacaaatttattaatatttttttattttattattactagttattttagtataacgctaaatacatatggccgaccaaaggtggggcagtcgggacataggccccaaggcccaccattttggaggcccccgaaaattaaaattaatttatatatatatatatatatattttggttcaacaaacttcttaaaagtgatatagcacaattggtaagagtaagtgaaaaaaataatgatgttgggtgttgggttcaattcttagctcacaaacattttgactatttaaaaaaaaaaaaattacttagtaaggatttagatatgtgttggggttttcttatttaaaaaaaaatgaatattatattatatatatttttgataaggagtaaatattatgtttagtattaggtgtaatcataaggataaaaaaaatattgtaataataataaataaatcaaatatttttaaaaaataattaacaagaatattatagcttaaaaatttaatgtcatcattataacaaataataacaatattataacttaaataaaaagtatatttattaattattatgtatcttcttaaatttatacaacttttaacataaactaataactacaaaaaattttacttttagtcacaacaaaacttgtgattaaaaattaaaaaattgtgactaattataa

SEQ ID NO: 25524 - DNA, 1311 bp, Cannabis sativa
atatgtttgtatcgaaacatacataactgggaggaccaggacccaataatggaacatttaaaagcttttattgtgtatcatacgtacacatcaaattaaataacttgataaaagtgtataactttccaattaaatgatttatttgcaaagaacaagaaaaacagagcataaatgaaagtagtagtaattaatggtaagtaccagaagaaagtctattggcggagatggatgaaatgagagagaagcaagtgacaatggcgtcgagacctccatacacaatgctcttcccatattcactattccacggcaattttggcctttctcttcttccttcaccatcactttcttcgtccactaccaatatttctctgctgctttgatctgtttcttccattcttgatctcattagtcttctttttctctctgtaatttttttttatttattttaaatagtaatttacaactaccgcttttaattggtatagattatttcaggcatttaagtttttactatcatcttctatatataattttttagttgactgactaaaattgtaacgtgtcgaaatgcatgggagttttctgacacgttatgttagcaacatcctcagctcattggcttttttttcactatgtgtcgttcaattagctctatttttttttttctccaataaaatcaaatggaaaaggccaggacaaccctgcgtgattcttttcttatccaataaaattaataaaagttcaatttaccaacttgtttgtttgtttgcatataataacccactcttctgtttgggtaccaccactcagcagtactcttctttattagttttaggtttaatatcttttatccaaaaaaaaaaaaaagttaaatataaaaaatcttcatctaaaattagtttataaacaaaacaaaacaatacacgtttttttttttatccaatcaaattactctttttttttttgtcaaaatcgatagaattgttttttttttaattgaaaacatttacattctattatttaaatgataaaattataactagtattacactaaaaatgcatatataaattgtaccaaaaaatgttcacagcaatcaaatatcaatttatgcgtgtcaagggccaaataaggcatgagcactgccaacaacttctattattttaaggtgtcgtttggttggaagtaatgaaatgaaatgaaatggaaatgaaataattcattctattcctttgtttggttacattttaaagtattggaatgacattctaatagaatactctttccagcattttggtggaatggctattcca

SEQ ID NO: 25525 - DNA, 2935 bp, Cannabis sativa
tcagctcaataactctccatttgtagagttttctttttgtaagatttagtgattcgactgtagtatcttctaagagagtcattctttcatgtaattttcgtagagttttactcgatatccaaagggaagaaaggttatgctcttctggttgtatgaatgattctagttcaccttaataatttcagatactgttcctcatttatgcctgtgatattgtcacatctgatatagttgtttcactttttgctaagctccactgatcttggcatcttcaatggtgcaaactcatgtttaattagtacgtgttgttctcttttttatccatgtggttcatcaagctttggattttgctggatcatcttgcagattgctcggataaacaagaaggtagaacttgttcaacaaatcccattgctgctaccgagttgttttcatcgttgaatacaggtaaggttttcggtctttagtttgcatccatgaggtgcttagtcattcatcatccctacttgaatggatctcggaaccattgtttgagcaggagaaccggtacagaagagcaaagcaacagagtcattccaaagtgtaagtttaatctcattgattattgcagaaaacttcatgtcaaaaacaaccgaaaaccatgctgcaatcgaagaatcgattggaatggctactacccatgaatgtactgaaattattcataactgcactaattagtacttgtgattttttatcacatagcattgttgtttagaacattgacatattaaagttgaggcctctaattgatatcattctttcatgcacattccacactacttaggctctttgtctatgctcttttggcatcctttcatttttaatggctttcatacatttggggactaatagttataaaaggaataaatatgatatttgttcccattactatttccattacacgattgtgcctttcgaattttatcactattaaatcgttcatctaatcagtataaaagagtaaagtttacacgtaactgcttcacactacatgaagtattattattgaattgacgagttgtatccctaaactattataaaatattttcccgaatttcaaatataaggatataatttaatagttataataatttaaaagaatttaaaataacatagaaaatttgagaacacgaatagataaaagtttaaagaggcaaaagtcatacttattcttataagaattgtcatgtaaatatggaagaaaaaactcgtaacaatataaatcaaatcatgattatgtgagttactcctcttatgtttgttcatacttagtttccttaataaaagcatcaaatgatgtttacacatgcattcacatattatgatactttttcttactcattttttgacacatcaaaattaccctttaccataaatgggttgtttctcaatgcaaatgtacttttgagaacctttcacttggtacaaaatattcgttttagttcaaacattcttgagtgatcactctcaataacaacaacaccattcacaaaatgacaaatatgttttcatgcaaaacattgaatatcaccacaaacattatcttagcttttgtttttcttcacatatttgcaattaaattttaaatgagtagtgatgtttgaccaaccaaccaaaatccaatgaaaaataaacgtctttttaactatataaatataaatatttaaaatagagtattatactaaacaaatttaattaaattttaattcaataacgaataataaacaaaaaatttaaatttttatacttaatttaactattttattaataaaaatattaaaaaatatctatttttacactatataaaaatatattaatatataaaatatttaagtcaaatttaactttcttttattttttttactaattttttcataatttttcttttagctaatgaaacaacatcaatctatataatacaaaaataagaaatttttttaatgagataaaaaaaattatgcataaaaaatttaaattttttaatactcatgtacctatatatatgtagcttaattttcccactaaattattcttaaaattttgtactaattttggataagaaactccatttctaggtggatattggattataatgttgcccaaaattgggttttactcatcttaattttcttcaaaacaaaaaaaaaatcatattgtttggaccacaaaattacaattaatctttactcttttggatcttagtactctcactctgcccaaaaattttctagtcaacaaagaatattggcagattaggatatttctcctttgcagcttttcatttttaagcttcatattgttttaatataagagataaattaattgaaaataaaaacaaaaacattgaacttgcttccatcattatcaatggattattttcaccacacaaaaatttggtagtttgtaagataattaataagttatatgttcttcatttcaaatctcaaaaaaaaatcattcaattccactaccaaactcctaagaatatattttaaattaaattaaaatctttgatttattttttaggttggtgggtggagttaatcaatgttgtgtgttataaatttatttttttagtgggcacaacaaattagcacaagtcattaagtttcacacaacacaacaatagactcttattaaagccattcatgttctcaatataattcataagaaaaaaagggattttttatttaaactaaacattattgatgctactaaatgttgtgcccacatcccttgttgaatgcacttgattaatttagatgaccaacataatttgtttaataactaaatcttaatgcattttattatattaccaaacaaaagtatgaattttgcatatgtttataatttgtagtttaaattcaactttattaatgggacttttattttaggg

SEQ ID NO: 25526 - DNA, 4183 bp, Cannabis sativa
aactaaagagagatgacagggatgatttcatggctttaaagctggatatgagcaagatgtatgataggattgattaactttttctagaagctacttctttgaggtatggagtttgcagagaaatgggttcagttggtgcatgaatgtgtgggcacggttagatacatggttattaacaatggtatagagatgggtctaattgtttcttcatgtggaatttgccaaggtgattcattgtttgtgttgaggtgttatctgggttgattcacaatccaaaggatggatccaagattgtcgtgtggccaaatgtgcttcagtagtttctcacatgttttttacagatgatatttgttgatggtaagaactcgtcaactaaactttagttagaaaatcaaatataaaaggctagagatgacaagcttaagagaaacttagaatgtcaatggagtaaaataatattgtattgaatctccaagctcccttacaaatggctattttccaagccctttccaagaatttaaatagggtatttatacttgagctcccacgactctaaaatacaattggttttaaaagtagggcctaaagtcctgatggtactatgtggatgtgttagggggagtagtagaggagtggtggtcggatgtcaatgtgtacttggagtaggacaaatattgtctctactacctgtacatgtcatatcctttgtacaaccacctcatcttcagaggtgtacttgctttaacgggcttgtccttgattgtacactcctttgatatctttcccactacagcccatgttcgtagtgaggaaacaactgagaatttggctgtgttgagcccatagggtgtgaggctcatactttagacttggtttgaatctattcttcaactctattggtcatcccattgtaatatataatctaagtaccattgctcccatgtgttgagcaagtggtgatgggtgattagtatgtgggggtgagaaggaagagagaaaagaggaaagagggatgaaagagcgagcgagggggagctgaagagccgagcagcgaggaatgtgcaggcttggtgcggggagttcaacccgtgccttggcccctccttgtgggggctcttctcctcgtgcagtgtctcattgtgcgagttggtccccatttttttgcccatacacttttcaagtgtattttggaatcttccttccgttaaatttagagatcccaaaattaacacttaacaaattttgggtcaacaatagctatgtgtattgtaaagctacgttttctgaagctcaatgtgttcttcatctttttcgttgttttgaacagacttcaggtcagaagattaattttcaaaaatcttctatcttcttcagtacaaacatgattgtggaaactctggcccaagtgtgctctttgttgggtattgaggaagcagtagaaaatacaacttatcttggcctccttactattatggggagaaataaaaatgctactcttagttttatcaaagactgatttgctaaacgaatccaagggtaggatggcagcttttgtcaagggatgataaagaagttttacttcaaactgttttgcaatctttaccaaactatcgtatgagtgtcttcttattgcctttgggagtgtgtgatgatttggagaaattgatgagtcatttttggtggaaatattcttcttctcatggtaaaggtatttcttggattagttgggagcgaatgtgcttgcctaaaaagcatgaagggttaagtttccatagattgcgcgattttagtttggcttttttagtaaaaaaatggtggagatttttgactaatcctgcttctcttgtaggaaagatatacaaagcaagttatttccctaatatttcttttttgggtgatgttattgggaataatctaagctatatatggaggagtattcttgaggcaaaaaagttgattctttttggggctctacgccgtgtggggaatggttctatagtctctatcttggatgatatgttactgccaattatggataagccatttgtagaatcaagacatcctgctttacaaggcaaaatggtgagttctttaatgacggttgattcagttaggtgggattctgaggtggtgattgatctttttatgaccgagaggctattattatttgaataatcatttttttagtagttaatgatcttgatgggtgttattggaaggatgagagtttggagttttattttgtaagatctttttatagaatggtatagggggagattgcgatgaacaaggggggttgctaattttttagtttggaatttttttcggatgttaaaagtaccacctaaagtgaagaatctgatctggagggctgcttctaattttccaacttatcataaactatgaatgaagaaggtggaccttcctgctacgtgtccttattatcaagttagaattgaaatcgtttttcactgtctggtgttttctcacttgctaggggagtttgggaatgcttgggattggcacatttaatgggagatgatatgagtttctttgattggctctattttgtttggaggaattaagagtttgatcgatgtgattttatatctatggtttgttgggcgttatggatagcgagaaatgatttagtgtgacagaagaaaaattcttcggtggaagagattgctatgtcaacttaactctttcttgatcaatggttgtgtgctcaaaataattcactggatccgtggctgagttttatgactcttcaagatgaaggggggcattggactagacctattgagaatatgatcaaggtaaatgttgatgaggaccgtgattgttatagtttttattgtgtcactcataatggggtctcgttgttaatgactgctatttctagttctcattgtggactactacaaccagaattggaagaggctattggagttaaggaagctttgagttgaattaaagctaatgcttggggtaatctagtggttgaaataactttttttttttattgtggttcaaactatctgtcgtaatatggccatgcattcttattcttgttgggttgttgaagattatcagagtttgttactcgaattgaggtcttgttccttagttttattaaccattctgctaaaaaagtagctcattatcttgctagagcttcttatatgcctgcgaattattcttttttctgagctttctatttgttcttctttttcaagatgtattgttgaatgatattatctaataaaatatatcttttattgaaaaaaagttattttttgtcttgtgagcgactttgtaagtgttactttatgtcttatgggtatctgatttttttgagtgtttctaagtcatggcgattgaggaatgtcttttggatgatttgatttcaaaagttatcaagctttcagaggatagtgaggaacaatgtgttgaagtgtgatgagtcaaatgaaaaagcatgggttatggacttttaaaactcgaacaactttgggaaaaacaatatgttgttggaaggactttttctaaaagaaattgtaatagaaagttcatcaaaataatatttgaaagaatgtggaaattttctacgagctggtcggtgaaggtattaaagagggaagaacataatatttttgtagaatttacttttgaaagtggtaaggaggctcacaaggtgacaaagaacaataattgcatctataatggtaattttatgcttgttgaagtttggtcaagttctggtgattagaaggatgcacatatggatgatgttccatgttaggtcagggtttatggattcccgacaaatgctttaaaccaaagcaatatcaaaagaattgttcttaaggctaggaagattatggatcttccatggaacaataatgatcaaatagtcttaaatggatatgctagagtaaagattaaatttcatatggatcaaaagattttctcttgtcgttttatcactattaatggcaggaaagaatggattcaattccagtctgaagaaattttgttgccatgttatagatgtggcaggtggggacatgatgagaaggagtctaaacaaccaatggttcaaactaaagagattcatggaactcttattaagatgtttggaccttggctaaaaatgcaacgtgattatagcaattgcttc

SEQ ID NO: 25527 - DNA, 2095 bp, Cannabis sativa
  modified_base (1639)..(1641): a, c, t, g, unknown or other
atatatgagcaatatggaccccaaatttaggcaagtattaattaattacttggcgttttggacaagccatagccttttcaaataattgtaatgttggttattggttattgttattggtatagctttattaacggagttatatatatgagaaataattgaaaatatttcaatattattagtggtatatattcacacataatataattttgtgtaccaccaaaaaagaaaatatgatgatgatgagcaccagaaaacctcgagtgatggtggtaccttttccagcccaaggtcatgtgaaaccccttctcttctttgctcacaagcttgcccaacatggctttagaatcactttcgtttacactgatttcatccataacaggatcttgagtagtactagtactgatcatcatcatgccatgaataataataataataataatattaatgattttgataagacaagatcagagaacatcgagtttgtgtcaatcccagatgggctgagtcctgaggccaatagaaatgatgtgactgttttagctaaagcagtgatagaaaatatggctgtgcaccttgaaaagctcctattatctataaatggaaatagtagtaattcgaacgacaagattagttgtgtcgtttctgatgtttatatgggtattggcatggaagttgcagctaagatgggtattgaaggtgcaatgttttgtccttgttcggttgctaatctctgcacaataatgaatataccaaaaatgatacgtgatgggattgtcgatgattcttatggtacgtacctttatatgtatatttaatccattatatataaataatagtgtttcaatggttacattaccaaatttgattattacatttatctttttgtttttggatcattattaaacgggattaatttagaaattaactaaaaataattaataaaatatcttcaacctaataatattctattttcctttcaaaaaaaaattctattttatttattttcttataaatattaaaaataaatatatttatcaatattaattattaaaaaaggtttatcaaatattttaattaaaaaatttatttattttaagtgtataattaattacaaatagttttaatttttttaaaaaattacttgttaataacttaatatatagcaggttaaaaatgtaaccaaataatcacccacaatcttatctgtgttattaaaatttaatatatagagagtttcatttgttagaattttataagttgtactaagtacctaaaaatgactttgaccatctccaattggagaaacaaaaattaatttatatttgctacaaataataattttgtgatatttttgtatttacttttactattacgtacactccaatgtataattgtaaatctttatataaaatttaagagaaataatgttaaagagcattagtggtgcttagcaccctttatgtgtcaatgtcgctattggtccaactaaatatcgagtaactagtttaatataataaattttagggaatattgttagccaatcgcaatgaaacatgcctagaggagctagatatcacaaaaattacaatttgtttgggctaaatatatttttaattataatatttgttgtgactaaaannnaattagtaacaacttgtatctaaatacgatgttttagtcctaaataattttttattactactaaaaagttatattttattaaaaaaaattatattataactaaaatattgtcactaaaaataaaagaattttttttgtagtgagtatttaaacatgatttgttgcacacaacgtatagaagaagtagacaagactgaaataaaatgaaacattttgatgacgctgaaggatttacaattaaactatacaaaaccatcatatataaaaaaaaaaattaaatttatagctattcacgtgccaaaaacacaaaaaaacatgctgatgattctcttttcatgctcttcactaaaactttccctaaattacatttaaaaacattgtttgattataatcacttttatcagtagaattattcaattattttatatatacttgtaacttgtaagtacttaaa

SEQ ID NO: 25528 - DNA, 6061 bp, Cannabis sativa
  modified_base (3483)..(3483): a, c, t, g, unknown or other
gtgttgggatttgtcttaccataatgggaacctatggacagtgcgagtatcttggttagagagccctgatgcatggatgcactcatggatgcttgcgtgcatgactcgacaggagttgtttcgagagacgaaagtgtgcacgaggcacactgtcatgtgaaaaatgagcccattgttactcggatggttagaaggctaaccttggcttagagaagtcaaggtgctgcacaagtgtttcgttgcctgaaaaggtgagcccatgacagttggtatcagagccaagtttatctcagtgggaggtgaacgggggtgtaggcgtgtgaaaggatgctagaaagacaactaccacgtgcaattgttgagatgcgcaacaaaatgtttgaaactcgttggcagacaaggttttattaggtagtccatactgtatgcttcgtacactaggtcgtgtttgcttgagggacatcgtaagctgcaggaggcgctttttttgaaaaggaagcttgttagcatgggtgtggaagtagtgcaggggccgtcaaattcttgttagtaacgacagtggtcgagagttgatgactgagatggttcaaattgggacagacatggaatgcttcagttgctacatgggtgtgtcaaaagggacgcacataaagaccaagaggccaaatgccgcaatcatcaaaggatggttgtacttggaggtgttcgcatgtgagttttatttgatccagatggaagcaccgagacagttgagtgggatgtgttggcttgtaaaagcaccagtgggcgtaagtcacacaaagacatcgataaagatgcagagttgtggaatgaaagcatcgaagaagctagcagggctgagaagaccgagcgcaagcattgagatggtgctagagtttgagtggaggccagggggatgtgctagtgagacttagtagtcatttgagcctgcaaaggtcaagaggagtgctagagtttgcatgatggccagagggctgcatcattggaacttagtacatcgtgggagtcgaaagggcatgatgcaagtgtgaatcagttggatggttgagtggatagtgcatgcatagggaaatcaatagggttgctatatgagatagttgactcgagagtcacatcctgtgggatgcacttttagatggcatggtgtgcatgaagagttgggcagtcaggcatttacgtgtgggcatgttgtcgaggatgccaacagatgaagtgggggagagatcctcacgattcactcattagactagggattcattacaagcatcgagatgagtatcatggagattaattattttttaggatgtaaagtcaagaagactcaggacacaggcagtgctagttatctaggttgaaagtatgcaagactcaggtactaagataacaccatggcaatgttggcctaaggtgaaagtcagtaggactaaggtactaaggcaacatagaaatgttaaggggcgaagagtccaaatgaccgaggcatttattcaacatcttcatcaaagtgacattttgaatagagggaccgtatgcgagtatgcgttagcttgcaagctataccttgaggagtattcctctaagagagaagttcttcccaagttgaagtgggggagcccactaattcatatctttgaagaattagggtgtaaggttcattgttttgacaaattatattaatagtgagtccagtcttatctgtggttttaatctgttataactgcatacaagttttctgttaaagtccatgtgagtctatttatgttttaactgttggtttaaattgttattaggtcggttgaactattgtctacaaatagctagtttcattctgtaaaccagtcagctagctaatttataattttggttagttcagatatatcgtgtgatattgtgtgtggtatcttgtatagttcgttcctatttttcaagtctgattgcatagcttggtgatggatatccatagcaaaagtatcagagcctggtattgctgagtttagactgaagggagtttagtgtcatctttgtcattagatctgatgggatttcagattgaagaaaagtgtcgaagaagaacttagctactgcatagggaatcttgtgcgtacaaccgagaatcttggttgttgttgataatacattactaattgttgcaaagattgtattaaatttctaattgtgaactggagattgtaatacgaatcttttggatttagtggatgttattaccctggttcggggaacccaagcactagtcggctaagatttgttctcagtgcagacgaagcttgtaagtcattgtgttctttactgctttctcttcaatccgattcttgaatgcttaagttgaaattaatcaatctaatctttaactactcagtaacttgaatcatggaatttgaataaattcttctatcaaagctttttttcctcacgacatgatggtggaaaatggatttgagtactaaaatagtaataccatatttttcgcgttgagagtttattttattttttataaaataattattaaacaatattagagacgacatgtggcctctaaaaatagaaaatattatcccttaaaatatttaaatttctttaaaaaaaaaaaaagatggagcattattattagccgtgagagatgattgttgcgactaatgacgggttactagggacgaaaaaagttgcctttaatattgtcgcccataataatggtctttttttaataatatatattagaccattagtatcgaatctcacatgttttaatttattaattattataaaatatctttaataggaaacaatatcatatattagtattggacatgaaattagtacctcataataatattctttctgatatagtaattaccctagagcctgagtgttgtgtgtggaatctttaattatcaccgtaacaataaatatatttctaataattaaaatcaatgtaatgttgagtggtcctatatatatgctctactcttttttaatatgtttatgcatgtatagtactttcttaattaaaataaagaaagaaagaactgtcatatgttatatgcatctcccctcataaatttttatcaaattcaaagaaatttacaatatcattttgctagagcctctaataatcattcagaaaaatcattattttctttttataatttctaagacctcattagttatattaagttttgaacaatcaaaaacaaaattgatgactaataacaaaggatatgatttttaacattttctttttacacagcatatttataattttgtgtgaaagagaaataaagaattatgatttatgatataagtggtgtgtattttgaaaagatttggaatcgttaacatagaattacaaaaaaaaatggttttttttaataactttttagttataacataattttttttgtaactaaatgtgatttttagtcataacaaaatgttacttgtgantaaaacataatatttaaatacaaattgtcactataatttaattttagtcacaacaagtatttttactaaattaaattatacttagccataacaaattgtaatttttttgtgactaataattttagccacgaaccttttaatcataacatataggaatgataatttataatcagtcaaaactttttaattttcaatcataaattttatagtgacttaaagtaaaaaaaaaaaaaaaattgtagtgtatatatatatatatgatatgagaggaattattttaaattagctatataaaaccaacaacattataactacatatatataaaataaagtggaaataccccaccctatatataggccttattagctaaagtcatagctatagggttgtataatatatatatagctaggcactaatatatgcaacatttcacacttatactttcatgaattaataaagtgagaatgcatgtgccttaacgtgaacagtcctatatatgtgtaattccacatgagttactaaacaattaattataataatcataatgcaaaaacgaatctctatcttattatctacactccctaccatccatattgcatcctacaaatgttgcccaccatatagaattctacattcggaaattcaatgaggaaaataagcataaactttaatgaatctatacactagtatatggcactaaaaaatcaaaagttatacaaagaactttcaagaaagtgtgccccttcacttcatgctttatgtggtgaatttgcttctccgaatagcatttctactttaggttgccctaactagtgtttttactgttggattacgtttataccagaatcaagaaatgtgatacaaatagggttgtgccacacattcttcctgtaagtatgtgataatacaaataggggcatgccacacataccagtcccaagcttttgagaagcctaagaaaaaatctcaaaatggaacagtttattaaaataaataaataaataatatcaaatatgtacctttatgttaagcaagtttttagtagttagttgagaatgttagttagggaagtatgtttctattacttagtcttttaactaattttgtaaactaactttttttgtataaatacttgttcacattaaattgatcaatacaattattatctccatttgataatcatttctctttctttctctacttttatttatctctttcttctcttgtgttacactttcttcttcattaatggctcaaagattcaatatggtatcagagcattttttgtcgctcactgcaaacatatggcaacaaccaatcttgacaagtactcaatctaaccaatgtaaccgcaactgacattcaatccataaatcgtggaagtgatgacttttcaatctacttcaatcacaacctatcaatctagattattgatcactactttctttaatggaaacaataagttcttattgtaattcaaggtaatagagttcaaaagtatatttttgaaactcttctgcagttcctttaaaaagacaatcatattcctccaattgtgaatcatgcctatcctgaatggaaagtttaaaattatttgctaatgtcttggatactatcctagatgagtgaaagtctcttggttcgaatggttggctgtgaaaatgcaagacagatctagaccactcttgaaaagcatttcactttgcaaatctctgaaaagatcttggtgtttagaactaaattatagaatctcaaaaaaggatctatgtccttgaatgattacttgttgaaagtcaagtaacatctcgattttcttacttctgttggagaggttctcagcacaagggatcatgtagctactatctttaaaggatggactaccaagtgagtatgacatttttgtaattttcacaaatacccgagttgaatcctacttagtttcaaaaatagaagctctcactactaaaagtatgtctatttttgtcagtttctaataaacatttaaattttttttgtcaattttataaattggcgtatatgttgcagatgcaaatttatattaattcgcgtcattttttcaccgtcagtattgaaatatcgtgtcattttagaatagacataaatgaagtaaaaatcaaatctttgattatattcttgtcagttttgtacaggcacatactaaaaaataataataaaaaattagatctagctcaattcaaatccctccacacatcagaaacaccaatatactgtttttacaaaatatcaaaatcgaaaaccaccgaagatcctcgtcgttgccaaaaaaaattgtgcaagcaccactggagctcccgctatcgacatcgggcctacaaaagaaataggaaaatatcaaatttacaagagagagatcccgagacaacgaaagatatagagagagatccagagagagaggagagagaacattacctctttgatttcgacggtggcttgaatgtcgcgtggtcgttttagttcaacagtggcaaccaccgtataagatgttgggttttgggccgtaaataaaacccatgtcaatataatcagatttactta

SEQ ID NO: 25529 - DNA, 3423 bp, Cannabis sativa
tgccttcctttctttcttgcagaatgagactgagtgtgcatattatttaagaaccggacaatgcaagtttggaagcacatgcaaattccatcacccctcacctactaatatgatggtttcaatgcgcggttcccctgtttatcctactgttcaatctccaacaactcctggtcagcagtcatatattggagggatgacaaactggtcaagagcatcttttattccaagtccacgctggcaaggttcatcaagttacgcacctctgattgtacctcagggaatggtatcagttccgggctggaatgcatatagtgtaagctttagttcattcttcatttaaaagaaaattacatggacatgaacaatctgcataaatcactagcacaaaaaggtgatacaaataagaacaataaacacaaagactaaaaaatgcaggaaagaaaaccagaaacacaaattacatgatgacatttcaatttctcagtaagatagagaagggagtatcttcaaaaccccttaacatcatgcaaccaaagggccacccataatctgattttctcccttagactttccacatcgcttgtttgttaatgcatagtttcttgattggttaggtttaaggcctcatttgggattgtggtttaaggatcttgccgttagattacaaaataaggtgggtataaagcattccctaatgagtttgacttagaagtaggttttgtcatttatgtaagagttcttttttgttaagcttctaacattacatgccaaacagtaaagccagagttatctttgccccattcaatttacttagttaatcatgtagtgtctttggccatgttttgcctgtgtgtgtttttttcttcttcaatattttgttgattatagcatatttttgtaactagtgatactgaaacagtgtagtcatgcccggtcatttttccagggtcagctgggttcagtttcatctcctgataaccaacctgcagcaggtaatagtcaaatgtatggaacttcacgtcaaactgatcaggcaaatacaggatctcaagggacatattcgccttatcgttctagctccgtacctgttgggttctatgccttaccgagggaaaatgttttcccagagagacctgggcagcctgagtgccagttttacatgaagacgggggattgtaaatttggtgcagtttgtaaattccatcatcctagagagagattgattcctacaccagactgtgttttaagtccaatgggccttcctttacgcccggttagtgttttttttttcactatcaaattgtgtgctcaagtgcgggaatggtttgttattcttatgttcattatacttatatttcctttatttgaggttttgtcatttctttcagactagctttcgaccttgcatggagtttcttaagttatactcatttttattaattgaatagctggatggttttatagtattttaatttcttacagtgtagtttattctatcagtaagatctttgtttaatttgaatcataatgaacattttgtttgattttcaacagggagaacctttatgcatcttttattctcgttatggtatctgcaagtttggtccaagttgcaagtttgaccaccctatgggaatctttacgtataatctatctgcatcgtcttctcccgatgcccctgttcttcgtttgttggggtcatcatctggaacagctcaattaaatttttcttcagaaggacttgttgaagccggatcaacaaaggccaggagactttcactagcagagaccagacagatgcctcctggtgaagataatgatactgatacagaggactgaaactgcttttcaagaaatgagtcatttacttttgctaaaccaaaaattgtgtaaattcatttccaattaatggagatgtacagagttcgtattaagtttatcctgttcctctgaaattcatttcagatgacagatttaactttattgaatttcttatcgctgcattgtataaaaatctgcaaatattgtcacattggtataagccaatgtgaacattttcatctgtttcaaaatctcattatctgatttttgtgattatttcttttaagaataatgtataaacatttcttttaagttctggcgatcaattgttgcactattttttttttctttaaaaatatgttccatggttaagaactttagtttctgtcacgaagttccatttgatttgcttgaatatcttggaaatccacaaatgatagtggtcctcgcttttaagaaattttcataactgatgatgaatttatctcttatctactttgctgtaaagttgtctttgcagaaatcaacatgggttagctattggtttcggtaatacaggatcaaggcaatagaactggtgagtcatgttcctgatgttctatactcttgcctgacaatttcatttattgcagtgtacaaaatctagaagtcttcaactatctgcgtgttaagctaggacattaaagatattagttctaagtttacgataatacagaacaggtttggatgactctttttgtttggtcatgcatcccttgacatttccttaatgaacttttcaacatagtttatgatctagaaatagtggtgagaaagcagagttgtgattattggaattgtcctttcagtactcttgcatctttccttatccctcttgtagaaacttttcttgaattgttttggagttcttgttcagttgatgcagccgaaggcgaatgtcaatgcatttctgagatggaccaacatcacgaaaacaaaagcaagaaaacaaaatagaaaaaaagaaacagtcccaaaagcattcaaagcaatagttaactgatgttatcatcagaggtatgcctactgatctttcatcagctaaccaatttttattgcctcagctgcctctaactttagctcaattgctttttttttttatagcaactattaagtttcaatgttgcttaatcagtaaaatttgatgcaattcaacttatattgtgttgctgcctcgacttttaggacttgtttggattaagctgttctattctatgagtacgatgaggtaatggagaatgtgagactgtgacatgaaaagagtgtcttttattaaagaggaataattattctactaaaatggtagacataaccacataacgaaatataggaaactcaaaaaaaaaaacaaaaaaaaaaaaaagaaaaaagaaacacaggaaacttgttatctttttctggtccatcgaaatgggattatgttttttttaaaagagaaatgtgatctcttagagaaatgctcaaagcacctacatgtacaatatcctatattataattggttaaaatgaatatcaggtctcgcatgcttttaaatagcaccaatactcttttttttttttttt

SEQ ID NO: 25530 - DNA, 2378 bp, Cannabis sativa
gtgattgaagatatcgattgttctgtcaatttcgaagatcgaaacaaggctgcagtaacagactctgaagagaataaggttcgatttcttagtactaatcttaattaagtgttcttttttataaacaccataagtattaatctaaattttatgataattgtgtacaggtgactttgtctggtttgttaaatttcatagatggactatggtcatgttgtggggacgagcgtatcataatatttactactaatcacaaagagcgactcgacccggcactggtgcggccgggtcgcatggatgttcacatccacatgtcttactgcacccctgatgggttcaaggtgctcgcctcgaattacctcggcattaaacaccatgtgttgtttgaggagatcgagcggcaacttgaacccactgaagttacccctgctgaagtagcagaggtacttatgaagagtgacaataatcctcaagttgctttagaaggtgttattgaatttctcaatgtgaagagaaaggaaaatgaagaagctaagttgaagaaagaaaaagaagaggggaaataggatagaaaaggaattagatgaaggaaataattccacaaagtataagactaagaggtcaagcctgtcccggccaaaaattaaaatttattttgaaaaagtacataaattaatcttggtcagcctggacaattgatgtagtaatcccatgctggggagttgggggtcatgtgttcaaactcgtgttatcttgacaaagagtaaaagaagaggtcttaaatgtgaaagttctacctgcgaatgagaaaagggaaaaactgtaaaatagggaggggtaaattgtgaaaaagataattctaagggcaaataaaaaaaaataagcaagcaacagcttccatagttgattaataagtgcctccactagtgctgctcctaaggttttagtaaacatttttgagggggatttgagctctcatggtggacccatataaaagcaagaaatgagaaaaaaaaaatatgtagatgtatttcaattaattacaatatacatttgtaattaaaagtgataaatatttataaaaattcaaattccatcaaagttatttttaattttaacatttaaagtttatttttagtctcattaacaaaaaaacagagtatgcctcccacgactttaattctgaatctgatactggtactagtactagtcccctctcatttatcttaagaaaaatgctgaagttggtgaagaggttgtaaagggtgactaccttgtaaggcattgttgatttggtgggaaaaccaagtggacaaggactatgtaggctatggtaagttgatgagaaaaaacaaaaatgtatgaaacataggaattacgaacaataatttcttttacagctaacattgcataaaaagtgtagtaaacaactttattagacagctcaacgcttactaattcggattaatctgtgaaagtaaatatcaattactttcacggccggcctgagcataggtgggttaggcctgtgcctagggcccacttagcttaaggcccaaaaaaaatttgtccttttttaaaattacacctttttttatcaattttgaaaaacactatatttttctaaatgagagctcaaaaatattttttttccctatgcctgctttcatatatattttactattattttttttttttgaaagaatcccttcaattaaaaaaaaaaatagatgggaatcacaagaggattttcctccccttgaaacaaaccagtcatatggctagaaattctagctttctggctagtccatccgcaacaaagttaaagtttctgttaatgaaaaagaataatattagagtccgaaactacatccaataaatctaaaactaataaatataaattcaaaaaactccaatccggaagatgagttttctaagccaacaatatagcgtcaacatttatcttgatttgattataatcttaaggctttacccaaatctagtcatcatcttatgccacaccactagacaatggtgtatagtcattctttatttgggtatttttttcgatgttcaagatacaacatttctaaattaaccaataaccacatcattcacacttggaatcttcttgttccaaacaatttcattttgagctcgccaggtagtccaacatatcacaaccaccatgtcttgcttctccttccctaccaattctccaacctatataatagagtatgtattagagcccccaataatatataagcatatgtactatattagtccacattttatgtttgaatgttaatgatgcctgttaaattagatcccctgtcatacttattattacaattttacagaaaagagaagaaatacaa

SEQ ID NO: 25531 - DNA, 5625 bp, Cannabis sativa
ttttaattaatcaattagaattataaactagactatgccttatttatgaatttttattaagcaagggcttaattgagtagaaaaagaagatttaagatttatttgttaattaagagactttatagggtctaattaataaataaattaaataaaaattttatttaataattataattaattattaaatagattacaattaattattaaatagatagaattgatatttattgaattagagttaacatatgacatttgtgaaaaaaaagaagataagtttttaaataaatggcaaaattgaaacctatagggccacatatatagtcgaccacttaaaagaattattaagccattgttttatcttttttaattctatataatttaaattctaaccctagaagaaatcccataaatagataataataggctcttatactgataaccttgacaacataagcttatcacactagtttgtgagacaactcagaaaaataaagagcctctcttgaatttgaattcctttctctttcttcttcaaatttttgagtcttatagtgagttgattacttgcccacgcaattcaagtcaatattcaattatagtgtggaagattgtgaagaattctatcatctaaggagatccaggttcagatcttagtaatactctgtgacagaaaggaacaagggttagagatctgaacagaaaaaaccatcacatattctactgccaccaatgtaaagttttcttaaatattattttttatgatttttatgattttatttatagaaaatacggtcttttgatgtatttttatattgtattcttgttaatttattgttgattttttgtaacttgtattattttttgttgttatttggataatatttttttgtcatatttttttttgtactttttgtaattaattttcttattatttttgtattatttttataaaatatcgtacaaatataaaaaaataattgaacaaatataaaaaatttacaaaaaaaaattgtattttatataattactccattttttgttatttgtctttcttcaaaaaattataataaacttatttgtagactcaaagcccatgtatacatatcatctattttgtaaagaagttgtcaactcaaatacacttgtgataacactatgctagatttctacctcacaccatataagaaactaggttaacttacaaaaatattgttgaaggataaaaaataaatatattgaaataataattctgtcatttgaagaataaaaagctcaagaaattacagtgcttcacctgtagaatgaaggaaccgcataagattattcaataaaaaatattaattttattaaaaaaaaattaatttaagtgttatttctaaaagaaaatataataatatttaaaagttgttgttaattgtaattttagtttaaccgctctacttttaatttataatacttttatttttttagaaatatcatacacctttttatcaaataataataaaaatatgttttttagtaatgtaacagtatcacaatagtatttattttagaaacatatataaatattttatttttctattttattgtttaaaagaacaataataaaaatatataaattttttacaatatgtagattgagtaaaaaaatgatattgagaagattttgtttagatatataatgagtttaaatttgaattgcaatattaaaaatatataaataaatatataatcatatttaatataagataaaaaataaatatatataacgagtttaactttttgaattataatattttaattataaaagataagaaaaatatgtatagtaaatttaaatttaaactcattatatatgtattttgggattaacaacttgtcccaaattttagccggatagcctattttttgagcttggatgaacgaaaagtagaacaatttggctttgaatttatctcttttaacagcttcaataatgatatctccttcccccaccattgatcggagtcttagaattttcttgaagtaccagcttgaatcttgtttaaattcaacctcccaaaagttttgatcctttagatagatggcatctatccaacgcacccagagattgtcctgctttcttgatattgcccaaataaatttaattattagagcaatattttgtttcttaccctctctaaacccaaggccaccaaatttcttcgaaagacaaacttttcccatgatgggatgtgaagtttgcttcgattaccattagtactccaaagaaagtccccacaacacttgtcaatagccgctgtaatattttgagggagaacaaacaaactcatccaataatttctaaccccctaaagaacagagtgaaccaattgagcctttcatgcgaaagacaaattcttgcttgcccagttatgtaagttcttatgaattttgtcaatgataatcccataatcagctactctccattttgttggtctaagttgaacaccaaggtacttaaaggggaaggtaccctcatccattttcagcacattcaaaagctttcgcctgcaatcatcatgaacccctccaaagtataccgtagacttggatttgttggctacaagacctgtagaatcactaaagacttgaaaagcctcctgaataagctgaacataattttcattgcctctacagaagatgataagatcatctgcaaaataaaagttcacaagccctaaggtattacaaagcgaatgaaacccgaaaccctttattttagatttctgaataagcaatctagttagatactacataataagcacaaacatgaggggagacatcaggtctccttgacgaagacccttgtagcctcccattcatcaaaagagcataaaaggctccatgaagacaaattaatatccaagtaatgaacttggaggggaagcagagcccttttaacaactcagcaacaaagtaccaatgcaccgtgtcatacgccttgctcaaattgattttcattatgcatctagaagacacattcttctaagtgtaaccttttgagcaaatcctgcaagatcagtatattgtgagcaagctgcttgttcttaacaaacccaccttgattatcatgtattagactgggaagaacttttgagagtctagtacagatcaacttagatatgcatttatatactgtggtacaacatgcaataggtctatagtcattagcactttgaggattatcatttttggggatgagggagatagttgtctcatataattattttgggagtatcccattttggaagaatcccaagacttctcttgagatatcatctcctatctcatcccaaaggccttaaaaaaagccaacacaaaacccatccaaacctggacttttcgaagaatgaatcccgaaaagagctttaatcatatctatattattgaatggacgagagatttgcacttattggatcaagctcagtttattcccattatcaagacactcagactccattctccttgtagttgaactttgtttccccataaagctgcgaaagtggttgaggaagtgctcaacaactttagcataatcatccacaacagctccatctacgctataagagcagattctattctcagattttttttttcatgataacatggaagtagctggtattttcatccccagatctcaaccaataaatcttagaattttggtgaagatagttgtcctattgtttttgggcatccaaggactttatatgtagagttttttcttccttcatcgttgtagtacataaagggttcttggccaggttctcttgagcattacagtactcttctcttgctgatttgtatgtgctggtgacatcttcatgcttagtgacaaaataatcctttaagacatacttcactctaaacagctgctgagataaactcttcagatctgtgaccttctttctcctccaggtacttaaaacagtgtctttgtacccatctttgagcatccagtggttactaaatctaaacggtttagtaccacaattgctgatcttgacatgtttgataatacagtcactgtgatcacagagaaaccccccatctcaaacttgcttatgtattcagaaattggtctagccaactctcattagtaaacactctgtcaagcttcgagtgaattaagctcccctcctcatgcttatttgaccaagtaaagaaggagcccaaatacttaagctcttcaacttgtccttgggccaaccagtcttggctatcttgtatctcactgtcctttatccttctaccaccacatctatccttatacccaaacatggcattaaagtcacctaaaataatccacggttccttcaaatgcccaatactcgctaatttactccagagctccttccgtttatttagagagttactaccataaatagccatgaggtagaactcatctttgaacccaaccattttaagcttgcaatggaaaaattgtttgtcctccaagagcacatccactttaacaattttatctatccagatcaaaaaaatcctatacgaaatcacatgactagaatagtacttccagtccaagttattcaacaacaaactagaaatcttatcatggctgattttggtctcaaagagagccctaaaaccaactttattgattttacaactttcaaaaaactcacgatgcttctcttttttattcagccctctaacattccatccaagcatattgatgttctccattaatctgaattatcaagtgtagtaaccaatgccccctcagcctctttcaaagcatcatacccattactcacagtagcttcttgttgagttctaataactagcttggaacctttcctccttggagttagccaacccccacactctttaccatcatggacactaacactcttattttgatgtgtccgacttggttctgaattcctaacacagtcccctttttcttcattgttactatgattagtctcagctaagccctttttttgtcattctatcttgggtagatcatctacattttcctcatttttttgttggattatcccaggatttgaatcatttttcttaacatcattcttgtttttatccctttgctttttttcctccatgtaaattacagttagaaactatatggccaagcatgttacaagcagcacatttggttggcagccattcgtactcaacttgtttttctacaagttgcttcttctcatttacaaaagcaattgacctcggggttcatccttaatctcaacatccaccaaaactctaacaaatttgatcatagacctttctagagttactttacctgccattataggtttgccaatggtgctaacaagagaacttaggttcttctttccccagtactgaagacataaatcattcaacttgacccacactggaaccgatcttatcatctgagtagtatccatatcttcagaccaaggtctgagaattacaggtttcctatcaaactgtgtaacccctgtttcaaggatgatatacctagtaacttcatctttaaagttgaccaaagtaaatcccgattgcattctaactatcttttccacacccaaattccttcgaattctcttgagaaaa

SEQ ID NO: 25532 - DNA, 2997 bp, Cannabis sativa
  modified_base (27)..(30): a, c, t, g, unknown or other
  modified_base (1488)..(1495): a, c, t, g, unknown or other
actaatcagattgtaaagagttttatnnnnggcataaaacccaacaaaaactcctcaggtttacaaatgaagttcagttttaaagtttattgatgattatgattggtatgtcgacacagatgccacaaacatgttgcacatggaatggagcaccttgaatcctagatgtcatatcctggttcaaaagctctagtttttggcaatggtaagaaactccacatcacccatattggtaatgcctctttaccctcttctagatctcccttaaagttaacacagtcttaaaagttcctagcattactaagaaacttgccaatactttacaattcacaaatgataataatgtctttttgtaattacattcattttattgttttgtaaggacaaagccagatggattgttttgcttaaggggagattcaagaatggcttgtacacgttgtctcatcattcatttcccactccaaatgttcaactcagtgtcatctagccaccaacagcaccagttcagaaataactcctatatctcaatctgtttataactctgtagctaatctttgagctctaaacaattgtaatgaattgttaatgaataaagagattgttttttagtctcattttcttgtttccccttaagtgtttaatgcaaagaagactgattttaatttgtggcatgccaaacatggccatccaacacttaaaattctagccaaaattttatctcaactagacatattaagcaatttaaaggcactaaaattttgtgaggcatgtgaacaaggaaaaagtcattaattaacgtattctcattctgagtgtagagcatctcaaccacttaaatttgtccatacagacctacgggaactgctaactcaaaaatttagagtacacttctaagatacacccgctctctagattggctagaatgaaaaagtagttaagtaattataagagagagagagagagacaacaaatttatagtagttcactcatagttatggagttacgtctacttcaaatttttatttctcacgagatggtaattacaacaatagactaagtgtttgaagctccaaattctagagagagaagctctcacctatctaaacctagttttcattctttgtcagacaactagtaaatgagagctccttctatagtaatttcaaattctccttattgttcttcaacaaatttgagtctttggtgatagagtaccatgcccactcatagcaagtcaagtactcaatcatagtgcaaaagacggtggttaaccaaactgaaggatagaagatccaggtttagatcttgataatgctctgctgcagaaaggaatcaagggctagagatctgaatggaaggagagattattattttgctgccatcaatgtaaagttttctaaaatttatatgtgtttatttcattgtattaagaaattcatatttagggtgttagattatagttaataatcaaacatacatgttagnnnnnnnngatcctggtaaaataagttccaatggttctaatagtgaaaattagctcttagtgttgatggccattttctaaagcctagcgggttgcgctctacgtgttgatggccattttcgaaacaaaagttgaattgcataaatccgatcaaaagtaagtgagttatgactattttactgaaggcagctcatgacctagcgcataggttgacatccagctcccaagttgacatcccagcgcccaggttgacatatgacatcaacctagacaatgggtaagtgtaaaaacatccaaggaatgtactttaagatgtctaagggatattttgacatcacttagtctatttatgtgttctagcgaatctggtcatcagttctcgaagatgttgctattttgcaaaaatgaaagactcgaacctcttcatttccaagtgagctagaaatgagaaatgaaaacttgagaatttgattcccctgacttcatacatcatttccattgtgaaaaaatatatggacggtcaaattggcatcagattcagataagaaaaacccagcgcaccaggccttctgtcaacctgagtgttgggtacttactctcgagcttccgggatttgatttttgatatgtccaaggcttctaaacttgaggaaaaggtcttctaccctatttttgaccattctagattcaatggtcgcatcaaattttacatttgaacaattaaaggcagcatcctaggttgatcatcaccctgggcgttgggccaaacccttggtaaatttgggggctgggccctatttccagggacttaggattattgtttttccctgatttttcttgaatctttattatttctgatgacgaaaaaatgcccgtgacactttttattgaacttactgggcccagccccagctgtcaacctaggcgctaggtcccccttttaccactctgtaaattccatttggtccctgaaaatagttgaattttaatattttttgaaaacagagaagatgctcaaaagaattcctaaaaaaatccatttgaaacggcctagggccagccccaggtgttaacttgggcgctaggccctattatttatacctaagaattattgttttgttgaacttgctgggcccagcccctggtgtcaacctgggcgttgggtcccccttttacccctccataaattccatttggtcctcaaaaatagttgaattttagtattttctgaaaatggagaagatgctcaaaagaattcctgaaaaaactccatttgaaatggcacaggttgataaaatgtcagcctgggcgtagagccagccctaagtattaacctgggcactgggccctatttttagtacccaagaattgttgtttttcctccaagatgacctatttcccaattttaaatgaagacaaagaacatgtaaaagttggatctgcgatctgatacttggaaggctcctagattgattgattgtcaacctgggcgctgggtgctcggggccctgg

SEQ ID NO: 25533 - DNA, 3418 bp, Cannabis sativa
aacatttggaaccccataattctcaacacaaaggataaataatatataagaacaagaactatttccttcttgtaagtaaaacatcagaatatacaagatatgtcaatgaattcagacttaccccattcttgagcaactaacttagactttgctacaactgcatagcctaaaccgtttctatgcagttctgatgctacacagacgttgcttagatacgcccttgcaaaatcggctccaatcccctgtcaaaatgaacccctcacatgcttttgaatcaatggcttttattgattaacaactgaagctgaatttgcattttgttgtctttgtgtacaagtcagaatggtcaagaaaatgaaaattttcatctcatttttaaaataaaatctcctagaagaacagaaatatgaagggactacattaattttgttagacaacttcataatgcaacataaaaatcaacattctgaattttttgatgaaaaacattgtagatttgagttcgaaaatgatgagagtagaccactccagaaactacccttccaactcgataaccactagagtagtcgaaaataagttaaagcaatgaaatgtatgtttcacaataaacaacaacgacagacaacttaaagttgagcaaaaaattctattgcaaaattaacatgcctgaaaaatgaaaactaaattcatatactaataatatctagtctaatacctctggtcttcttcctgctatttcatctggaagtctcatacattggttaagatcaagggaacctattaccactcgttcttctccgtcatgagaaaactgcaaagagttataagaaaccgaatacatctgttaactcatagccaaaatctgcaacggcagttttcatcataaggataagctggttttgcaataatttccttataactctttcacaggaaacttaacatgaaaaatatatctaaaacaaagtagaattcgtgcatgatatcaaatccttaatgcctgtattacactatatgcaaacaatcttagctttgttccttcttgcattatgtctagccaaacaaaccttgcatgctgaacagaaatcttcagaaagatttgatatctgtgataatggaacagtagcatttatgcaagaaactcttttaaattcctccctctttccagcgattcgttcttttagtgcttcgaactcacgctccgccaagtgctttttgtgatcctaatgacacttgacaaggaaaatataccatcagcatatcacaatctctttcaataatcagaaaatgcttctctgctcatgtagagagattctctataacaaacacagcctagaattgcataatcatctttaaggtaactaaatattttatgcagaaaaagaaagagtaaacttaaaccattaaccatttatgaactttttttcttccatctgtttttcttttttcttttcaaaatgctacatctcaacaccctcccctgatgttaatcatccacaagcttagaaaaacaaaaaaatgcatccattttcttctaaacaacccaaatctttgatcaatcactcaaaaacaaaatacaaggtattagcttttctaaatcttagagcatctccaatcaagatacaaactggtaatgcattgttaaaatatggcttactttgcaaacaaattagctctaatagtgtcttaaaagttgtactaaatttagcacataacaaaagttgtgtcaaatttaacgcgcaatataacattatacaaaatctcatcacaataaatatttaatttttatatttactacttttattattttataattatatttagctatatactaataaaataaaatattattattggatactaggtggattattacaattagttagctatattctctaaaaattattgtctaagttatataggactcgatacttaattaggcggtataatatcggcggttgagctagtgttcattttagcttttctcaataaaatattaaaggagcattaatgaaaaattaaatcttgaattaatagtacaacaaagttatttttctttactaaagatagcacaatatagtcttaccataaataaaaaaaaatatatgaaaaaaaaaaaccagaaatgattaaaccattgttctttctaagaaaattactatcctagatatatatttcctgttgaaattttgcttcattttcctatttaagattaaaaaacaaagaattgactgtaatttggaaagtaatttaaaaaatatatacatgaaaataaagtgattatatggaagtaggaaaatgaataataacagaataaacagttaattttcctttccgagaaaaaaacaaaacaaaacaacaataatttaatttctctctccccatattttttctgagcaaccaaacagaaagaaagaaaaattataatataaagagcaaagagagactaacttcgatacgaaaagaggctgccttgaaatcataaaaggatcgaacacggagagaagcagtggcccagagctggtcctcggagaaagcctctgcgacggagacggcggagtggtcgatcgtgaagggaggaatggtctggttatcggtacagacggcgacgatagagccgagacgacggcggtggcggcaacgagcggcggaaggtaatgagatggtgagggaagaaggggttgttgtacaagtccatgatcggtttgggattgggagtggaggagttgaagaaagaagcgccattgttgttgttgaaaattaaacaaaatattatcctatttatttatctaacaaatagttatatatatttagactttttaaggctcacatttattcttttcttattttccacgttttttttttttgaaaatttatttatttatttattaatgacttatttattagtcacaataaatagttagatagaagacacccaccatgtgaatttgaatattgttaaatagaaaccaaacagaataagttttggtaattaggtaaatattctgtttgctgtgtgtgattatgtgtgattgatttgttgggtttttatatactaaactattattatgtaaatgttgtatttagtgtgattagaaacctctcaaaaaaagagtatataaatcttaatactaaaccatacaattataaggaagacggaaatataagtagacaaaaatattcttttaatgaaagacaaatatacttaacaccatgtttggtaaaagggggagaagaatggagggagagatagaggaattgaaaaattcctttgtttggcaacagaaaagaagggaaaggagagatggaggaatcaaaaaaaaatgggagaatcccaaaaaaaaaaacaaaaagaattataaaatgtttattttactttttaaaattaatatataattaagaataatgaatcggtcgagta

SEQ ID NO: 25534 - DNA, 2035 bp, Cannabis sativa
atacgtaatgaaagaaaaaaaaaactgtgttatctattatagtattacggttctgataataataataaaaaaaaaagtagaagatgttaaatatcattacaagactatctataggctgcatgtactatctagtttccattttctgttttttgataacatgagattgtaacttttgtcgtacgtgtctaattatgtatttatagtgttctacctctaaattattagacgagtttttgataggacttgctctcttgccaatgtaaagcagaaaatattattaaatatcaacttgctatatatcaatattcacttatgataaatcatgttgggaaacaaattaatgaatatcaactagctagttgcagagaaataataaattaattaatagtagaaaaataaatgagcataataagttttctttaatattgtcaccctgattttctcattggtccacttatgaaagctctagattaaagttcttgcatgctttgaatttcaagtgatcctttagtaaagtgtggcacgacttagaaaatatctagtatttttttttttttttgaaaagaacctcagttcaaacttcattaaaaacagagaaaacgggatccacagggggaaatccctcccctttacagcaaggaaaatcgctctcagataagcgagcactcttagcaagattatcaacaaaagctaagtaagtgcggttagtatgttgcattgttacatcagaaaggcttcgtttcatctttaaagcagaagagaaccaggaaatgcactgccagttgggatgtctctccttcttgaaggcatccaaaactactgcagagtctgaaaagataaccaagtcgtcccaattgttgtttgtggcccactgcagagcaatgaaccaagcaaaaacctcagctgccaccgcattctccccaacagcagactttgcctcataaaaccagtcatttgtgtcacgattccacgcgaggaaaccagcactaatctttcctttagagaacgatccgtccaccataatcagcttccttttttgggagccggtatagtccacttcagtacatatcctttccttctgaagaaccacttctccattctcttcatactggctgaattcaccatatttcttccaaactatgcttaatgagtcattgacgttgagattcggatctttaccatgccggcattcatttcgaaaaaaccataaggtatcaatgatcacagccagacaaaggaggaaacgataccttggttcaggttcaaggccagagcacaactcaataacaaaggacttgagagaatttgttgacaccatggaggatcggatggggacaggggacccaaaccataaggctacagcaaagggacattggacaaagatatgcagaggagattccatctcctttgaacaaaagcaacacaattgcattgctccgactttgtctcccgtgggcagagcacctgctattgcgcgccaaaggatcatcctcatccagggatgaaggttctccttccaaatccacttccacagaggctcaatgctcccaaaccgacttttttgacccattaaataggcctcttttacagtaaaaactcctctatttgcttccttccaaattaacagatcattgcccaactcctgagcaatctgaatgtgactaatccgcttacccaagtcctcaccaaataagaagcaaaggtagtttgtgttccatttcttttctcttcgatacatcaagtccgcaaccgaaagaagactaggagctttgcatcggatagactccatgagttctctaaagtcttcatagcttagccaagggatccacggttgataccatagattaattgactcccctgtggctatcaccatgcaagacccttgaagaatgacttgtcttgaatcaaggatacctctccaaataaaagaatctccattcttcttctggacagaccagaaggattctcgtggaaaatatctcgcttgaagagccacagcccacggtcttctatcaccagaagccaataaccaagc

SEQ ID NO: 25535 - DNA, 4272 bp, Cannabis sativa
atcctcatttgggaccacgtccttcaaacagatagtgagcccttcagcttcacttctagaaatctgctcttccagtcaccgagccagtattcatcggccttcacagcttttaaggcctctttagtagtaatgactacaatagcctccttcaccttgttaggatcctctctaagtgattcctgaacagtctccttcatagacattgggtcaatcatctaatgagaagcgatgaggcaaaccttttgaaggttctccgtagtcaccaactgagccacttgcaattccttagacaataagaaattgtaaaacatgatttttttcctccagttctggagtcaaggtgattggagaagataatctagaagatatgaaatgcacataagtatataacaaaaggaagaaaatgagaggtgaaatctaggaaaagaagaaacacttgttgtatgaaagtccaagctaaatgtggtgactatttttagcgggaagctgaaagtgtagaaccagtagtcctaaaagtcatgtgtatacttcgtggaactaacaggtcaagcttcacccttagaatggtactctagcttgtagaaacccaccttctctttatgacccctcatgggttgggacttaatcttataaaatataagatctccttcggcatcgatgcagacttgttatgctgagcacaaaagacatatcatccttacaaaagacagtaggggatgaattggaacggtgccactctagctacaacacaaaaattggcaaagtaacatcccaagaaaaggtgtgcacccatctccacatgggtgcaactctagatgccaaagaccccatccgtgcacttacttggcctctcattgtgaatggagagtctattccagtacaacaccaaaatggtttcaagcccacgttgggtctcatacttccttaagttgttatatatgctaaatttattgatgtgttggtccatctctaatggactatcattaaggaccaactttagagcctctttttgctccaaaatgtcctcttccatgtcaaacccatcttgttggatcttcttagacctgttctctataaaaagaagaaaaaaccaagtaattaactacccaaactacctaatacggaaagggaacaggggagtcctcccatgaactgcatggagaggtccccactagactcatcatccaaaaacaaaaacctttaggggtcattcattccagatggaaagttaggaacaatgaagagaaagaatggaatagacatcaacaaaatactcaaaatcaaaaggattttaagcataggaaaaatttgccaacattcttgctgcaaaatggttaaattttagaaattcctagcattggaatgtaaagacaatattgcctataatgcctaaatctaccaacaataacaattgcacagtgagaataccctaatttcactcaaagaagattgtaaaaatgcaatatgtagcaatcaatcgaaaaaaacactgccaaaatgcaagaaagtgaatcgatacataccttatagtggaagcaaatgcgccaagctaatcatcgctgggttttgttgaggaagttgagcacaccttttgcaaagacgacaggtgagggtgatcaatgaattaatctctacgttgaaatcgagagtcatagtttcctctagcatgaagctcttgactattgggggtggatggtttggaaactctcgagccctaatccttagtagaagttgaatgaaaaatttgatgtcacggtctagattgatttaggttgcttgcctctgggttaggttcaaactcttgaagaatggaaagaaaaaacataaagttttgaagcttgaaaattcaaaattaggggaaaagtggtaactggaaaccatcaagggcatttttactcgaaggggtaatccacgtgaagaggaatggatgatccatggtcatgtctccagaagcacaaatctcatttaacagttggggactctagttgtcaagcgtgtaaacgtaattaatgctctttggaatcgaggcgcagatcaatgatgaagattctattttttaattttgcaccaaaaagtgaacaaccgtcataataaaagcttttttggaaagtagctcctcaataaatgtacttttccaccactagacggctgccacatagacatactaagattaaagatggaagtaaccttccatgatcgagtaacaccttgaaagtcatataacattacttttatcttccacatgtccacactaatggaatgacgcaagcttccaccatacactacattttggaagcttgaggggtaaatgttatccatgtttcctgcaagcgacatgtggaatcttggtcagtatcaaaggtccaccagtgtgtcccaagtaagataagttgggccaagcctaaattaaataggacctcttaggaacgtgccttagcttcatgatcagatgatcttccgcaagtgatagctcgtatccaaatgaagctacaacactatgataccaaaagggttagacagtgtgttcctggaagacccgtttggtttcctttttcatttctacacacaaataaggaaataaatgcacccaaaatcttgacataagattgtatcaagataaatgggaaactttctaaataaagatcaagcaattaattcacaattaattgcacataattgtaggatacaattttgaccgattcaactatatctaatcttcctagtcagtagatcatctccttcgtgggttggacttttcctagtcagtagatcatctccttcgtgggttggacttcacaagatagcctaagttataattcaatgtaaacttcccaatagaaggaaaaggaaaactaagtgtaattctctgaatactataaatacccaatgactccttcagattaagggttgaattgtctggcaatatttgttctaaaaaacttgagaacttatgctcattgtattcccaaaggcatttttagcttaaagttacataataacattgacttgtggactaaggatcgttaacgctctaaccacttaaaaattatttgtgttgtttttactctttcttttttaattatttatttcttaagtttaaattatttataattggctttcaaaatttatgtaaacagaattgatttcaaatagaaataattcttgagggaaaatagtaattttgtataaattattattttgaatagttatgtcaattatgaattgaataattaaaatagaatttaaccatttaattttatttgataaaactatattaattatttatatacaatattatttagaaaagcttattattttagtaaaaaataataattatttaatccaagttacataagagattaatgagatctaatcaataattatttattataaacaaggcaactaagcttattatgtattatacttattgttaacgcatatttttgttaacctaatatatgaaccttttacgtaataaatatactacagaattaatgataacaataaatgaacaccaaatattttaacttgtttttgtagttaaaatctacatactcaatgcatccatcttattaggaatgataatctggatacagagtataattctctcaatcaatataatagataactttttctcttaaatttctcatcccttttaccctagattcttcccctatttataggtgtatagggtgatagttattttctttaggatctaatcattcataactactcatgaaacgtgaacattccccacgttttatttttatgtacgtgaaataatatttaataactacccaactactcttttatctttgtccttaaacggttatgctgactacgcaggttgtttctcactatgtacaagttgtccttcttttccatctttgtaagaaaaaatgctaagtatagatacaattctccttgcaatactcttttcctacgatggtattagcgaggtggttacttctacgtataaatggcgagatggatgaaagtagttattctctccatgtcacatatgtggatcaattagttgcaagctcttattccgaagtatgtggtgttgggttttgtgccctaactaaaacttattttaatagaatcaaattttataattaataaaagatcagaaattgtttttatgtttcacaatatttatttcataattatatttaaggtataaattctattaagtctagaaaatatatatatatatattgttcaccattatagtgttgtcagcacagtggaatataattatgactatat

SEQ ID NO: 25536 - DNA, 1159 bp, Cannabis sativa
tcatgtttagtagtttagtatagaataaatatgcatgttttggccatcttttttatttgttcttggaaataggatctactggatgaccctgccataataagcgccatagatgaggagactgaattcaatgctttggtggtatgtcgctattatctctattctcagtggacttctatgttaaaagtgacagtcttgccaaattgagtttgtctttgtcattattgtaggaagaggaagctgctctacttgattctttgttagggaaagaataatagtgtaaagtaagaagagctgcccaggggtgtctggactggccatttatatggctgtaaatgtggggaagaacttgaaatcttgcaccattagatgccgttagcagcatgttttatttggtgtatatggtaaattttgtttccatgtttaatacgcgaggacttcactctactgagtgtactcaatatcagttttaggcatttttattagtattagtgtaatagtaacgatgtttgaatttgaaatagtgggccaatgatatgtttttattaattatttcataaatacccaaaaataacaaaaaaagttaagaggctggttggctttacagtttaaaaactgttttcagttttttaaaactaaaaacagtttttaaaaactattaggagttgtttggtaaaaattttaaaaactattttttaaaaattgacttttagaaactagaaaacagaaaacatcaaaagttgttttcaattttcaaaaacaatttattttttttgtctaacatattatattttatattttgctcacatactcagatcctagatccgaaaccatacctgaacctagactcggatgggttaatgtcattgtatggtgctaaaatattgatttttttttcgtaagaaaaaaaatctaaaaacagtttttaaaaatttgtgctaaaccccattaaatttttaaaatgacaatttttttttttctattctcacttttaaaaacacaaatttaaaaactgaaaactgaaaacaagctctaatgttttaaggattttttttttcttaccttccgtttttaagctgcataattttcttaaacattattctccaaatcacaatctctctctacgattttgatagaccacctatcacttatgtttatgctc

SEQ ID NO: 25537 - DNA, 1647 bp, Cannabis sativa
  modified_base (190)..(190): a, c, t, g, unknown or other
aaaattgtatgttttgtagtagtgatttctatttctatattttcattgcttcctatcaacataatcttcaggtatttcttgttcttattttatttatgttttattttgttacagacagtcataccatccgtttatatatggcatatatatctattctatataaagtatgcctatataactgaattcttgntttatgagaaatttatgggtaatttttttttatatataataaaataaaaataaaataaattcaaaaaatacgattgtgtgactttttaatatatctccatgcccacgattttttttttatctctcaattttttccatccacttgattccaagagtaacctcttctaattatttttcaatttactatgattttgaactacaatgtgttagcaatttatatcgtcagtctacaattggctaatcattatgtaatattctttaatttttttttaatgttggcattttagatatctaatggctaatcattatgtgtatattctttacttttcgattgaataaaacttttaattagaagaattatgcataaatatactggatcaataagaattatgctaatttttgctaatatactgatggatgttgcccacaacgcagtccgtaatgacccaagaatcaactggctctgcaaccctgttcagagcttcgtggtcttacctctgcaggcaagaaattcagaggtcttcgtggaaagggacacaagaaccacaagtatcgaccttcccccagggcaacctggaagaaaaacaacactgtctctcttccccgttaccgggtcattttcaggataattgtttcgagaacgttgtagttgctattgtgtttgaaattttggagattgatataatacttgagtcacgtttcatttgaaaaaaaaaatggatatatatgtaatatcaatatacttgtgaaagaatgtatatattaccctgttttgaagtttttatcgttggagcttcgcttacagagtatatatataaatatatacttatatatagataggtcataagtgattattttttattttttggactgaaaatggagagattgatagcctttgtactaatgtttagtcaataatttcttccaccaatatatagttacgttaatttttattgtttcttttgagaattgaattgtttgttaatttttttagaaagcccccatgttctggcgactttaaaagagtctctgtagagttgaggatccctcccaaccttggcctactataagtttgagttttcccatatcaaattctctttagacattgattttagtttactattattttacatgaaaagatgtttttgtttgcttttaaattaattcaatcaattggtaggattttgaatgtagttgtactcacttttcaagtttaatttgtgagtggatcctttaactctgatatttacgtttagattgtgaaaatcggtcatgatgaaaatcaaggagttttttttttttgtttttttttaagtaatagcttaatttatttatttatttttttttatttttaatgatggaagtcattagattttttccatacttttcattttcaacttttcataattttaatttgagtttacttaatgatcctaatagttcttatttttttttttt

SEQ ID NO: 25538 - DNA, 2568 bp, Cannabis sativa
  modified_base (2416)..(2422): a, c, t, g, unknown or other
  modified_base (2493)..(2516): a, c, t, g, unknown or other
taaaataaattccaacatttatatctattgataatttctatactctcacatattttcttacatgtcattctgtatgtgaaaataccatcactatagatatttttaaaaatcttgctcaacattcttgtacaaaatataatgatataaggtatcattttattaagaaacttgttgacaactaaacattgcagttggaatatgttgatattgaaaaataattggttgatatttttactaaggccctatattcaagtcagtttggctgcctcaagaaatctttgggagtttccactgcttaattcttttcatttggttctctatttggtacaaaaattttaagtagttcttatcttgcatctatctttgtttcattcttggttgacaaagcatcttaatagttttggatgataattagcttagtgtcttatactcctaatacttttgaggttgggttaaaagattcaagttacttgcctatctgtgacctggataaattaaagtattaatgtatagagttgagcaatttttatttcaatttcttgtcaggccccttgctggaatagagcgacctatactgaagtgtgaaagccatattttgagtaagctggaactttgtaattaggagttacgaagatgatgtactatcatagaaaatggctaccttcagtatggtatgaaaacatccacttgcgaaatcaaaatgaaagagatgcaaaataaaaatcatgtgaaggacaatgatcctatttttaactacacacactactgtctgacaagtgtgtacaagtttgtaagtcttcccttttcaaataataaaaaaatcatgattcatataatatgtcatgtaacttgtttatttttttcacaacatatggtaagtatggtttgtatttgagacactgagtttttattatctttaaagcataacatgattattatcctttctatgaaacatggaaacatacatgcattagaataacttgattttatgtataaaatattttagtttcttatctcttttttattttaaaaaaaatgatattaaaaaaataataaaaaaaagggggaagtcgtgtgacatgacttataggcgatttttttttttcaattgtctttctttcggtaagtgttgatttattttttgtttagtaaaattttgatgagtttccttttataaatgatcccttattaattgtgttttatgagattattggccttgttttttttttttttctatttcagcacttattacaaatgttgctgggaaatcttatttaattgctcatttgtttcttttttcattattttttccctcttattctcatgtggcctcattaaaaaattttaaaaaagaaatttttttttctacaaggaacggtttctttgaaagttagtcgacaccttgatttcttctttacgttctttggcctttgagataaacaaaaagggagagtagtaggttttaagtttttggtttgtgtgttcaactcggccctttttccagggggagttgagtttggtttatgtgttaaacttttgttaaagaagttagcacagtattttgtgttattggtgtgtttttcagtgagagttttatttctatgattttgctaactttattttgcaggtatttaaacattaaaaaataatttgattattgaaagtgccaaaggaggagattgttaggtcctttttttggcaatttagttgtaaaaatattatttaatttttatagtgcaagtaaattagtttcttgtgttaatttcatgtttttgattgctcttttccttttagaaaagttttatttacagttactttttttggtttaggttacttcttgtaagagaaaaaattatttttatggaaagttttctatttttagaaaaattgattttccctttttctaattgttaaatttatatttgccatgtttattgaagatcaaataatctttatttggcaggtattgaagatcaaatcgtgatcttggtcctaattcgaaagtttctagtttggtgatgcagcagaaatcaatcttgatgctgcaaatcagggacttttttaagaatgttttatagatagctttgaaaacgtgtttgtggctatctctagggcttctatattctataaataggacctagaagccaaacgtttctcatttcttctagtcttatattttaaaatctatttttgtgaaaagagtactgtttcatttgtaaaaacttagagtgttcaactaggttttagttttcttgttatgatatcgtactactcatagaataggttgcagggaagctttgaacaagtgtagggttttaggagaagacttgatttctaagtctcattttgagaggaaacgagcatatatctttgagagaatatttgtttaaatcttactttggaaggaagtaagcannnnnnntagctgaagggagttcactactttatgtggttctgagatcagatgagcaatgtaaagaccgcttagtttannnnnnnnnnnnnnnnnnnnnnnngtttaattatgaaattatttagatcggaagagcgtcgtgtagggaaagagtg

SEQ ID NO: 25539 - DNA, 3077 bp, Cannabis sativa
  modified_base (452)..(452): a, c, t, g, unknown or other
tgatagaataaaatattgcacagtttcaacaacatactcatgttgcacctaacttctttttctccaaattcttaaaacatctaaggagaaactccttaatatcataattaccatttgcaagataaaattgtttaaaagaagactttctccacatacaaatctagcaatggaacactctaagagggcatgagagatagactccagtttacaagagtaaagagagcaagtagggttatctaagactttcatcttgtagaggttcaaagtaaaaggcaggacatgattgaaagttttctaaatgaaatgcttgatttttggggtgggggatcatcaatgtccaaataatttttcactagcttttaaaacatgaaggattggaagaagagggagaaggggaataggaagaggacttagccaagtggtaagtagaatttatagttaaaatacttgangaatgatgcacccaaatgagactatcagtagaagaaagatcaattgggacttgaagaatagcatccacaacatcaagaggaaagaaaagattaagtttagtgatatcccaacatctagcctcatcaataaagacagacatagtaagggtaggagagggaggaccattcaaaaaactgggggagttcaaatgaggaatccaatttgagttgacagcaaaaatatatttacgttgcccactttccaacaaaggcctttgagaagcagatctcttccccaaaggagactcctccaagtagccgaggagtaatggccttttgaagtagtgaggaagtcatttcatttaaagtatttagcctttaaaagtgaagacaagagagaagagggattggacatgactctccaagcctgctttgcaaccatggcctgattatgatggtgaatagatctaacacccaggctcataaagaactttgaatcacaaacctttgatcaccctttctaatgaatttttcctttcttgctcgctgcccccaccagaaactagccataaggctctcaagactcttagaagtggacacgtgtaatttgaaatagaacatggcatacgaaggaacaacctagaccacaaccttaatcagagtttttttaccaacctaagaaaaaaaaccatggaagagccgcgtatccagaccacatcaactttccattccaagcattcattttagaagaaacattttgaatcgtgtaatgaaagatagatttgctaattctacaaatacattggggaactcctaagcactttctaacaagccatcattgcaaagactcaactagccacagaaaaactctctatccctagaactagtgttggggaagacagaacagaggacttggcaaaattaactacctgactagtaccacgcttataaacatcaaaaatttcgttgataaccaaacaagacttgttactaacagtagtaaatagaaggttatcatcaataaaaggcaagagtgagatatcaggggtagttctacaaatagaaataccagcaaaatccttagcttgctctcggacacgaatggctgctaaaagaccctcagccaccagtaaaaataagtagctaaggggacaaggggtcaccttgcctaatactcctagtagaaatagaactataaaaaacacactcgttaatgagaaatttaaagaaaatcaaggaaatacacttaataatattggaaacaaaacgagaagggaaacttaaatgatatagaatagcttcaattaagcttcactctaccatgccagaggccttctccatgtcaagcttcaaggcaggccaaccaattgtcccttcttcctatgatagagagcattaacaacctcattagtaataaaaatattataaagaatcagacagtccaaaaggaaagcactttaattttgagcaattagagtgttctagagaagcttaatcctgttggataaacccttggtaactactttataaagagcagaacacaaattaataggcctaaagtcaccaattttagaggcatcctttttcttaggaacaagaccaatgacagtatcattaattaaagagacctcagactcattagtaaggacaaccaagatagccttacaaaactcaggacccaaaactgaccaatttttttttgataaaaatgagcatttaaagcatctatctcggagcatttaaagcctccttcacctcagcttcctcaaaaggggcttcaagcaaagaaacctgagagggattaagtctacaagagatcccagtcaaaatagcagaaatggcatcccagtcagctcattgagatgtaaaaagattactataagagttaatagtatcactaacatagatgccatcatcaagagtaatgtaccttatgaagttagttttcatcctagcagagactttatgaaagcacttagtgttcttatcaccggtatttaagttagttagccctagaacgttgcttccaataaatctcatctttgtacgaagctagaggtagctttgttaattataggttctcttaatgtatttattttactttacttataaaattaaacaaaaatcatttcataataaaattcatatttttttaataaaaaattgaattatttcaaagtttttttgatagaaaaaagacataaattttcaaacatgtcccattattgttgccctgttataaaatcagcacaaattaacaatattgaacatatgatatataattggcttttattttaggtaaaaagtttgttcaacactttttcttttctcatttatttttagttaaacccttacaaaattacgaagaaaggagaattacttcatatactattttttaatatatttttttaaaaaaatttacagtttggagtgatagtttattctgttgttggttgctatgtgagtttttacttgaatttctgtaaaaatgttaaaaaaaaataataaaaaaaataaaaaacctatttttaaagtgtaaaaataaagaaaaaaacctaaaaaaaataaaccgtcttccaaccacttatttgcattaatattttgttctaataaagtcttattcaatgattttttttttttaaaaaa

SEQ ID NO: 25540 - DNA, 4792 bp, Cannabis sativa
  modified_base (4754)..(4766): a, c, t, g, unknown or other
gcttgcaagactcatgaagaaactatttcccatgccctctttgactgtcccagggccaaggcagtttgggagagaacttcttttaagcagttttataaaaataaaaggcagtgtaatattagagagtttctctttcgaggttttgattatcacctggcttatttggacaaaaaaaatgaattgcttttctagaaaaaaaccttattgttttaatgatttggaattctatgctcacacctatttgcaggattattttctatcacaacactcgcaggatacaatttcttctaccgaggggattgcgactaccccgaccatgagcgaatcaaccactgatatagctcataaccactcccagatgtcctatggagaatactgtcttaatgttgatgcagccctagacttcaaaaaatatcgtacaggcttgggtgtagtgatcagagactggaatggtagcttagttacaactctctcttcaccaaaatcgggagcttcatctaccatctttgtcgaaggacaagccctgctccgtggcctcacctggtgttctgccataagaatccctttgaagcacattgaatctgattgtcttcaacttgtcacaaagattaataaatttagtgcagaccgatcaactctttcaggcttcataaatagaatcattcagtccttatctacctttcttaaagcctctcttcagcacgttccactgaccctaaacacattggcacataatgaagcttgagatgctttacactatgataaggatcgtatcaggagagtttgatgactctcttgtttcaagttgtaattgtatctttgtttctaccctttctttgtgtcgggttgttacaattactacttaaaaaaattatccatgtttgtccaataaaatttggtgtacatccttgttgtgaaacacatttctaaaccaaaatacattacaagtaaaaatttatagagcaaaaatacaaatattgattctacaattttgattgtgtttaatctttaaaagattttgtcctataattgaatcttctttcttctttcacttttaataaagaacctgtcttccatcaacttaattgtacgtacatactactagtggctgaatttttgttgtctatttctgattagaggcgcctttttgattgggaacttaataataataaagttttccacacaaatatttctcaatttaaacaccacttttcttagtctagagatgtcgaaacaaaaccaaaaggtctttaccaatttcgatcagttttctataatatcatatacaagtaaaatgttttattatgattaatattgttgcttttgttttttcttttcacaatttaatttttctttacccttttcgataggaagcaacaaagggcatattcagctagtttgaaacaaaattatatgtaatttctttgagggattaataacagtatgcactgaaatattaaacacaataatatataataatgtttcgagacataatttaattttcatgcacacatcataaatagtggaaaaaatagtgaacgatatggctcctcttaatatcaaccaaagaggtctatttttgagatgtggtcctaaatgattcacttgggcttgtcatggctttgttttgtagtttgaaaaggagcctatgcatatttgatagcttataggacttttttctttctttctttttttttttttaaaaaaaaaaacaaaggttatatgacattgtaatatgaggtgtttgtagaattttcttttgaactctaattttaatgattgatgtgtgtacatattatttaactaatttatatcttaaacttattatttaaaatttataatattaatatgttaaatattgagattgcaatagaaaaaaagagatatgagatgagataagaaaagtattaattttttttaattggaattttaaatatggataacatattgaaaacgattttcaaaaatatggaaattaaaataaattacaaaaatatagaagagcatgatgctatataaggtttacttttttgtaaacaaaatttagaaagaattattttattaacaccccaaattttataatttctctccgtacaagtaatggggatggattttttgccccgtaccaatgtcagagtacgaccttgatggtggtagatcacagtggtggtgcaaaccctttgtggtgtcctgagtgttttcaccttcactcttgcaatgatgaattgcatatttggctttgcaatattttcagatttaacattttactttttagattgtgcatgccctgaactcttttgtgaaagttttttgcttggtggtgttaggtactcatttgagttttctctctatttttttttatttgcttcaatagagaatctttcaagaacttctaatgatgctaccttggttgaagaaactatggaggagattgagatgttttgcaagatgacttaacctctagattgaactggatgaactaattacgaataacacgatagtcaagtccatcttgggttatttctttgctaaacagaaggtctctaatggtactctgaggagaatgctttctgggatgcagaattcgttcaaggcttggctcttacaagaagtgatatgaagtcaaaaattctttgtgtttcaacttcagaaagctaatgaagctcgtgctattctcaggttggctccttggtctccttgtgatggatccatgcttgttttcttgatacctgacgatggtagatggcattctgttgacttgaatgccacgacaatctgggttcgggccttatgggtcttactcaatttatgactgatgtgggggctattgtcatggctaatcgtgtggggaactgcctctatgcttgtcctactataaaaggtgggatccttattaatgaatatctcatattcatggtatagattagtttggaggctccttttatggataacacttttcttttggatgagagccaaaagagagtttgggtgtattttaactatgaacgactttcctatttttcatcaagtgtggttggattggtcatgaagagtctctatgttctgtgaaaaagagaatgctaagtcttgatgatgatttttcagtcccgctacatgtttcttggctttggttgagtgctcgtattgagaatagattttctgctcttggtgcagaggaatttttactcgtgttctgatggaaagaggccagaggagcaaacaggtttcccccacccattctcggatggaatctgctttggtgggaatgctactaatgggtgaggctaatgcagaggagataatgtgtcaaaatttagaaactgggtaccgcagggaggctgagggaatgattgagaagggttattttttttttgctacaaaaaacttgaagaggaaaggtactgagcgaagggatagcaggacggtgttggttagggaccatagcttttctgtccggcgacctttaggtgctccggcgggactgtgtcctatcatcaataagatctatgagtattgggccccaagccctttggtctttttggcctcttcttcgaaggatatgccaaaataatgtggtcggcccaaaacaaaaatcatttatttggttaggcctaaaggtgtttctactaagactagttttgttcttaagatcccctcagatgggccgaatctaggaatcaaaaggaagatatgtaatggaacatgttacacatatatgcaatacatcttaaatagtttgctaaaagtaaaagcttacggaaccgtgagttgagctcaaaactgggcttgattggacatatcttgacggtctttaatgaataacctggtggctttgataccaaactgtaatgcctgtattttaaagtttgcaaatttgaagataatcttattatattatatttatataacctcgtaaactgggatcccaagtttaaaacacagttgaaaacacatttactaaatataaagtttcgtaatattttctttttacaaactatagggcagttacaaaatataattcaaaatgttgtagaccgaaaccctccaggttgcactgttgcgatatgtacaatccttgccaaggctcaactcactgctcctcaagctttgctttacccttacctacaaaaggtagcaaactgatgagtcaaccgaatcagtaagatatgcataacatatatatataagcaatgctataccggctttatgcttaagccgtcctaagcccaattgttaagctcaccaaatgattaagaacgttctcaacggaagtacgaccagtgttccatatgcactagagcactgactccgtactcgtgttggtaggtccattattatactttcgggagttactaagtgttgtaccacatgcacgacgtaccccctggtactcgtgttggtaacattgtaattatcctaaaaccccacactgtactaacacccttataaatacacatttagcaatgctagtagtgtaaacatataataacatgcattcattcacatatacatactttatgctatcttacttcgtttctaggttcaggtgtaccggtcagcctgagtggaactgcagctcgacgctttacagggccctaaaccacaatattcgaaattccgatgagagacacgcaaaaacacttatcggggacttaaaatcacaactaggaatagccctatcgatgaatgacttggaaacaacctaataacacaaaaatgggaaaaactagcactacaaaaaactgctacttttnnnnnnnnnnnnntagtcacaatataattttttttgtga

SEQ ID NO: 25541 - DNA, 11147 bp, Cannabis sativa
tttgtcaaatatttttgggatcccgaaacatgtaaattttgtttgtaaagttaaaattattacaagtttattttcactctattttcgtttaaagtttaatttcccacgcttgttttattaaagatctgaatttaagggattagggttctttgatcatcttgggtaccgtgcctaagagttagggcgttacaatatccttggccaggattgccaagagtgtagcctagatggaacagacccttcgacaatgcttggcatgaggaggcactgttgagaatgcccttgtgttgtttagcttcgtagaataggactttcctaggtgtacctaaccaccgcctgtgcccagagacaagggtaaggttgctgcctctaaagatagttctaagaattcctcttctgaggatgataggattccggattgtcttctagatggaagtaactttcttaattttacttccaattagtacagataacttatattataactttgttttttttcctttttgtaaatataacttctacgatgagaaacgtggcagggggaccttcagatggctcctcttctggacgcccccagaccaaggtggcctagaccaccagatcttctaatgtgactcaatccatcttacctcccgctcctcccggtcatactctggccaatcaactagtaaacgtggaccctccatcgaggagcaccccaccctctcataggccctcaagcaaaagggctcagaggcctagtcgagtgccttcgtccaaggctgagaaggcgattgaggtttcccaaaactaccttggcaaaagttttccatgcgttgatgaggtgctccaagagttagatgttcaggccctggattacttgacatcaagcactctctgagacttttcatctgtaagttgttaatttgcttaactatgtgtatgcaagtcttttttacagcttcactaacttcgtttctctttggttttagggtattccaaagctcaaacatgatcacgctcggggtaagggctctgccacgactctcaagaaataacttgagggaaagaagctgaactcaaggcaaagaaagattctcgtacaaaggtgcaagatgagctgcactcggcatcgacttgcttcaaaaaactttaggaccaatacgatggcctgaatcagctacttggtctttgcaaccaagaggtgaccaagctaatcgctgagacctccaaattggaaaaggaacttgcaaaggagcacaagcagaaggaggaagcccttgatgggtaagaggccatcaaggatgaatacattggcttatccttagaggttctttacaaggtctatctgaacaacccaataaaccaatgtcaacctaaagtatattgagttgccattttgtgagagtttacataatggagggagggagctttataagagtagacttctagaggagtaagctagccaagatgttgaggtgatggcttgccaaaccatagaggtatcaatcggctaacctatgaagactatggttggcccacctgtatagatagtggtcggacatgctattgagttagtggccagctaggctactgagataatgacctgccagcctgttcaaaatcaggttgtagtgccttttcagaggcttcactcgtccaagctgatgttgatgcctaggttccagccagcctaaattcgtctactcatgctgttacccttaatgatgtttagaaactattagttttttaatccttttattttgtgcactattattttgttcttgcatggcttgtaggtcctttactttcgaacaatgtttgtatatggccttaaggccttttactttggatagatgaccagccaggcgatctttaatccctactttatcttcttttattgaacataagtgtctatacttactttttcatgtttaatctgaagtatgtcatttgtacttaattaccttttaatttcttacttataaaagctttaaattttgctcaagtatagctgtgtgtattcagtgcgtgtatggtgtgggtgcccccaaagtgatcaagcagacttaaggtctcttggtcacttgcaatacactaagtactatagacctttgtctgtgtatttttttggagagacccatttgtacgcatatagaacaaaaattaaagactaattttaagaacttaccttgttagcaagttgtttgacacaatattgaacagaaacgccatttttattcattaactgatcttaaatattagttttttttgttgtccaacgtacattttttttttattataaaagcttacaaaataaaatgcttgcttttagaactcattctatggctacccctacctgacatgccaggtaggggccatcattgaagagtgagggatacttagctctttcaaaactagctcttataagtgaggtgtacaaaaatataattgaagagcagcgttcttacaagtttgtcattgatagtactttctaagatcccatttccaatatcttggtaggagaactaacaccacgttcttattgtacctacccagcttctatgcacctttgtttgtcatctctgtaacatggtatgggctttcccagttcggcccaaacactcctgctgtagaatctttggtattcaggaacactctttagagcgctaagtctccgacaaagaatttttttccttaacttgtttgttaaagtacatggcaaccttctattggtatgaatgcaatttaagattgacttggtctcttctttcttctatttagtcaaggaactcttctagcatggtgttgtttacctcttgttcatagattatcctcctatgggatggcagttacagttttgtaggcaatattgcttcatagtcataagctaatgtaaatggtgtttgccaggtggccttcttctcggtggccttgtgtgaccaaatctaagagtaattcaggccaacttccttttgcctcttcaagacacttttgcaaagtttccttcaggttcttgtttacaacttccacctacccattcatttgagtatgaacaactgtggagaaacttttaatgatgtcgtgtctgttgcagaatttagtgaacatgtctgtaaagaccgcttaattttagtatgagaataagtggataagtggataattagggtttaatttggaattagacttttaattatgatttgtgaatttgtggtgagacctttgaatttaggtgtgttatttatgttatgtatgaaatttcatgtttttcatattttatgcccggtaacagtggaacgcaacatttggccagtagagtcaaatttccttacgatttattattttagtaatagtggggaaaattagatagacatttggaatgtcaggaataattgtcgtcttagatttgactgaaattgccctaggtggcaaggctgctcttgggcttaggtaagggaaaattggtcttttgccatatgaattcttcgtcctttagtggagttatattatgttttataatctaaaatttattaaaataagttagataaacactacaataattcatttattctaaattagaaaaattagacaaattgaactctctctctctctcgaccaccttagagaaaccaaaagaaagatagggtttcggctccatttttttgtgtcttagtaagatttcggtgcttccaattcaaggtaaaactccctagctcacttctctttgtttattaagttataagttaggtttttatgcttgatttttggagttagggttctgtaggttttagagatgtttgattttgtattgagaggatggtttgttgttatttgagctgttttaggtctgaattgtggggtttttttgtgtttgagcaaagtttgaactttaagagctcaaacttttctctctcattgtgatttttgtttaagaggtgtttatttagttcttttgcttggattatgtttattctggccctattaggtacactggaaagtttgggatgatttggggttgaattgaactgtttagaaggttttggggattcctataatgaatcggtcaacaagttcagtatggacctgtcagaacaagaattccggttcatccccaagaagaccccatagaatcggtttttaggttgggaactagtcaacagtttagggcaccctagattctactattcttatgatatttggggtatttccatgttatccattgatagggaaacttttagatttgagtttaagtccccaaaaagtgatttagcgcgtcactcatctgttttacgaatattgtgacttaggggcctgtaaatcatcgagcagcagttccactcaagttgatcaacatacctgaattcagaaatgcgataaggttagtataatgataggcatatatgattacatgtttagcatgcatatttataaagcctattagattacattaatagaagtgtcaatatacgtagagttttactggatactgataaatgtatatttggctcaagtatttttttaacgctatcacatcggtacgactaaagtaccgagtataggctgatactatggtcaatagcactgtcgtacaaatgttctagactgagtagcgcatgggacgcggggataggattatggttgggtgtatgggcgcctaattctaattcaggttttatttatgattatgattatgctttacttactgagtctgtcaatgcacagttattgtttgcatgtgtatgtaagggcaaagctaaggctgagtagcactgagtgcgagcggatgaagattgtacatgttggggcagttaggcctagagcgtacgatcttttcgatagcaggtagtattttgtatagtcgctaggcaacaacttttgtattgagtattttgtatcagagctattattattttaaacacgagatcccggttatataaaagttatttgttttcagtttaatagtaattaagtaaagttttaaattatcatgatttttaataaacccgctgatcaacaacggatcacacaagtaatataaaataactgtaacaagcttaacctagtagggtgttaaaatttagtatcagagccgccagtttgtcttttgaagatcatcacagcatgtacaatcatcatcagacataagctagactcatgattctatcagccttgattgctttagtagtttgctttattagtatgttataagaaaaagcctgataggaagcatgttgtagcctaatagttgaataggtgcatgttttattttctaaaataagcagtacttagtaaattatttttgatcgcgatctgaccaggctagctcatggtttcacagggagttctattagaatggatgtcaggccaaaaacgtaaagactgggaaatttggtcaaatccagtgacggtcaaggagttcagtttccctcgaacatttgtggccgaggcagaggcccaaaaggcagggcatgcggtcagggagatgttaacccactatataatgcctgtgattgggaaaacatttttgtagcaatgcaagccagaatcaatgaacaagataaagagattagacgtctaaggcagcaaggtactcctgcagtgcctactcctaaaatgcaggtggcccttacccctgctgtgcaggtagctccagttgctgttttgaaccggatggagccactatagaaaaggttctgcaagcaggcaccttcagtctttctgggaggtccagatgtgatgcaagccaagtagtggctgactattatgacatggattctgaattttatgggagtcactggcaatgatagagtgccttgggccacattccaattccaagaggattccctagtctggtggggtatggtagctcctattcggaatgtcactaccattacctaggaagagtatcaagagctatttaatgcgaagtattataacgaggtagtctaaagtgcaaagagaaaataattcactgaactgacttagaaagagaatatgaatgttacagtgtatacaacctagtttgatagattagctaggttggcctcgagaattgtgccaaccgacttcagtaagaaagaaaagtatatggatggaccaaaccctaaaatcaaacacaacatgatgatcacgatcgatgataacactacccatactgatatggtgggaaaagtattgcgagctgagggcacagttgagtgcatccagaagtctctagggactcaggttattggtggagtcattgctcctcctacctcgggttatggtagtagtgactcgaccattgatcaaaagagaaaggcaccatttgcacctggtggcccgagttagaataagaggttttgggggaaccaaggtcgtggtaaccataagggtggttttaaaacccaatacacttacctagaatgtaccaactgtacgtaagaagcatcatctgggtgagagtaaagggcaaatattttttcagtgtggtttgcctagacactacaagagagattgcccacaactcaagaaagaaaagtagaagagagaagcaaaacccgctccagcaagggtgttttctcttactcaatcaaatgtagaagctaaccccttagctgttacaggttagctgtagatcaacaactcttatttctctgtgttatttgattttggggccactccttcatatgcggcgaccaaatttttgataaatttgatagaccgtttgatagttatgataaggggtttggaaccctacttcctggcagagaattagttatctccaaaaggtgggttaggtctttaccgatcaaaattaaggatagagagttgagtgttgtttagtggaattgggcttagcagatttcgatatcatacttgcaatggaattcttgtccaagtactctgctagtattgattgtaagcagaaaatggtgatcttccaacctgagggcgaggaaccatttgtatttgtgggatcagttcagggatcctgaattccaatgatctcagttttgaaagctagagatttgttacaagatggatgtctagggtttttagcggtggtattagataccacacgacctaaataaatttggtcagaagacatcagagtggttcaagaatttatagatgtatttcccgatgaactttcaggtttaccaccacagcgagaaaaagtttttgttatgatctggcacctagagcggagccagtttctaaagaaccttatagaatggctttggcagagcttaaagaattcaagattcagcttcaatagttgcttaacttagggttttaacaacctaatttgtcaccgtggggagctccagtcttgttcgttaagaagaaagatggatcactatgtatgtacatcgactaccaagaattaaataaattgactatcaagtataagtatcttttacctaggatcgacaacttgttcaatcaccttcaggggaaaacactcttttttatgattgatctctgattgagctatcattagttgagaatccgagaggaggacattccaaagactactttttgcacttggtatgggcacaatgaattttcggtatgtcttttggactaaccaatactcttgcagcttttatggatctaatgaatagggtattcaaagatttccttgatatatgtgttatagtattatcaacaatatccttgtgtactctcaataagaagcagagcttgagcaacacctctagatggttctccaatgattacgagaacataaattttatgtcaagtttaaaaagtgtgaatttagctatctcaggtgtcctttcttagacacattgttagtaaagaggggatcaaggtggatttagggaagataatccgtcagggattggccgagaccaaagtcagttacttaagtcacaactttcctaggtttggttggttattattgtcagtttgttgagggattttctaagatttcaacgcccttaatagaactaacgagaaagaagcaacagttttcgtggacagacaagtgtgaaacaagttttcaagaactgaaatagtagttgattacagctccagtgttagccctaccatcgaataaggagaagttcgtggtgtactgtgatgcatccaaaaagggtctgggatgtgttttgaagtaagctgatagggtaattgcttatgcctcccatcagttaaaagaaaatgaacacgatacctaactcaagatctagaacttgtcgcgatagtatttactctgaagattttgcggcatatctctatggagaaaaatgtgaaatgtacactgaccacaagagcctcaaatatttatttactcaaaaagatttctatatgaggcagaggtggtggttggagttggtcaaggattacgactgtgaactcctttaccatccaggaaggccaattggtggcagataccctaagtaagaagggtcctgggcaagtatcaagcattattataattttaccccaattagcaattgacatggttagatcaggtattgagtttgttgtaggaaaacttaataatttaacaatacaatttgatctattagacagaattaaagcagctcagattactgatccaaaattggaaaagatccgagatgacgttttagctggtcaagctaaggactttacactgtcaggtaatatgatactgttgtataaaactagagtttgtgttccaaggagagtataacttagaaatgagattctcaaggaatctcataccactccttattcattgcatcctggcactatcaaaatgtatcaggattgaaaactcttctattggtggtgcagaatgaagaaggatgtggtaaaatttatgtcccgaggcttgacttgttagtagattaaggttgaacaccaaagacctacagggttgttgcagcctctgattcttcctcagttgaaatgggaagatgtcactatggattttgtggtagggttacctagaaccacggggatatttgattctatatgggttgtggtggattgatttataaggtccacacattttctaccagagaaaacaatcttcatagtggataagtatgcagaattatatgttaatgaaatagtgaggttacatggggctccgaagtccattatatcagatagtgatctgaagttcacctccaaattttggcagagtctttagcgagccatgggaaccaagctaaagtttactatagctttagatcctcaaactgatggaaagttcgaggggaagctacttgaagatatgttacatgcatgtgtgatggattttgaaggctcttagagcaagtacctaccacttatagaattttcgtacaacaacaactatcagagtactatacggattgcccctatgagatgttgtatgtcaagaactgtaaatctccaatccagtgggattaaactagagaaaggaaaaaattaggtccagaatcagtaaaacggatcaatgaagctatagaaaagatcaaggctagaatgcacctctcagagtaggcacaagagttatgcagatccaaaatgcagaaatgtgaaatttcaggtaagggatcatatattcctacaagtgtattcaatgaaggggattaaatgttttcggaaaaagggcaggttatgccgtaggtttacaaggcctttcgagattctcgaaaagattggattggtaatttaccatctagccttgcctctagcaccttcaacaatccataacgtatttcatgtttctatgttacggaaataagttccagttcccactcatgtgctgggttatgaaaatctagaacttcagtctgacttatcatatgaggggcaaccacttcagattttagacagaaaagataaagtccttcaaaataaggccatagctttggtgaaggtgctgtagagaaacagtaaggtggaggaagccacctcggagttggagtccaacatgaaggctcaatattcagagttgttaacgttagattaagaggacgaaatccttttaatgggggataattgtaacaaccgcttgattttagtatgagaattagacgataattagggtttaatttggaattagacttttaattatgatttgtgaatttatggtaatatatttgaattgtaggtgtgttatatatattatatataaaatttcatgtttttcatattttatgctcggtaacagtggaacgcgacgtttggccgatagagttacattttcttatgatttaatattttagtaataggaggaaaaattagatagacattgggaattttgagaatatttattgttttggatttgaccaaaatgcccctaggtggcaagggtgctctttgactaaggtaagggcaaattggtctttagccatatgaattctttgtcctctaacggagttatattatgttttataatctgaaatttataataaaataagttatatagacactaaatattttatttattctaaattaaaaaaaaataaacaaattaaagtctctctctctcgaccaccttggagaaacccgtagaaagataaggtttcgtctccatttttggtgtcttagcaaggttttggtttttccaattcaagtgaaaactccctagctcacttctgtttgtttcttaagttataagttaggcttttatgcttgaattttggagttagggttctgtaggttttagagatgtttgattttgtatttggaggatgttttgttgtgattgtgagctgttttaagagctcaaatttttctctctcatggtgatttttttaggagttttttattcagttcttgtgcttggattatgtttattgtggccttattaggtactctggaaagtttaggatgatttggtgtcaaattgagttgtttagaaggtttttgggagtcttgtactaaactagttgaccgattgagtatggacctgtcggaactggaattcttgttcatccgttgaaagaccccacagaattggtcttcgagttaggaaccgctctaccagttggggcagtttagacaccctagcttttctgatttttacgatatttggggtatttccatgttttccatatatgattacatgtttcgcatgcatgtttataatgttgggttttatgccctaaataaaactcatttgaatataatcagatttacttattaatatagatcaaaaataacatttattgttg

SEQ ID NO: 25542 - DNA, 2020 bp, Cannabis sativa
attagggttaaaaagtagaaacgtaccctgacactcatttaatgtaccccgagacccatctaatgtactacggaatacattccgtaaaagtacatcccataacaaaatcgtgtccctatatatatatttatattatattttggaatttgagggagggcattagcccaccctggccctcaagtggatccgcctatggtaattgctactattctatggctatggagtcatatccaataaaaaaatatctaaacaattacaaaactaaattaacttatactaagaaattgtgtttttgtaaatgcgaatatatttataaaacttcaataattaaaaacacaattgctacaatctacagtaataaaatagaaacttgttgctacaaaatacaaatttacaataacagaacagaaataacagtgcataatataaaaaattgacataagagaattatacgtggtatctgtgttctttcaaatagtactcctagtctaaagggccacgcccagagaatgaaatcaattagtatcaaagattacaaaaccaattgatttaaataaatttagactcgctctagtgatttgtcgcaaccctttgtaatccaccttgctaatctgatctctgaaacacatcaagtagtgaactccccagctattgatgtgtgcttacttcctcctgtagtaagacttaagcaaatcttctctcgaaaatatatgctcacttcctcccaaaatgagacttgaaaaagtcttttcccaaagacccacgcttgttcaaacaagttcttcaaccaattttatgaacaatataagaacaaaaaataaacactaaaacctagctgaacactcaaggttttcacaaaataaaccatctccttataaagatgaaaatatgaaaaataagactagaagaggtaaaatcgtttggctgctctctaggtcctatttatagaatataaaaaccctagagatagccacaaatacgttttgaaagttgtacaagactttcctaaaaaaatctctaatttgcagcatcaaattcagattctgctgctgcaaatcgagaaactttctaaaatggaccaatatcacaatgtggtcttcaatacctgccaaataaagattgtttgatttgctatatatatatatatatatatattgcaaaactgaaaataatatttagagaaaaggaaagtcaagttttttaaaagtagacaacttttcataaagagaattttatctcttgtaggacaagtttcttaaacaaaaaataccagctgtaaataaaatttttcttaaaggaccttaaagagtaatcaaagccacaaaattaacacaagaaaaccaacatttaattcataataaataaataatattttgacaactaaattgccaaaaaataacctagcatatacaaataaagattccatcttgaatttgctgcaactgttgtaatctaaactcttaatcaaatttctgaaataatcaactttgaagttccttcaaatcataacacttacactctttctcccgaaaagtgactcatgagcaagacttctcccgaaacttaatgaacgatgtcgaaatgtgttgaagttgtacaattatcacaaagaaaataatacagaaatacactttaataaaacactaagaacttgttggactcaagttcttcacacaatcaaaactctctctaaaacttatttggaaaatactacactaagagatataaccaaaacccttacagtcattctgttcaaacaaatttattcaacctacaaagataccctattttcataaataaataaggaaacaatacatacgatatctatgcaagttggacaaaatgagatcaagaaaataaaataaatacaaataatttctatttatacaaaagtgaagaaaaagtatctttttgaaggaaacatatatttaatttattaacatgtatagaataaactgatttagaaaaatattttcacaccaaactaagaaataactattttgaaaattcacaaaaaaaa

SEQ ID NO: 25543 - DNA, 4835 bp, Cannabis sativa
  modified_base (4751)..(4793): a, c, t, g, unknown or other
tttattagctaatttattagatttgaccattttcttaatttttttaaaaagtggacatttactaacttagttaccaaatttagagtcattacgagctgggtttattcttaggaaggtagcttgctatgtagcgttgtgcctcaagatggatgtggcccaagaaaaataagagaagactgctatacataaaagatgaaattataagttgttttgtgcaaaaatatggtcttttatttctaaaaatattatttaatgagaaaattaaagaaaaagctaaaaaaatatgagaaaatcaagaaagaataatcaggtaactagaagggtaaacaattaccataagaaagtagtaaagtattttattgtattttatctattttttttttaacttttgtctaaaaatttcataaaataattttttttagtaaaatccatacttttgtaaaattatactttaaaactattaaaatgaaaattccactacataaaataaaaaatttctaaaaatcagggtatttttccaaaagacatgtggtgcctataatcaggccattttatgaaacaaaacaaaactagtattaaagggtacatttttttttacggaattaattaaaaaaaaaagtaaaataataacacattcttcttctataaaagaaaaaaaaaatcaccattgcatggtagttagttggcaccactaccaccttggttaatctacttaccggtgaagtgagagatgtttgagtagtaggccccgtcctcccttgtagtcaagatttttacctaaattgattttcacacttatcagttgcataatgtgacactatttaactaaagatatttatttttaaatgaaaaaaaattagtttataaaatatataaataactgtttcaacaaaaaagtatatctcattagtaatatagaagaatgtattataacggtaatttgcggccaaactctctgagctttaaagcttggcatgatcaaccccctaactagaaaatttagggctaaactccccaacttccacaatcattttgctctgtactccttccatccactttggtctgttcggtaccaaagtggacagccacaatgtatagaagttacacttgaacattttttattagtacacctaatattaataattaaaaaaattaaaatatttaaaaattttaaaaatcagaaaaaaaacaaattaaaaaaatttaaaaaatcagaaaaaaaaaattaaaaaataatatattttttccttctttcttcttcctaaactcatctttttctccctcttccaattcccctcaccaccatccacgaaccatcattccaaccaccacccaccactcaccaatgttgttaactctaaaaaattaacagagtcgattttcaagattagtcaacaattagtctcaacgattgagagacatcgctagtaaaagtcagtcgaggaatggctgaataaccacgagtagcctaggacccataaatatcaaggatcaatgcttccaagtcttggggtatatccacgcaactaggaggttaatcccagaataactcacgagtagagctagtaagatcaacttactaagttacaattgttggaggattctcataatgatgcattcaaaaattagatttttcataaatgtaaaatccatagatctctttctcatctatcgaacgcattttgaatcgtccagttccaacatatatcgaaagagttatgtctaaaatactatgaccactgaattgtgacaactgggtgtacgagcccatgagctgttgtgcaagcccatgagctattgtgcgagcccaagagctattgtacaagcccatgagaaactgtgcaagcccatgagctgttggacaagttggggatcattttggtgagttgtggagcatttgtgtgagtcgtggagcctttacacaagtggtggagcacgcgttcaagccacggcaatgaggggctctcactcgaggctgcaaggctgcaacacggtggacgggggctctcatgcgagtcatgtgtgtcaagtgcaagtgtgtgcaagtggggggcttgcatgtgagttgtgggtgtgtgtgttgtgcattgggggctcgcgtgcgagcccatgtgggggcctcacatgcaagccgttgtgtgtgttgtgtgtttgtgttttgggggttgtaagggtaaggtgagaggtggatgcatattgacgagaatgacattggaggaggaatcaagagacaagatgtgcaagtgaaaagtgtacaaccacacctcttaaagactctaaaagtgagaaggtacaagtagcggtgacaacagacctgggaggtttgaggacccaaccaagggtacactgcaaccactctctagcaacctgtaaccggggaccacatgcctataatcggggatcacctgcatgcaaccaaggaccacactcatgcaacttataatcggggaccacacgcttgtagttggggattacctgcctgtaactggggatgactatcctgcaacttgtaaccagggaccacatgcctataactggggatcacatgcctgcaacaggggaccatcctcctgtaactggggaccacctaacaccaaacaaggctacgaggtgcaaggccaccttttgcacctgcatcatgcagcgtgaaagtaacgctttgtccccttaggaccactttgtaccttaggacattagagcctataaatacccctttctcagatgtgagaggtggctggaaaattattcttgtaacttgaccttgatagcaatagaaagtttatcattttctctctattttgagatagcaatttaaattcatatttcatctttaatttcgtcttggatctgagcttgaagcataggttaattgacgagttctcaccgtcaacagtttggcaccgtttatgggaatgacaagcttgagtcgagctgttcctttacacacaaacaatacaaaatgcttagactccctcaccacctttagggcgtggagtttcgccttgatgacaactagttggtcgctttggggcaagacctccctccacccatcattggagaggaaggcactaatgatcacaaccctcaagtaagaggagaaaatgaaaacgttgtccaacctcaagtctgaggagaaagaacatgcatgcgggaatcttaagcaaagcaaggagatcatagccacaaaagtaccctagtggatgagcagcgtgatagagttaccacctctatcacgaccaaagataaaagtatgacacaaaggaaggaggtcccatcgtcactgaggtaccctccttcaccaatagatcccagtaccttgcaacatcgccccagaaaggagaagagagctaactctatgagcccaaaatcccaaactcaccactatgaagaagaaataaatgatctccgttgagagaaccaaaggctagaaactacggtggctggcatgcaaaaaatactaagcaaccttctcgaaagcaaaactcaaactttacactttctttacaaaggtcatcggtaatagtgtgggatctcaactgcacacggtgatagggagaactccatgtcatcaattgatggcaccctaaaggatgagagcagaaagggcctgtcgttaaatgagaacccaagaggtcgctaagagaaacatgaatctacccactggactaagaccgcaatgggggaaacatcatgtaatcctataaatggatttcaaccaaagaatctcgtgttaggggacaccacgcttgcaccccttattcaagagcaaagcaatcagaaggcatcacccctcaaccatggtggaaagtcacacgatgatgggatgagaggagtactactcacacgctccatgcgaaccatagggaaaacccaagttcttcaatttaccaacttctggtttgataaattatttccagtaattgggatcgctttctccttgcagcaatgtcctaatctggttcagaagtttatcatccaaaaaatttagaaattaagcatcctactgaatttgccatcccctacaaacccaagatttcaaaaactacaatccaaattagaggtaaatgatgccagaattatggatcacctagtgaaaattcaccaataagacatttctagtcaccacatacgcttcttgcaatagattactgaaggaaaacatcgtttcttacgagaagctgctaagcccgaacctcccagtgtgtcttctattcctttagctgagcctctgtttttacccaaggtcacaattgcttttgaaccaagtgacttggattttgaaataatgtctcctaaaccacgtaaatcaaagactccctaggaccccaacgtcactttcgaggcagagttaatagagtcgaaggtgcgagccatcgcaggttatgtattgaatacaagcgagactgccacgttaggtcagtgtgagctggtgagttcagatgttacccactagtgcgacttacttgcgaaacctatgagaaagttagtagcgagaccaatacaagtggctcgactgtataggcccttaaagccttgagcatatcagggctggagctataatccacctgcaaaactactttaaggacttcataaaccacctcgagcttgccccgtttcaactaaatcccgactcctacagaatccttgcaagtttgagggttctgtacaaaatcctgaaatgggagtgctccacccctggaaataaagtatctctactgtgttaatgttgttcctgttgggttttgtgcccnnnnnnnnnnnnnnnnnnnnnnnnnnnnnnnnnnnnnnnnnnnaagatcagaaataacattttatgtagcatggttcacatgatt

SEQ ID NO: 25544 - DNA, 1722 bp, Cannabis sativa
aatagtcacccataaatactatgtacaatattataaataaactctattatttgaaaataagaaaaataatataatttctcaattatgaaaaatttattaaattataggtgtgttatatatgcattatatgtggtttaatatttttatgttcgacaacaatggaaactcgacagattgaccagaaatgttacattagtatagattagcatttgagagttattaggtatttttatgaacatttggaattacgaggttatgtgggttggttagtgtttattgagatttttggaaaccaattataaaataaattaagcttaaagaaaaaataacttaatgaaggagaaacaatgatttttacctagttgggacgttaatgagccttagttcacgagacaatactattaagctagaaaagcttcaaagtactattatacaagagtgttcttactaaagtttaagaaccctaattcttagaccgtgatctgagaaatgacttttcaaccgtttgcatgaagggataacattttatttatatccttgagtcgaatatgggtgaacctggactcggtagggtttgaatgtgtcaattaagcccactaatggggtaaatacatgactttggaccggttgagtgagacctaatttatgagataacgatcatccgtatgtatgaggttcgtttgatgatgataggtgtcgtgcgcaaccatgttggtaccgagaatgtgagggaatatgatgttacacaaaaaggtggcttcctttcggtggtgcacgcactccgtgggtttgatgtaggggacaaatccctaacacagtaggacctagtgtttggaggatgccacgtaggatggtatctggaaacttctggatgtcttttcagtttcctgttttcaaattaccccatgaaggtatatggatacatcctgttggaccttttagcttttgggaaagataatcttttctgaaccaaagtggttcgaccttgttgcgtctataagttggacttacatctagagtcgtagcctgaatatgcttgtgggctgatttattaacttcattaggcctatggatgggctcatcttgtcaaatattaagccttggaagtacacgtgccattaagttagaatcacgaataatatttacccccaagccttcagggctcaagagttgtagaggcttacagcctacttccaaatttgtcttgaatatggaaccgtgagcatgtgtgaccttttggaattccaaggccataagtggtggatgcctggggtcctttcatcttcctggagtaggaaacatgtgtcatgagtcccttggtacttgcctattgcgcaccttaaggaagagagtaaatcttagggacgtgagacgatgactggtttaagtcagtaggatttctaaggcgaatgtcgtcatcaaatggcctcgatattgtacatagcattaaatgggagccttctgtattcccggaccattagaccactttatttttttaggatatgatctaattcatcagatcgaaagcacgcggatcaccaatttgtgtaaaaatagggtgagggtcaaatggttatcacttttgccattttaaccctttgagtttaaatattccagagagagaaaatcatccaaacaaaaaaaaaaccctaaagtttttccagtgaatgtgcaatatattggaaattattttaccaggatcttagatctacttacaagtat

SEQ ID NO: 25545 - DNA, 2680 bp, Cannabis sativa
tgaagaaggacatgccttactattaaccattaaggtattgtaaggtgaataggtgaggttctttatgtgtcataaagagtagtaatgaatgactctgcatattttatagtaatttgggtgattccaattgaagatttttccttgggataaataattccaattttaaacttaattggtaaagaaaagggttgaaaaaataagttggtatgtttatttcatcatataattatactataattgtgtagttaaaaataattgagagattttaattatattttgtaattcttatgaaattgtcttccatgaaaattgagtgtaattacacttaataattattaaaaattatctattttaaatgttaactactaaaaaaaatatgatttcttatataattactaactattttactaaacatgatattaagaatccatatataattactatctcatatttaaatataatttatatttttaaatataatgtaattactaatataattatagattattagtaattacaaatttacttccaaacatactctaaaaactactacatgattttatgcataatttagtgttactacacttgtattttttccgacaaagatgtggttcgagtttgaattctccttgacagtataaataaatgaaatacttgttaggtaaaggtgtcataatgtcatttttgttagagtaatttttgttttaaccaactaaagaaatgggttgaaaaaataggttgatatgtttatttgatcatgtaattatactataattgtatagttaaaaataattgagagactttaattacactttctaattcttatgaatttgtcttccatgagaattgagtataattacaatggataattactaaaaactatcaattttaaacattaattactaaaaaaaatatatatatttttttatataattactaactattttatcataatattaagaattcatatatatgtattatctcatattcaaatactatttgtattttaaaatataatgtaattactaaactctataattatagatttttagtagtaacaaatttactttcaaataaactgtaaaaactactgcatgattttatgcataatttagtgttactacacttgtattttttttttgacaaagaggtggttgagtttgaattctccttgacagttttaataaatgaagaacttcttatgtaaaggtgtcataatgttttttgttagagtaatttttgttttaagcaactaaacaaaatacaaataaaacaaatttgaacttaaaactaaatcaaataaagttatttatctaaaaagcctcattttatgtgaaataatattcatgacaaagattaagaaataacaaagaatatttacataaattaagctcaaagagcacttctttttagtaagtacacaatgtaattatacccaattaattaatttgaattatatcgaaatctattacagggcggttttccgaacacacactcccttaagattattttccaatagatctagcttggaattatgcaaacaaattaatcttaatcaaaagtatctatacaaaacaaataatttatttgcacaaatatgacatagcaagattgattgtttttctttctttcttttttccttttcgaattaaaaaaaaaaaatacaaaattcatacttcagtttattgaagcaatcacacagatgaattcaccaaccatttgaatgcaaaggtttggaaaatagattgatatcttcaaatgactatgtcttctgagtctgcagccaaaaaaataaacataaaatgaaaatcattcaaatatgttattttattgttcatattgagaaattatatgaaatcaaaatgccaaccttttttaggtacttcttatgaatcttcaatgcctcgttgcacgcctttttcgcgtcaagatttccggttatgtcacctaagatctgaacacaaagttaacaagttttaagaaaagatgcacaagcaagcgcgatatgaatcaaagtgggaaaaaagaagagaattttaaacctgaacaacatcatccaaaccctttgcctcctttaaaagcttcttgtttttagtctcaagaacacttgcaactaaaaaaacagcaagaacactatgtggatctgaacttttagtctcaacatttttcctctcaaactttccacattgctttagaactttatcgtctacttcggttgctgcactactgttatctgactcagaaattgctgcactctcatgtaatgtgaagatgtttggattgtattccatggcccacatcagctgaaaccaatctatctatattacaatctcataaactaactaagattatgaatgaaattgatctaacatttcataacacatacagaaaacaatatgaaaagcatcccttaatttcttacctcccaaagatacaatgcatccacaaaggaaaactctctcctgaaaagtaccatcagcattcgaaatgcgaataagtactccccgccatctagatcctctgtcaaattcatgaatcatatcgggtccaatatgtttttcctcatataacttaatacacaagttttatttctaggtgagtgtttatgtttaactgtttgttatggtgtgatattttcataggaatgataatcattgtataagattttctcttttaagtt

SEQ ID NO: 25546 - DNA, 2435 bp, Cannabis sativa
aggatgaagggagtcacttctgtaataaacattttgaagcactcctatctagatatggcattcgccacaaaactgctctaccctaccatccacagagcaatggccaagctgaaatttctaactgggaaataaagatgatattggagaaaacagtgcattgatcaaggaaagattggtcacgaaagctagatgatgcactatgggcttatagaacagcgtttaaaacacctattgggatgtcaccgtataggttggtgtttggaaaagcttgccatctgccggtggaattagaacataaggcctattgggctatgaagaccctcaacatggacttgaaagctgcaagagagaaaagattgctgcaattgaatgagctggaggagtttagaaatgaggcctacgagaatgctaagacctacaaggagagaacgaagaagtggcatgaccaaagcttattcaaaaaggtgtttcaacctgggcagcgagttttacttttcaattcaaggttgaaattgtttctaggcaagttaaagtcaaggtggtcaggaactttacagtggttaaggcgtttccctatggagctgtagaattgaaaggagaaggtccagaaacatttttaaagttaatggacaacgtttgaagctctacttgggaggtcaaattgaccaagccaagttcgcaattagtttagcgcctctttagaagaacaactcaacgtccggttagatgacgataaagacagcgctcttgcgaggcaacccaagtgttttttctttactttttcaaactttttgctattgtttttagtttatgttttagtgtttttagtattttaattttttgtaaagtaccagacattatatttttccagttgaatcgtgaaaaacgtgaaaaacaagaagaaaaaaaaaataatttttcgggaccaggaacccactggtcgcgaccaccacattccagggtcacgacctggatgttaacagaaacattggaatttttttagctccagtagtcgcgaccaggctaaccttgggtcgcgaccctttttcgcagtcgcgaccagggggttaaacaaaaaccctgaattctgggatttcaagctagtcgctaccagctgacgaaaaatctataaaaaaaacccccaattttcaccatttcaaaccaaaacctaaaattcaaattctcagccgccctcaccctctccccttcgaaaatttgttttttcttcaccaaattttcaattctttccatctatctaccaattcttcaatcccaatccatccaaaacctaaaattcatcatcaatcaccaattttcatcaaaaatcataccccaaaacatcaatttcaccccaaatccaaaaataccattgttctttatcttcaacctcaagatttcaagaacattcaacaatggaggtggagtagtggctttttcgggtttgtaagtatcactctctatcatatttaagaaattcattgagcatttagggatttttaatgaagatattgaatattttggaaagtttttgttgatagtggaattgttgggtttatattgtggatttgaattgttattggtattatctgtactgttctggtgatttttaaaatttgggaaagtaagaattttaaggggaagtgctgcgcaattttttctacattattttttgtggtaaaaactttggtattgtgctaatatgggtccaaaaagaacaagacacactgaagaagggggaacatcatcaaacccgccacctacgggtttcgatcgaacccaatttgttagtgaggcggcacaaaatcggttcatgaggcttaaggttaggccacacattgaggactggggtattgaattcaaaatcctttgaggcgtcaatcgaggtttgagacaatttgggcccaaattgaaagaatgaaatggggcaattttgttgatgctaggggctgggccaatgtcaccatggcatgtgactttctcgccaattggcccgagcgcagaaatggggaagttaaggtgcggggtaagaaggttcccgctacagttgatgccttcaacgctatgttcactgtcccagactacccaatattctgcaccgatgtgaaatcaaccttatggcaaaaatctggctatactttgtgagtgctcggttggtgccgagcaaacatttttctgatgtccagatggatagactcaaatatgtgtacgccatcatgaaggggtacaatatcaacattggacaagttatctgagggagcattgaacagattgttcaaggagccttgggtggtggcgttggtttggcgggtgtcatcactgagctttgcaggacatatgatgtgcctcaactggaatatgacaatattgtggtaccgcagaggaagatgaacatcagtatggtcaacaggcttaaagagcctcatccttatggacaa

SEQ ID NO: 25547 - DNA, 7426 bp, Cannabis sativa
tattcttccattgtcttactatagctctcaatatgagatgcattgaacggttgtatggtgaccatgggcttgatgttgtggatgtggtgaggaagaacacttctcatgcattgcctattatattaaatcggttgaagcaaaaacaagaagagtgggcaaaatgtcggtctgattacaataaagtatgggctgatatatacgcaaagaactatcacaagtcacttgatcatcgtagcttttatttcaagcagcaggacacgaagagcttgagtacaaaaggtacactttaaatcccaaatttttaatttacttatcatttatgaccataaactttttgtccatttaactttcactagacattcatatagcttattatccatattccccctttccccccagccttactggcagagataaaagaaatcagtgagaagaagcggaaggaagatgatgttcttcttgctatagctgctggaaatagacggcctataattccaaacttggaatttgagtatcctgatcctgagattcatgaagatttgtatcagctcatcaaatattcatgtggggaagtttgcacaacagaacagttggataaagtaatgaaaatctggacaaacttcctggaacccatgcttggtgttccttctcgacctcagggtgcagaggacacagaagatgttgtcaaaacaaaaactcatgttaaaagttctgctggaagtttaggagagagtgatggcagtcctggtggtgttgttactgctactactgtcaattccaaacagttaaatcatggtagaaatggagatgaaaatattccacctgaacagtcaagttcttgtcggacatggcatgctaatggagaaagtggcaataaggaagataattctgttgatgtggatcgtgctcgaaaggatgatacgtgcaataaccctgcacatagtaaagtgcagagcaatgcatctacagctgatgaagcatttggagtcaccaagcaagaccttcccagtgaacaaatagttaattcaaatgcattgcatgccattggtgtagagcaaagtaatggaagaaccaacttagaagacacttcaggttttcagaagctttcagcccttgaaacttgtctttctagtacttaaacttaacaaaattcttgcaattcctgctatattcctttcttaatgcaatgtaatgtttttttccttaatgcaaggtcctggtgttactccctccagacccagtaatggtgctagtgttggtggtcttgagttgctttcatcagaggtaagctttggatataattcttttaatatgtcaccagcagtgatgatgctgtatgaaaattttgtgagttcttgctagtttttagttaatttaaatactaatggaaggttgtggtttggagcaatatggttataattctttttaatatgtcaacaacagtgattatgttgagttgtgtgaaattgatttgagttgcaagtttttagttagttgcatactagtggaaggttggagtttggagcatgtctagccagatttatggaataactattataacagatattattacacgcacacacatatgttgcttatgtgctgaagaatttgctaaaccatattgacacatcaggccggtgattcgactagacctgttattttacattcaaatggggatctgacagaaggcaccaggaatcataggtatcaagaagaacctgttgcgcattttaagattgaaagagaagaaggtgaattatctcctaatggggattttgaggaggataattttgcaaattatggggaagctggtttggaagctctgcgtaaggcaaaggatggtgctgctagcaggcaataccaaactggacatggagtagaagaattgtgttgtggagaggcaggaggagaaaatgatgctgatgatgaaggtgaggaaagtgctcagaggtcatcagaggatagtgaaaatgcttcagagaatggcgatgtttctgtaagtgagtcgggtgatggtgaagaatgttctcgtgaagagcacggggaagaacatgatactaaggctgagagtgaaggtgaggctgaaggaatggcagatgcccatgatgttgatggagatggaacgtcattacctttttcagaacgttttctactgactgtgaagcctctagcaaagcatgttcctccatctttgcatgataaagagaaggattctcgtgttttttatggaaatgactctttttatgtgcttttcagacttcaccaggtataaagtcatgttctctttaaatatatgaacacctctataattaacatctttttgtaatgcaaaagaaaaccttatattatcctttgtatctaattggcagacattatatgagagaatacagtccgcaaaaattaattcatcttctggtgaaaggaaatggagggcttcaagtgataccagctctactgatctttatgctaggtcagcacggatttcattttctttccatcagccttagctcattcactgtatttatttgaagcattgtattttatggcatagattcatgaatgctctttacaatctgcttgatggttcttcggacaacacaaaatttgaggatgattgtcgagctataattggaacacagtcatatgttttattcacattagacaagctgatttacaaacttgttaaacaggtagcgcagctatatttgtaatgattataatttctgtccatctcttgcaaccttttgtcatatagtttcttctgcatttttcgtttttcagctccaaacagttgcaactgatgagatggataacaaacttctccaactatatgcttatgaaaagtcaagaaaacctggaagatttgttgatatagtttatcacgagaatgctcgagtacttcttcacgatgagaacatatatcgcattgaatgtgtaagttatcagtgatatttgctacctctttgatttataaacaataataataattatatagcgagatgagatttatatatatgtatgtatatgtatatgtatatatttatgtacaggaaaaatgtcaacttcaaagattctttgtgaatattattttgcagttatccatccctacacacttgtccattcagctcatggattctggtcatgataagccagaagtgactgctgtatctatggacccaaatttttcatcttatttatacaatgacttcctctcggttcttcctgataaaaaggagaaatctgggatgttcttgaagaggtttgttgacttatttcaaaacttgcaagaatttgtttctttgccaatttcattagccatttctgatagagtttcctggtttttgcaggaataagcgcaaatatgccagtaatgatgatttttcttctacctctcaggccatggaaggacttcaagtaaccaatggtctggaatgcaagattgcttgcatatcttcaaaggtaagccttttgaaatgtttttcttcttttgtacttgctgtttctctcttcccagtattgttgtttgtagttttgtgatttttttaactcttgtgtattaggtttcctatgttcttgatacagaagactttttgttccggacaaaaaggagacggaaaaatttgcatcaaaatagtttgtgccatagccagggtaggtcttcaaatggttcaagtagagcacaacggtttcatcggttgctttctagctcatgacatgccttcccgtgatgtggagtaaatacagtacgtactaaatttttattatcaattttgtttgttagtgaattgttgttcattttcatttttctgactcgtataatgcatgttagaaattaagttggttggtgaactacggtcgaccaaaacaaatcgtgttttgtgttttacgttgtctattccattttattaacttgtattcataactgcacatttagtttctttctccattctgaatttgatgcattgattttttaattgatgtagatagaaagatagtagccagcttctgacgtttggcttttcattttccattgtttgctatcaggcagagccattttgcatcgccatttctacacacggcaccgccactgcaaaatttaagaactgaggcgccatagcaaatatctcttatggacttaacttttttcgcattatggtatttctgtctcaccaatcaaataagagggatgagaatagggaagaacattgcttgaaaagttgtaatatactgagttggtggcatctctagccacgatcttgtaaataggtcattgtgatgtaaacttgtgatacatgttcattcaattcatctatatccctgttaaatcatttcgtcaagcacaagtcgaataacatatttcttttgttttatccccttttttcatgaaatgaaaatgatgggagtcattgtttacttaattagcaccattagaaatgttgttaagggaggcccatattaaaaaaatcttgtaatatcacgtgaaatttgacaccaaagtgtgctaaataaagttttatgagatttaaatttcgagtcttcaaatgaagtctaatcccatttttttttatttttttttctttttaaatgtaatgtaacttccaaagatagggcaataagaaacaagttacaatcacaacaacacatttaaaaaagaaataattacataagatacaattttttataaaataaattatatttttacgtttaaagatattttttttttatatttttacaattttttatagaaacaatacgaaaataataagaaaattacataaaagtaatagagaaatataattaaaacaataacaaaaaatcaacaacaaattaataagagtacaacataaaaaattgtattttctgtaagtaaaatcataaaagaccgtatttttataatttttttattgtttttatctattcataaaataaacattttagaaaaagaccattccaaatgatctttctatctaagcctaatgatttcctagttaggttatgtgttgaaacattgtcaattgtcagtacttggaacgtggcttaaggaaacatttagaaataaagataaagagttttgtactgattgaagaagactcgaaagggaagatatgtccctccatttatgcttgatcttgttaactaaaacttagcagtttgatttcactgcttctaaaggcaagtgcatgacaacacactaggaaagggctgcctgtaaggccttggctttagcatagatgggagttaagactcctgcaaaatgagaacatatgcttgctaccatggccccattacaatcaataacaatggcgcctaacacctgttttcaaagaatggatatcaagggcaacatccactttcatattaaacatctcagcagaagggagtctagccatgtccatctcttgttggcgcgcaacacggtcaaagggagatggattcactgaattctaatgaaagtgttggttttggacatccctatagtactgcaaaagattagttacaaaaagttccacatccataatcatccagcaaatatcaaaaagaaagggaagttgatcattatttagattgtcaaaagctcttagtagaaagctcttattgtcatagtgtctattgagtagatagaaggaatggagattggtttatctccatatggtttttgctctggtacactctaagagggtatgagtgacaatttccttcttgccattacaaagggagcagaaggggtggaaaagaattcttttttctttttttttttggaaaaggttaaaagaacaaggcaacacatgatggaaggctttccatataaaatgtttgatttttttggaggatttttcatagaccagactaccttctaccagtttttaaaagcagcaagattagatgaggagggatagggtgaagaggctagggatttggcaaggtgataggctgagtttatagtgaagttacttgagggatgacatccccaaatgagggtgtcttccatagtagggcaaataaggaccttgaagatttcatcgatagttttcttagggaagtagacttcaagtctatcaacattctaggttccattatccaaaatgaaatgtgagaccaaatggttaggggtggagataccctcattaaaaggaagaggcctagcattaggaatccaagaagacccagtagttggaattgaattgccatttctcactttccaaatgaggcccttaaggagtgggcctcttccccacatgatacttctctaagtggttgaagagcagtgaccgttggggcacctggccttaagcaatctgaacaagagggatgaggaaataagaaaaatcctccaggtctgcttagcaaacatagcctgattatggtggacaatggacctaaaacccaaacccccaaaaaatttagccatgagtctctctaagtgtttacaggctgaaacaaggatatgaaaacaagacatagcataggaagggatggcttggaccacaacttttatcagggtttctttcccaaccctagaaaaaaacttcccattccaacaattgattttggtgctagcattctataaaagataatgaaaggaagaactcttgagcctacaaacacattgagggactcctaagtacttaccgatgaactctttattggatattcttaaactgttacagaagacatttttgtcagggaggctggtattttgggagaaaagaatagaggatttgataaaattatcagcctagccagttgccttataataaatgtgaaggatattcttaatggctaaataattctcaggggtaacagtggtgaatagcagactatcatctacaaaaagtagatgggagatcaccgtggcagatctagaaatggagaaacttttaaagaggtaagcttcatactggcacagatggcagcatagaggccctcagagaccaacagaaagagatagggggagagggggtccccttgcataatacccttggaaggatggaaactttgagaatgacaaccattgccagaatattgaaaaagacagtggagaggccgctaagaattagggaaacaaacctagcaaaaaaaaaaaacaaaatggagaaggatggatttgacaaagttccactcaactcaatcaaaggccttttccatgacaagtttgagagcaacccaacctaacttaccacttctccagttattaatagcattaaccacttcattagtgataagaatattgtcaaatataagtgtaatatcccaaaaaaatataaagatatttaattgagcatattttattaaaggctaattataatttttgccccctgaactttgacatataccaagtcatgccccctgtacttttaagttcgttaaaaaggcccttgaactattgagattgttggatttaaggacttttttccaattttagtaa

SEQ ID NO: 25548 - DNA, 4644 bp, Cannabis sativa
  modified_base (105)..(135): a, c, t, g, unknown or other
gggatcccgagtcctttgtaatatgttttacaagtttaatcaaaaagcaaaattttaattaatcacatttttccataaacctcgttggttagcaacgagctgcannnnnnnnnnnnnnnnnnnnnnnnnnnnnnnaggtagttagggtgttacaactttcattttttatcttattgttttgctactacagctgaatgcaagaaacttgatttccagtgatgatgtacttcaatgttgatcaaaataagcttgtcatctatttctattcctttggtagaatgaagtgagttacatatattgaaagtgtacaagaaaatattccaatcttccaagaaggttcaagctattgtgcatgaataagtgattgaaaagtgtgtttggatttggttatgcattgaagagcaacattttttaagaaacattgctttatatattttaaaactttttcctagttaattttacatgtatcttgcacgtgatattgaacattataattttatttaatttgtttatatattttagtacagtgaaaaataactattattatatttttaatttatacattaagtatttatataattatgtgcgtcttcttttttagagaaaaaagacaataattgttagtagttttttttaactactaacaatatttagatacgatataaataatttaaaaataattgtatatatatttaaggaatctataaattttaattactgaaatttaacgtacaaacaacgtgaaatcaacatgttaaaaaaataacaaaattaaacaacgtttttacaattttaaaataactgtaaaacaacaaataatattatttctaaatataagcaattttcttcatatttacaatctatttctattaatgcccctacttgattcaaaattaacataatgtgtgttctcttattatttttcatatctgaatggaagagataagattaatttttgttttaacatgtaaaaaatatattcatttaattattgaataaccagtgtaatgtgtaacaatttataacaaactttacaacaacatgaaaacaacttgattttattttcaagttgaaataagatagatattacaaaaaaaaaaaaaaacacaaaagaaacttgaatatataacatgaaaacaacttcatgattcttttgtagatattgtgtagttttgtttttgttgttttcaactaaaacaatatcaattgatgaacaaataattatagattttttaatattcagtatttatcttcgaagatttgcttttggttgttttcttgttgctttatggttgcttctgctgtcaaagtccaagtatcaaccaaaataaaatcttttaaaacagatcccctccttgaagcagataaaagttatttaattattgttgttgtgttgttgtcaggttgctgcatatgtgagtatactgagtgattgtcactttctgtcattatcacattgttgcactccattatttgggtagcttccaaaaaatattgtataaaataacagacttttgtcatccttaatttagagtggttggctaagaagcaactaggattttgaagtatggcaaataaaatatgttcatgtcattttcttaacttgtgaacttacttgaagagttcttctagggattaattggcacgagatattgttatgaatttcgttagtactaattttagtgaatttggtacaagcatttttcccttttattttagtgtcaccggaattgagtacctacaaaacaaagaaatctgatttcaccaaagatgtcatactattattaggcatattaattctcaacagatataaaaacaaactaatgaaagatcgtttacatatgagtctataattactttttcaagagaaattataggagcttatactcttgaaagctatggaaatgtcgcaccaaactaaccactgttgtgctctttcctttccgtacattatagtttatattggctctacaactttttgaaaaaaaataacaaattaattaaataatgaaatcaatatttaaaaggatcatgcaattatatatcaatatgtaatgtgaaaaaaatgttattttgagttgtgaaacatgaatttgaagcttaaaatgcatgcggctagaaataaaaagagaaagaagaagatagggattactttgtactgttcatatttttgaaaaaaaaaaattaatttctttttttgtttatttttccttaccaacataaaaatgtaaactttgggactaaaaagcctattaaaaaaaagccctttcaaaaactgttttcagttttaaaaaaataaaaaatagtttttaagttatgaagccaaacaaactcttagtttttacatatttctcttcatgttttttaagttagtattaaaatttacatatgtaaaaggatatttgttaacgcagattttcattaaccaaatatgagcctaaccgtgataatctcacacagaaaaaataaaagcgataaaataaaaagtatgaacacatagggtttttacatggttttgcagttaaagttctgcatagtccacgagtcaatcttattcagatttcttattattttctcagggcccccctttttttgatcttacttgccactatttataatcatatagtgagcaattcattacaaagttgactgtaatcttttttcgatgatcatcccctagaatcatgggatttgattacaaataacgctaagttaatgcggtttttatttaaatttcacatagctgtgaatattccacttttattgggccaaaatgaatgcatattaaagatatacggtaagccttatcccattgggatgcctcgctgggaatggagctgagttaactttgatggcgagctggagctcgtcatatgtcttctcgtcgttgatattgcattatttcctccattttagaaagtttgagaaactcttaagcttttctgccaagaatcaccattgcgtttgtcttaggacttgcatgccatctctgtccttgacattttttctacgagtttcctccgacttcatcttctcaaactgatccttgctacgttcgaagatttgtagatggaataaccagccattgccccaagccctaactccaaacagtaagttgctttcttccttcacatgcttgctagattgcgttaaattgctacttagtttgtttgtatcgttgtcatctcatttggttttggtagtttttagggttaaattgtatttcagtccatactagggttcaggaaatatgtaggttgtttcagaatctccaactcatcaccttcaagtttgataaaattctctctagggatttggactgcttttttcctgtagcaatgtcccactctagttcaggaatttatcgtccaaagttttagaatttgagtttcctacagaatctgtcatcctgtataaactgaatccttcaaaattcacttccaaattagagttgaacgatgctagggttagagaaaacgttgtgagaaccgatcaggaagatattgctagtcgttacaggcgtttcttgtaagaaaacttcgaaggcgaatgtcaattcttgtgagaagcagcctggccagaacctcccagcgtgtcctttattcttgtggaaaagcctttgtttttacctaacgccatgattgcttttgaactaggtgacttggattttgaaataatgcctcccaatccacgtacatcaaagactccccaggaccccagagtcacctatgaagctgagttgatagaatccaaggtgtgatctatctcgggctacacaggcgatatactgaagacctgtggaattgaacttgggcaatcatgccaagttagatcagtacgagagggtgagttcagttgcttccctcctacgcgtttttcaagcagtactccagggaccagtggtgagactagtactagtggctcgactggtatgggctcctggagccttgagcatatcagtgcaagggccatacttcctctttgagactacttcacgtactaaataaatcacatttgagttgccctatttcagctgactcccatctcctataggattcttactagtttgaaagtcttgtataaaattttgaactgggaatgccctacaccagtagaaattgagtatctctactcggttaaggtcgttccatcaaggaagaatgccgcagtgggcttctactaccttggtacttattctacggagcccaaaatcattgttgacttgccaaataaagtgtctttcaaagacaacttcttttggacatctggtctttcccccaacagcacaaccacctttcgcaaacttcgtaagtgattggtttcctcttgctcagttatatcaatccctgtctttcagttttctaaccagtgttttgtttgtttttacagctctcttgacgaggcctacccctacccctgagatgatcagtcggcacaggcgcctgataagtcttccttattgttatcccaaattttgcactctgacgtggcatcatgagaatggtgacacgtggagtccacctggagcatcttttcaggaagattgaccgagcaggatgccacgctggcgcatcctgagtaagatattgagcgatccgtgcagagcactcaacacttagcgaattcatctttcgcatcatgagt

SEQ ID NO: 25549 - DNA, 2637 bp, Cannabis sativa
acaccaccaaagtaaatctcagatttctgcaagttgatatgcaatcctgaagaggagctaaattcatctaaaacccttttaagcacctaaattaaatgttttgaccctttgctaaaatccattaaatcatctgcgaagcaaagattaataatttttaaacttttacacatagggtgaaatctgaacttggaattttgggcagcatgttgaagacttctagttatatagtccatgattagcacaaaaggcaatggggatatcgggtgcccttgcttaagccctttttctcctttaccctttttctcctttaaagctacctttgattctgccattcaacgtaattgagtaatgggaggatctaacacaaatcatcaccattttaacaaaactttgagaaaaattgaaagcattcagcaaatcttcaaggaaatcccaactaactgtgtcataggctttactaatatcaattttgatggcatactgaggagaaatattcttcctattataattcttcaagagatcttaaagaatcatcatattatgggcaatgcttcttccttggatgaacgctccttgcttttgcttaattacataaggaaccactatagttagtctagaacacagtagttttgatatacatttataaattgtagagcagtaggcaatcgacctatagcccacaacccttgttggattatcattcttagggattaatgatataacaatagaatgtagctcaataggcatcctcgctattttaaaaaaatatgttgctagcctacagatttcagtaccaatttcagtccaactagccttgaataaacctgatccaaagccactggtccaggagatttgctatctggaatactgaacgttgctctcttgatttccttgtgagaaaagggctttagtaacatgagtttctggtttagatctagctaatttccctgattaaaacaatcaggatttaagctgttgaaatctctgctttttgtacccataataatcctaaaatggtctaagaaatgagcaacaacatcagggaaatggtcattagtatctccccgtttagttatataagagacaattctattatctattttcctcttcgttaggcagccatgaaaaaagaggtgttatcatctcattatttatccgcttgattttacaacgttgtcttagaaacttgttatccaatttttcttgactgttgaaaaaaccatcaactaatttctccttctcttggtatctatcatctcttgggttcatttgagccatgttttgcttccatgtaataatctttggccttttgataatttctccccgtatcaccaaaggtttctctactaaatttcttgagctgatgtttcactctcactagcttcagataaacattttttaaatcagtgccatctccattcttaccccagatgtcataaccagcctcttataatctgggtgatcaaactaaaattaaagaaacaaaacgatctaacacctatattcacaacagccttcgcattgataacacaagagcaatgatttgagattacctcccaaccaaaacgggctatggagttaggacaaagatcaccccaatcttcattaaaagcatgatcaatttttgagtatattctactcaaaccatctcgataatttgtccacgtaaatgttgagcatattttcttaagagactccacatgggcttgagcaagccattgagtagaatcaagtaaatcactatactgaatcgggttccctccaattttatcctccaagttaaagatagcattgaaatcacctagcaaaatccaaggtttcacaggcagctttaaactctaaaaatctgtccaaaggcttttcctctcatcaatggttttgaattcgtagatgaaagtaatgcaaaaagtcttttattgacctaaaatcttaacataacagtgaaccaatttaggtgtctcaacaataacaatcagtctaataaatcatctcctccaaattatcaataaacgcctttcaatagtcgggctatccatcatctccttgactttattgtccttcaatttagtttctaataaggctttaataccaattttattcttactacaaaactccacaacaacatcttgtcttttttattaacacccttaacattccaacttgctaaattgaaattatccattattagctaatggtaatacatggatctgcctcttatccaactgatcttgttcattacgcccttaacctcttgtagaacatcaaagttattcccagacttcagccttgtatctaagcatccatctccttccttagaatgaaccttagattagtgaattgttctccttggggtttgccattctttttaatctgagtgtctttatctcccctagtctcagttagattcaactccccctctttgttaataacaatagtagaatcacattcctgctacttattcaacttgttatcctactatctagaaacaacaccttgtccctttatttttgaaccattctttctacaatctgccatgatatgtctgaagccagagcaatttttttacattttactggtaaccactcgtaatcaattttttgctccattaattgaccaaattcattgagatagggaaga

SEQ ID NO: 25550 - DNA, 4809 bp, Cannabis sativa
  modified_base (1507)..(1510): a, c, t, g, unknown or other
aaagtggagaaggcccccgagtctttgttagtttgcatgtttattacaggtgttttgccaagaaccgttttttggaaagacctacaagctcgaagacccaaatctctagtcgagttcttcgctatggctgagccgcataagaggatcgaaaattctctggcagagccagagagaggaaagaacaagcgtgagtcacttgtgctgcgatcgcgatctcgcaatcctagaggaagaagtcctcaaagacgtagtcctgaaagacagcgaagtctgaagttggccaaatcccctccgaagaaagagtcatctccaaaaaggaaaggaggtccccgctttatgaactatacagaattggctaccccgcgagaccatatctacgtgattgaagaaagaatggagttttcagaaagcctcccccaatcaatggaaatcgcgacaagagagacccaaaaaagttctgtaaatatcacaaggatattggctataccatattggaatgttggctcttacaggacgagatcgaggaattaattagacgaggaaagtttggaaagtagaagaagaatgaggaaggttatccccaagcagatgacaaggaagaaaccaataatgcgagtggttcgagaactcctcgcaatattttgacaatcattggaggacctcacatcgccggagacttcaggaagtcgcaagaacgatatgccaaaaggaaaaagagagggcactcactaatgtaaatattttgagtgaacggctagaaaaactattcaagaaggattgcgatgacataactttcatggaaagcgatgccagatgggtttaccacccacacacagatgcactagtcatcgtcgccaatattggaggagataatgtccaccgcatattagtggacaatggaagttcagtgaatctcatcaactttcaagctttcaagcaaatggggttacaggagaaggatctgcgaccagtagttttgagtatctacggttttaccggagataagattgcattaaagggaatgattaaactaccaatcaccctaggaaccgcacctgtcgctgccaagtcgatggctgactttgcggttatcgatcagtactcagcatataatgcggtcattggccgtcctatcttgaaagcgatgaagattgtgacctctatctatcatctcaccatgaaattccttacccccgctggagtaggatccatctgaggagtccagtcagactcgcgagagtcctacaatgcagcactgaaactcgtagagaagaagtcagtaaacatgatatacatgttgaaagcaccacctccttcacaagaagtatttagaatcgaggagataccgcatgaagaaaaaccagacttggatccgagaatcctcgattataccaacaccgcaaaagccacggaggatacaattgaggtatcaatcgatccttctgataataataaagttttgaaaattggttctaaactaacttttcaacagcgagaaaagcttgtnnnntttctcaagcaaaacctggatgttttcacatggaaacattcggatatgtttgagatatcaccgcgagtcatataacatcgattgaacattgaccccgaagttcgaggtgactgacaaaagcgtcgcaaaatggaccccgcgaggtaccaagcgctcaaagaagaagtagattgccttttggcatgtggcttcataagggagtcattctacccaaactggttagcaaatcccgtactggtgcccaagcccaacgactcatggcgcacatgcgttgatttcactgatttaaataaagcatgtccaaaggacagttttcccttacctagcattgaccaacttgttgatgctactgcaggtcatgaacttctcagtttcatggatgcatacttaggatataatcaaattccgatgtatgaaccagaccaggagcatacctcttttattatagatcgaggtttaaactgttataaggtaatgccatttggtttaataaacgcatgagcgacgtatcaaaggttagtgaacatgatgttcgcagatctaattggccagacaatggaagtatatgttgacgatatgctcgtaaaatctcaacatgcaaaggaccatgtcacccacctgtaagcaatgttcgagatactacgacgatagaaaatgcgactcaacctcctcaagtgtgtctttggagtcggctcaggaaaattcctcggctttatggtaaaccagcgaggaatcgaagctaatcctgcaaaaatcaaagctttggcggaattgcgatctccgaccaaaccaaaagaagtttaaagccttacaggtaaagtcgttgcttttaatcgctttatatcacgttcctctgacaaatgcaacgagttttctcaaattttgaaaggaaataaaaagttccaatggactaaaaaatgtgaagaggctttccaggccctcaaatgcatttggggcaacccccaattctttccaagccgatgcctggggaaatcttatccatctacctgccagtgtccgaatacgcgattagtttggtactaatctgggaagaccagggtaggcagtacccggtgtattatctcaacaagcgtcttttagatgtcgaaacccattatccacatatggagaaattggcgtttgcattggtaattgcgtcgagaaagttacgaccttacttccaagcacatagcattgaggttttaacaaactaccttttgaggcaagttttagcaaaaccagaggcctcaggcaaattgttgaaatggacagtggagttaagccagttcgacatcaggtataaacccaagtttgtaatcaaaggacaagcccttgcagatttcatactcgaattcccaagcgacgaagtggccattatcgcaaaagagtgaattgatcctgaagtaccaaataatgaagggtggactttgtatgttgacaggcatccaatagtgaaggatcagggggtggtataatcctcataagtccaagtaaattcaaggtacatgctgccctcaaatctgaatttctcgcatctaacaatgaagctgaatatgaggctctaatcgcaggattaagacttgctcttgagatgaaaatcaagtatttacaagccttcagcgattcccaaattgtcgtttctcaggtgaatgtggaatatcttgccagaggaggtcgtttggctaaatatctcaccctcacttgtgagttactacaaaaattttaaaaaataattgtctatagaatacctcgtgctcacaattctcatgcagatgctttggcccgattggcctcgacaagagaagcagaattattcgatgtaatttctattgacgtattaacacatccgacgatcagtcgggatgaggtaatggaggttgatatagtcaaagaggtcacctggatgaccccaataatagactacttgaaaacaggagttcttcctaaaaataaagtagaggctagaaaattgcgatatcgagccgctcgatatgtcatttacgacgataagctctatcacaaaagtttcagccaaccactgctcaaatgtatcgatgggactgaatgcgaatatatactccgcaaagtgcatggtggcatctacgacaaccatacagggggtagttcccttgctttaaaaataatgaggcaagggtactactggccaacattgtgagcagatgcatcaagttttgccaaaaaatgtgacaaatgtcaacgaatagctacatatgtaaacaaaccaccaagctaactaaattctatcacaagtccctggcctttcgcagtctggggcataaatctgattggagaattaccaaaaggcaaaggaggattgaaatacgccgcagttgttgttgattacttcacaaaaagggctgaagccaagcttcttgcgactatcactactgctaaattacgggagtttgtgtacagcgccatcatctgcaggttcgacataccttacaagttaatctctgacaatggaaaaaaatttgactgtaaggagatgtgccaggtatgcgatgagttggtcattaagaaagcattttcagcagtcgcatatccacaaagcaacggtcagacagaggcagtaaataagataattaagcataccatcaagggtaagctcaaagagcgtaaaggtgtatggccagaagaacttccacaaggtctatggtcgtataatacaactcgatccacgactggtgaaaccccctctcactttcttacgggtgcaaagccatggtgccagttgaggttgggacaggatctctactaagagatgtatttaaccttagtgacaatatagaaaatcaattggttcaactcgatcttttagaagaaaagtgggatcaggctgacttaaagaatatggcctatcagcagcgaactctacgagaggagatttggttctgtgaaaagtcatgccaaacacaagaaacccagcacatggagtttttggtgataattcggaaggaccatatcttatcgctgaaaaaattggccacgcgatctatcaactttcagaactcgatggtactgcgatcgaaagagcttggaatggaaaaagccttaagtattattatcaatagtactcgcaatgtaattatacttagccaatttattttgataaatattctaagtatagggggtatagcctaccatagaactactttgtactattgatttcttgttataataaaaaaaaattctggaattctcgacagttcaaatgttttgcaagtcttaacatttttaaagttattacacacagctgtattaatattgtaaaaata

SEQ ID NO: 25551 - DNA, 4225 bp, Cannabis sativa
cctgaatattttatttcgtcacacatcaagtgaatgagtaacactactataaaattgggctttagaggcggtttttaagccaattcattagaaaggaaaaaaaaaatgaagaagaagatgaatagtaacgagaagtacgaacaatttctcttgtcaacaattctttatacaatgaagaagaagataaatagtaatgagaactaaaaaatgaaataatattttcttaaacaatgaaagtaagaacaatttaaaaaagaaaaaagacaatctaaaaaaattctggaatgcaaaatagaaaataattcaatgtttcttcactttacaaaattcatacttatatttataggagtttttaaaaaaatactgaattttaagcaaaagtttacaattatattgtcacacagaattttcttacaaaaatattgtctttttagaaaataactataaaataataaaacagaacaatcaaaacaacagtggaacaactaaaaaataactccgaaataaccatgaaaacttaatacagtaaacaatataaaatttacacaaaaattttgataaaaattctgcctcacaataaaaaaaattaaaatttacagcatatggtgtaaaaacacttatttatattggctctctaataaaattgtcttatatatattttcaaacaattaatattggaaacaaaatatacccttggattaacttgtagtttaagcacttaggtggcgtttgtgaagaataaaaatatatgaatattaatgagaatgagagtaaagataaaaataaaaatggaatgtaataaaatttaaaatacataaaaaaattgataaaaaaaattattaatttttttaaaattttgcattattagaatggtctttctttcaatttcaaaatagaatagtcattctaccaaaatattaaaaaggtcattctattataatgatatctaatattttaaaatgcaaccaaataatatggaataaaaattatttcctttctattaattttattcaatttaattacctccaaccaaatacaccacctaaattttttaaacttctctttcagtggtcataaatattaaatgagcattgatattaggcaccagtagtgcctagcaccttctcgacatgtcgcgttgcgattggctagcgatagtctctaaaagctattatattaaattatatgagacccgatactaagttggaccaatagcgatattgacacatagaaaggtgctggacatcctttagcatttctcatattaaattgacttattattaaaatatatatgatcattaattacgccatgaattagtcaagtcttcagcatcactcattctttctagatattatgtaatattttccaataataagacagaagatttgactttgattaatgtacatttataatgaccaaatacccaaaaatatttttaataaatatctaaaataaatgtatttcatatgattgtgatatatataagtattttttacacacaatttaaatattcctaacaacaattctccaatctccactaatatatatagtacatagcctagggttagggtactatcaatatatacaaaaattatatttaatatacatatatatgatcattatgattctctttcaacatccatcctttgccctacgtcttggcagtatgatgaggtatgtttttgtaatttaattttaattttttttatttaatttcctaattatcatttatagtattgaaatattgttattattattaataatttaatttattaattatatatttatatattatgtatacagtccgccattaaattggatgtttggcgttggtgattctacttctaaaatagcgccgccacagtcgccgccaccaccagaaatagcttctgctccacacttcatactaccaagtgatggcttctaatttaaatatatatgtctaaattaaagagttatgaataaattatcttcaaatatatatgtcttaactaataactaatatgttatgaattaattaattaatgtacgtgtgaatcaatctgcataatgcagaagataaataaatatatattttgtagcaatttcttttatttatgcagatgcaacttctcatacttaacttgtaaagtaatcatatatactttttgttgattaatgttatgataggtcaatatgtagtttgtgtctggctgatcatatttactactcatttttggcagattttgagtgtgtttggaaatataactgaaaatttgctttttacttttgaaaattaaaaaaagtattcttttaacacgagtagtagaggtattttacatcttgttatactcatattttgagcaagtaatatagttacgagacgtgtaaaaaagctggaagacgagccgactgatcgggttataaaagaagtaaatacgttcaaataatcttgtttcaaaaaatacaattggttgaaatattcaaactcatcctttcaaagataagggtgagatatgaataacaattaccattttgtaagaccagtatcgatgtgacactacaagaaaaaatatttacgataacactgaaaaagtataattaaatgcatcttataacattttagcttctgttatagaatagattccaaatcaataatctcacgatacatggagtatactgctcaacattagtcagttggaaatgatagataatgagtttttgaagaacttgcaatttattgacccatatactcgtgagtatgtttaaagactgagggacatatcagggtcgccctgagtaaaactgggccctagaaaaaaaaaattggaccctttttttaaaaataaaggcattttaaaaaattattaaatcaatatatatttattaaaagtttttttctttcatttgggccctcaataggagtggtccctaggcacggcctagcccgccttagcctagggccagtcctgggatacatacacaatataatcaatcttagaattatcatattatgactgtatctcgtgtttgtctccctcaacatcacagaaagaacgtgacaaatacttctgaagattatacatacacacaaaaagtaaactttttcaaaaaatggtcatttgtattgcgagatgaagaggcatagtcagtataaccacatatagataaagataagagcagttgtatgtagcggttatttatttttatcccatgtgttgtaaatataaaatgtaagaattatacgcgtttcatgaaaagtttttatgataagatctcaagggaataactgtcaccctaaaattcctataaatatagggacaaaatctagacaattaagagagagtcaatttcagaaagagagagaataattcagaaattttcgatcttgtattctgtaaacactttatgaaattccaaaaataagtagaactcgtggaatatgaagagttcactatacttattaagaaagttgaaattgtttttagaacatatcaaacaaaaacttttttttttttgaaagactacaacaattgtttggtatgttctcatattttaaaacacaattttgaaataagaaaaaaattaaaatcaatgcgagacatgatcttacattcattctctatttcttattttagtggttttccttattatttattggaaacaagcttatttgtaagtctttatagattttgtttaaggataagtcgaggaatactacttttttgtatctattaatcaaaaatatcttcatattttatttcattaaaatctacccacttttatgagtgggttgcctaatatattcttactctctacttaagtgtagcacatgatttacattaatttaatggggtataatagggacatcatctataaaagtgggtatatcttaaagaatatggaaatgaatgtaaaaataaaaacaaataaagtgaagtgggtatacaatgcaatttcgtcatttttttatggccattttttcggtatatatttaaataaaaatatttcacaaatacattgggcttttataaatatttataaagcctagcaacaaaaatttagaagaatacctcttgctctgaccattcagctgcatgaaccaccctcttcaacaacgatagcttcgagcaaccaaaccagtaggctaaccgaaaagaaatcaagccagacaaagaatcaccataaatatgagaagaagaccgtaagaaagcaaaacacatattttttaatttatgcaaaatc

SEQ ID NO: 25552 - DNA, 3055 bp, Cannabis sativa
tttagcaaaggttctatagatttgtgatttaggattttctatattaaagcacttttaggaatatgtttagatctgtgatatatatatttcttgagtgtttataaatcctaacatacaataaaaatgtaacttatatatatgtatatatatatatatcttattttggaacaagtgggaattcaattagaatgatattatagaacaatcaaaaaattaggtgctaaattcaacacattaatgctaatatttttagaactggggttgggatgtggcaccttagtaaatttggtcggtggagctttttatggccactgttggtcctaatggacctcaaagcggtgattcccaatcccttaactctataaccccagtttcctctcactagattcctcccttttttctagttgccttcttcgcatctccgcattcaaccctccgtggagcctcgtgtcgccactgtcattctaggcagaacacccctccgtggtccttcacattcaaaacctccaagctgagaagctcacaccaaagcaaggggagagattgtagagaaactgaatcgcgtgagacggattggtttaatttaatatttccttgttttttttttttttttaattttggttcttgtttttttaatggaaattttgtgccatggtttgatattgaagaattttttcgttggtgagtttgacgaaaatggatattaagtggtgtgtttgctttagtctttgttgaatttttaatttcatttacttttgttggaacgatgaacaatgtgtatgaagatgaatatcaagtggtctatttgtttgaacagttaattttcaatgttgcagcaggagctgaatttcgagctctaccaagaacaagggtcggcccaagcaatttgatgaccttaggcaaaaaaaattaaaattgggtctgttcaaaaaaattactgatcaataattcctaaattaaattttcaaaaagaaaaaatactttataaaaattttagaatcatgtgtattaggaccacatgattttatcattttttttttgtaagtgctaagtgtatatttatttttatatatatttattatgtatagtatacattataaaaaattatatttattatattatatattaaaaaataaaattattacatagaaaatatatctttaaaaaatgataaaaaaaaataagattttttaatatagggcgtcttgtacaatgacttaagctgtcgtatgcttagaccggccctaacgagaaccaaagtaattttttttttttaaaaaaaaaaaccaatcaaagtattttaatttttctcattttgttggtgtcaagttttttttttaaaaaaagaaaaaaggaggtgtaaatttttagactaaaatttatttgatacacaaaattacgtagtaattaatagagcattgctattaggcaccagtagtgtctagtaccttctcgacatgtcgcttgcgattgactagcgatactccctaaaagttattatataaaattgtatgggacccgatacttagttggaccaatagcgatattgacacataggagggtgctaagcatcactggtaccctttaacatttcaccaattaatatatatatctcaaaggtcatgtgatgaatatggtttagaaaatgtcttaatataaaaacaaaagcaatactatagaattattttatatatatataaatatatatttaaaattatgatgtatgcaatgagggagctagggggacccgatggtgtcgtcattattatatataaaaaataaccaaagataaataatttttttcctattttacaaaagtgtcttaatagtgtgataattataatgataactttactcttattgaaattcaatatagtgtgatagaaagacaatttcgccatttgaaaagtcaaaatatcaatattcactcaacattcaatactctctctctatctctctctctctctctctctttctctctctctccctctctcattaaactatttttttttatattttataagcttaagtaaattttttttaacactacactatattattcatctaaccaataataagtttgacaaatatataaaatttgttgataattttttttatatatttataatttttaacctcaaaattattatgtgagagattgtttttacatgtgttaaaaatattaatttttttacttgatatataatctaataattattttttctattatttatttaaatttactatagttttgaactaaatttttaaacacattctgtaaactaaaataaaagttacatagtttaacagatagaattgaacaaattctctatctatttttttttaaaaaaaaaattatctcaatagtacctaattaaatacatatttttgttctaatatgtattttcaaaaacataataataaagagtaattgtcgacatcaaaattcttttaggttttactttttatttacttaactttttttttttgtgacaatactcctttaactttacttctgattgtaaatttaagccgcctgttaaaattcaccattaaaagttagttggatttccattgtggacacttttgtatgcgatatatgtattcattaactttgagattttagcgccacgtgtatacatgtgtacacaatgacaattccaattaacatttaaatattgaatttaactagtttttcaaatttgtaagcagaagtgaagttaagggagtgatgctacaaaaaaaaaaaataacaaagagttatgtgtataaaaactaaaacataaaagaattcttgtcgccaattatcctaataaaaaattaatatattttcataagttattttgaatttggttagagaatacaatgattttttttaaaaaaaataaaataaatgtatttttcatttcagtgaaaatttgaattatggtaaaaattgaagaattttttttttaataattgactctaatttatcacataacataaataataaattttgggaaaaactctactactcacgtgcatgcttttattatataatgtaacttgatcaatt

SEQ ID NO: 25553 - DNA, 3892 bp, Cannabis sativa
  modified_base (398)..(404): a, c, t, g, unknown or other
ccaaaaatggaattaacaatctcagttcgctctttggagttcttgtccatgattgccaaactcttttatcaactatttcttctatcaaaattcattttgtgaaaaattcagcaaaccgactagcacatgttactaggatgtcttggtctttatctgagcgtagcatttgtgtgtctaacgtttcagcagctctgatggatagcatgtattccgaatactaaatttaatgaagtactcatttcataaaaataataataataataaaattaaataaatggccccttggaggtacgtacaggcggttaattaatggatttctgtattgtaaatgtaaactatttttgacatggtttcatgttatcgagggaaccactatatttatcattattattattatnnnnnnnattattattattattaataaaattaactgtcttcttcttcatcttcttcttctgttctctgattttagaaaagaatcagacttttcaatggctcacagcctcacacctttttatgacaaaaatatatagagagcatggggaatatgaaaagctaaaacatcacactacttcccatttttacttaatttttaatctattttcaaaaatatttaattaacataataatattatttatgtttgcttggaaagagagctttaacttttttaaccacacacaccacactacacacactataaaacgattgtattgttatttattgtacaaaacgatttgatcaaatgccttcttttctctatcctcaaattatcatttttattttatttttgttatgatttgataaaattgtttatttcacattcttattaagtgtttttatttcacatttttattaagtgttggtggtagtgtttaacacttttatgaagtgaccttttgttattaagttatatgctaattaagatttttatttaactttgatatataacaaattttgtcatttcaacttattaaaattattagattcaaaggcttctttctaaacttctggataaaaattcaggagaccatttgttacatattagagtttaagggtacaatttagtacatatcgaaatttaagagatcttacatattaaagtatgaggggtacaatttggtacatggatcataaccacgttagtaatattgaatgaaattaagcataaatctttgagactaataatctcaataattcagaggaaattttaaccaacttaaaaagttcaaaaaatatacttcaatatatatcaaagttcagagacaaatattctaaataacttaaattaaaatatgattagagattgaattaagactttcactaatctcaatataatgaatgttatccaccccataatgccttgaccataagaagtacaaggtggcaaaaattctctacacaagaaaaagttcttttaggtgtctaaattatttttagttttatataattaaatatcagatttaataaaaatgctcaaaatgaataaatgggaatttcttttggtcaaaagttgacagtataaactgatttgaccatatatatatatattgatgtatactggataataggtgtacatatatttccatcaatattaggtatatacatatacctcttattagaaagtgatgatgcatgtttggcaggcagcttttaggatctgtgttggaataagttccatgcctttgattttgagtaaattataacaaaattcaacttaaacccattttaaccaaaaacaaaactgttcaatccacacaacataaacacagatttagtattataattattattaaaatatatgtatataatccttcttatatgggttgtgtttctaatttatttacacacacacaataaacacaggtattctttatatgtcgtttaattcaaaaagtggttataaaaggaacaataataggtattaacaaagttatttattggttaattagaataatcaaaccactccattactaatggttcatacttttgccatacaaatacaatgtatatttcataaatactatttattttgccccccactcattttatgtttctactaatattatttacatttatgtgagttgttttccactaatattcttcaatattaaaaataaaaataaaacaaaaattaaaaggccaaacagactaaaaccgcaacgaacaagtggctagagcgagtaagcgttttatttcagttgccgcgcgtgaagaaacacgcactcttgcatgtcgccacgtgttatcagattttatctgaaatttggcgggtgacgtgctacgtcaccattagcaatacaatcactaagaaggacattttcgtcatttcattataattcaatggaagatttgctataacaacagtttattattgtaaattattattattagtaggtgtgttcctctattccaatgtggattttatatcttatatttttatatataactgaatagtttaccatttattttaaattttttaaaattatatgtaaaacataattaaaaaaataaaataaaataattttacatatattgcctcatgctaaattttggcctcgctctttcattgtgcctactactattcttatgtggcaggtggttagtaattttctatatgttatttttgaaagtaaaataagtatgacttgatattaaattgcaccaataatagtatatcacattttgtggtgcttgacattttgaagtacctcttagcatttttttttttattgggcattgaggaactttttttgttttaaaataattgtgtatgttgcacttaattaggaccatgtaattttttttagaaaactctttagtttaacatgtcaaaaataaaatggtaaagagcagtataagtatacgtaaaattttaagtttgtaagcggcataaattctaatttttttagcggtataagtattcaatatttgaaaaactgtaactttcattcagtttcatcagtacaaaactcgttattgtcggtctaaacgaaaacatgtagtatcaattacttgtaaattttcttttaatgaatttaaaatgaaatctgtattgaagaaactgtatgaaaattataaaataaagttagaataattatcgtgcatataatatattttaactttatttttagtaccgtaatttttttaaaaaattcttatgtggtcctcaatatttacaaaataaactatcatgaataaaaaaagaataattttatttacaacccacaaaataataaatacaatccaatatttaaaataattaagtttaaatattttttaaaaatcactcttaatattttttagttaaatttttatctcatattttttttgtgttaactttaatatttatttttataattttttttaaatcatatataaatttttttgataaatatattttttttaagaatatgagtttgaagattttttttttttaaattaatataactaaatatatataagataaaaaagtataattttacacgcctataaaataaaagagtcatgcgtgtagcatactgtttaaatcttatttttgacatgttaaatttttctgaaggtttcaaaattttttaagatatcttaaataactacaacgtatatgattaagaaaaaaattggactaaaagattcttcagataccaaaatagataaaggtacatctgtattcagtgtattttttttaggagaatgtattgtaaaattttgttatatataaaataaaaattattaaaataaagattcattgataaatttgtaggaaacaaataaaactcaaaaaaaaaaaatatgtatagggtacttttatttgcaccccaccaaattataaatacaccccattattagaaaaatatataaacttaaataatttttaaaaattactcttgatat

SEQ ID NO: 25554 - DNA, 1601 bp, Cannabis sativa
tgcttaatatttatacgattaatagatgatatctggaattttaaattgttttattaaaaaattaattattaatataaaactaaataagtagggtgatatgaataaaatagattattattattattattatttgttaagaattatttaagtgaattgtactatttctcataattaatattatttttatgtctcgatcacttaaaattattctcatcattctatctcacacattattattaccgtattctacttatagtcgatcgctaaaagtattgtctccaataagtttatttaatacataaaataataagttataattacgtaatttttatatataattatttgaaatattcaggtataaagaatagatctaaaaatattaaaaaaaaaaaactcattatctaatgaatgatgtataaatcgattgataactcattataaaatatttgtaattgatatattctatactcaattatattgatttgaaacagcagacatgcatacatattttatagtattaaatatgataatttcagaaagtggagagtacgtcgtgtgcatgatatcaatattattgtttaattcttttatgataattaattagaataatgttcatatttaatttcacgtcctatcttattattataaaagtatagtaatagtgtttatattgactataccaattttaccgttaataaaattataaaattacaatactaatgtttttgaatttttctctacataaaattttgtctggtatctattgaaggacaacacacctttaactcaactaataattttgaacttttcgctatatagaagtttattttgtatcgacaacacacttttaactcaaccaaaaaaaaaacatatataaaactgttattattattattaatattattattattgaaactagcatgagtaataactttagtactacaacttattctatctcttttatcacatatatacatacatagctatagtgcgtttaatatatactgaaaaattcacatatatatcacatcacttatatatatatatatatgcataattaaataatttagagttttttgtatcattttttttttcttgtccatatatgttcttttcttttgtaaattgagttgaatataatattttaatttaattatttattttaatatctttttaaataattatcacaaaaataattatgcctttatattttagttaagaatctctatatatacagtaatttttttttttattttttataataagtacgacttttatattaacataatattattttataatattaaatttaaaaatgttacatataaattttctattaaaaagattcaaaatttctcacaataatttttttaaagtagaaatttctcacaatattagtttaattaagtcagtggtatatgataattttgagataatttttccatttataaaattaggtatttatagtttaccccaaaaaaatatttcggtagatcccttatctgttttggcatacatgaaaattttttagttcattttttttttcataattgtgtacattgtagttatttaggacgacctgcaaatttttagaaaatttt

SEQ ID NO: 25555 - DNA, 4233 bp, Cannabis sativa
aatggcgactgctacctcagctgattcctctcttcgttcaaacggatccaactcttcatcaagatcttcgtctctttctttcaatcatatgttatccatcaaactcgacgaaaacaactttcttccatggcgacaccagatatatgctgccatcaaaggtcacagattaatcaagttcctcgatccagtggcagctccatctaagttcgtgacagcagcagatgaagctgcaaatcgtatctctgaagattttcttgaatgggatgttcaagacagccttcttgtctcttggctactttcctctatgactgaaaagatcctcactcgcatggtgggatgcaacactgctgctcagatctggtgcacacttgaggagtactactctgctcaaaatcgagccaaggtaagtcagttcagaactcagcttcgtcgcacaaaacttactggaaatctgaatgactatcttctcagaatcaaacacattgttgattctcttgcctccataggccatgttctttctcctcaagatcatattgaagccatttttaatggcctcacaagagattactctgtttttgtaacgtctttgtccactagaaaagatgagtactctgttgccgaggttgagtcattattaatggctcaagaaatcagaaatgagacatccgaatctgatcttgatatttcaaagccagaagctaatctagcaacccaacccaatctgtcgaaaccatcagctactcgaggaggatatcacaatttctctccaattcaatttggcactttttctggaggaagaggctctattcgtggtaactttcaccatcaaaacacaaattacagcccctatcctccttacagtactggtcatcaccaatttggtaatctctatcctccttcttatccttcttttgctaacaatcctcgaggttctcgaggaaattttcgtggtggtttctcaggcaatggaaggggctctggtcctcctaaagttcagtgtcaattatgtcacaaatctggacacacagtcaagcagtgcttctaccgattcgataaatcctttacaggaccagaatctttccaatcctttaatggatcagctgctatggctgagatgcaggcaatggttgcaacaccagatactgtcactgatcaaagttggtatccggattcaggtgccaccaatcaccttactccagatctacaaaatctgatggctccacaagagtttcctggtttagatcaaatccaaatgggcaatggttcaggtttgcatatctctcacactggtcacaactcctttatttctccattctcctctcaatctctccaattaaataacttacttcatgtacctgatataaccaaaaacttaatgagtgtatctcaatttgctagagacaactctgtctattttgagtttcaccctcacttttgttttgtgaaagatcaggttactatgaagactttattggttgggaaggttgataaaggtctctataagtttgatcaaccattgcaatctgtctctcaatctcctagtcattcctctactgcagcagctttgtcttcgtctaaggctgtgtttcaatgtcaaaccaatacttcaagtgtacctttctctgtttttaatctctggcataatagactaggccatccatctaaacaaattgtacaaactgttatggccaaatgtaatatcaattctatcaataaaaatgcttttgagttgtgtactgcatgttgtcttggtaagcatcacaaattgccttaccccaattcagaaactgtatatacagctcctttgcaacttctacacactgatctttggggtcctgcccctgtgatctcttctaatggctatagatattacataagttttgttgatgcctactctaggtacacctggatctatctacttagaaccaaggatgaggctcttccaacctttatcaaattcaaaactcaaattgagttacaactcaatcataaaatcaagtctctccaatccgattggggaggagagttcagagcttttacatccttagttgaatcctgtggtataattcatagagtttcttgtccacactcccatgaacaaaatggggttgtggaaagaaagcatagacatatagtagagtctggtttgactctattagctcattcatctttaccactaaagtattgggatgaggcatatagaacttctgtctatctcatcaataggatgcccactagagttctaaacaattttactcctcatgaaacattgtttcagaccaaaccagattattctgctcttaaaacttttggctgtctttgctttcccaacctaaggccttacaataaaaataaaatgcactacagatctaccccttgtattttcttaggttatagcctcactcaaaaaggatacaaatgtctagccaaggatggtcgaatatatatgtctcgagatgtcttgttcaatgaaaccaccttcccataccaaaaatctgctgctgtccccaaaccagttctttcacctatgtccttcacatctgcatctccacctgtctctttgtcaccacctgtcatctcctccatagttcacacctctgactcatcattccacccacctgacactccttctacatccattccttcatctcatcttccttcctttccccaaacaacaccagttaactcatctaatccttccactgcctcccaagtacaatcccaaacacctcattctccacctcctgttgtgaaccagcaccctatgcaaaccagagcaaaatccggagttcgaaagccaaaagtactcactgcatctcttgttcctgcaacagtaaaaacagctttacaagatccaaagtggaacaaagcaatgaatactgaatactatgctcttaaaaagaacaatacttggattttagttaaactacctcctggcagccagtgcataggttgtaagtgggtttttcgagtcaaagaaaatgaagatggaagtcaaactcaatacaaagccagacttgtggctaaagggttccttcaacaaagtggatttgactttaacgaaacttttagtcctgttgtcaaaccagaaacaattcgggttcttcttactgttgcaatttccaaaggctggacacttagacaacttgacttcaacaatgcttttcttaatggtgatttggaagaagaagtttacatgtgtcaacccccgggtttcattgatcctgagcatccagatcttgtttgtaaacttcaaaaagcattgtatggcttaaagcaagctccaagagcttggtttgccaagttatcatctgcactactcagtttgggattcactcatgccaagtcagatacctcactttttctcagaatccattctgtgcatacaacatatcttttggtttatgttgatgacattattgtcattggtagcaatgacaaagaggtatctgctcttatctctcaacttagttctttatttgccttaaaggatcttggcaatcttcattattttttgggtgttcagattacacagacagagaaaggcttgcatttgtgccaaactaaatatatacaagatctgttaaaccgaactaagatgcagggagccaaatcgagcagtacacctatgactagtggtctcaaactgtcccattttggcagtgataatgtcctcgattccactctatacaggtctgttgtaggagctttacaatatgccacgattacccgacctgatattgcctattcagtgaacaaagtctctcagtttatgcaaaatcctttggagtcccattggatagctgttaagagaattttacgatatctggctggaactttagactatgggcttcacctacagagatcttccaactatgatgtcactgccttttgtgatgcagattgggcatccgatcctgatgaccgccgttccacaactggttattgtgttctttttggttccaacattgttgcttggaaatctaagaaacaacaaacgatttcgaggtcttccacagaggcagagtttcgcagcctagctgctgttgtaactgagataacgtggcttcaatctctactcactgagctcaaaatctcattgtccacacctcctactgtctggtgtgacaatttgagtactgtcatgcttgcagccaatcctattcttcatgcgcgcactaaacacatagaaatagacctatactttgtacgggacaaagttatgcagcatca

SEQ ID NO: 25556 - DNA, 3976 bp, Cannabis sativa
aatactaggagaaatcacatctcgaacttgttgcccatatgttgttaaaagattttttattatctccataaaattttactgtagccgcatcgaattccactaccaatatacttttggtttttttaattttttttcttcacataaggacatttggattggcctcgtacttttgttttttgtgttcaaaatccattcttattagaaattcagtatgaataattgctgaaaaagttataattctgcaatgtaagagagaaaaaaattaatggactttcgtactaaattgagaatacacaagaataaaagatataaatataatcggatgcttattattagaataggaaaacataaaattagaccgaataaaaaagagataaatatacatatatatttattattcataatcagatgtatcatcttcatcattttctagatgacgatcgtcttcatattcctcaagtgtatcatcttcaaaatcaccatcatgaactaaaaactcattattcacccttacttgaagtagttcatccacattagcgttgacatcttcttcttcgagatcatcgtaagaatgaaattgcatattatcaagtgaagttcaatccatatacaaaaattagaagaattttcttcttgaaatattgggatgtcatcgtaattttcatttgcctgagcatctacattaatatttggaatatcccatatatttcgatgacagagtttatgtgaaagtttccattcagatctattcttatcatcattagtataaactaccatttgtgcttgtgacacaagtataaatagatcgtcttgacaccattgatcaccaacaaacacactagttgttacgaaaattactctacgcaagtgcatatatagaggtcgaacccacatgtattaaaattgattaccagaaaactagacttatatttctatttggatgacaaataatctttgagaggaaataataatgattgacagaaaattaaagaaaatagtaaatattgtttaattgtggatgagagattagagatgtaaatccagttgtttcaaatacccaattattaatgctattagctattcttttttctttaagtgatgaaaaattaattatgaaaaatatacttttcagatcgtaaagctcctaaactatatgtcatctattgcatctctaggatagaaaaatagatatttgcattaaaaaataatctaagggtcacacaagtgatgtgaatactctcgtttcacatcaaaacatttgtttgttcaattagaacattcctaatattcactttttaaattttatattaggataaatcatgttaaaagtggtcaatctaaaacatgtattaaaataaatatgaacaaatcacaaagatccaaaataaaaaaaaaaaatagcaaatcacattaatcattagaataaaatcaacaaacattcatcatatccctaaattgggaaattagtttataatttcaacaatcaaatacatatttaaactaaaaatagaatagaacataagaaattaaagggaagagaaagagactagatggaaaatttgatcggatcgccatgctcccttcaagagtccttttcctttgttttctaggcctgtttcctgaatgcctccatcaaatttcgaaacccccttttaaaacttcattttacaacttgaaattaagagaatatgaaaatctccttaacccgtacggatgtgtcgttgcgaccacaattagtctcgtcgtggcgactgtagtgggttgaaaattttgattctactaaagctcctcgccgcaaacaccatacttctcgtcgcaaagacaattagtctcaaccaacaatgggatttacgcgaccgcgctttagaaatttaacataattttttcccgatttccaattggctgtgtcccttcgatggttaactaattttgtaatttaaaatcatgagaacctaaataaaaataaaacaagcataaaactatccaaaaagtaacaacagagaagaaaaattactctaaattgtgataaaaaagtaggctaaaaatatcttaacaatttcccccaaactaaatccttgctcatgctcgagtaagactaaaaactaagttgacaaataattaattaagcctccctttaatcatactctcgctgccacctgtagaacctcaatcaattaatcaaccagaattttaatttcaaaactctaacaattaattcagatgctttctttgaacaatagtgtataaatgtaacttaaacttctttaattgaatatcaccataataattctactctttctatcttaccacaactaaatgatcaatatgctttcatgacttacccttctccactaatgtcaacaattcttacttggaatcaaaagaactttcaaggttataatgtaatgatttaggtaataggtagataaaaggttattttagcctatactattccataagcatactataaaccaatcaagcacccataataatctaatatctcaaaattattccaatttttaaaatgattgagaagcttactaacaatatgtccaaaatcactttcattcacaataattatatttttttttctttttttcttcttattttttatttctaaaaggaaatatttatttattttcttttcttttttttttcttagtgatgctgcaaaacactatactttcttcaatcgcttctcaataacccacttttccaaaaaatttactcacaaatctttcactcctgcaaacttattcctaagcttaggacataatttaaggtgcaaatggaaggaaagtatttaaaagatatatgttaggctttattaagtgactataaattttaaaacaagcttaagttcaactaggtaaactaggaataataaggtaaggtaggcttgaaaggcacaaatggtccaaagataattatgtaaatcatgttcgaaacaagcattgctgagactttcagcttaagagaataaatcatgcacgttctatcctatacgagcaatcatttcgcacaacacattagaacaattatgatactatctaaatattgaaaatttatatcgatataaagttttaaacaagcatccaaattaattcaaagagtcaaagaatcaagtactcagttcacatttttaatccatcccgtaaataacaacaatagcctaatcgatattggcaaaattaacaacacactaaatactgaaaattaaaaataactaggctcaacaagaaaaaaaaaacaaataattaaaattaagcccctacccccaaactaaaagttcacattgtaccgaatgtggcatataacccaaggagaggacttacctgagaccctcatcacaaggagttcaacgatggtggctagtcataaggagtgaaactaggtggctacgccaggtagtatggatctttgatcctaatattctactaaattgtgagggaatttaattgttgtacttggccctcatcaaattcacttcattgcgccatgtaattttacatttattttcattccactttccatccttccttatttactttaaaatttaatttgaattaggtgttcattaggttttttataaagttggaagtatttgtaggaaatttagctctaatacataggaattaacttctataattcctgcttcaagatcacacttaaacaaacaaatattaaatcaaaacaaacaaatgaagaacaaaaaactagcaaacacattaaagaagaaaaataacacaaatgaatcaagatagcatccagacaaaacaatacacgagaattatactgtctgaccctaagttcaatgtgaactggtcatactccagtttgaaatcattcccactaatctttattgataatattaatcttaggagctacaaggaaataatcacagtaagtcatccatggtgtaatccctcaacactcattaactcactaatccgagccaacataattgataatgttg

SEQ ID NO: 25557 - DNA, 1962 bp, Cannabis sativa
tatgagagtcttagtaataatgcaaaagacaatacaactaatactcgagtaaattatacttttatttgattttgactaaatatttatacaaactaagaattaattaatcaataattagtttttctaaaaccaaatagctaactcacacaatactatacatgaaaattggttaatttagaaaattatcttaaaaactaggcaatgctacattaaattataggtaatctttgtgtagaccaaggataataaccaagttgaatacgtttaatcaaaccccttcaatgaatttttaacaaatctatttggtggttatggtcaatggtcaagcattgactcacacacaagttttcttcttaatgaaaacatagaatgagagtgttttttcaaaaataaataaataaataaataaaatatgtgatcagagttacttttttaacctcggaattcttacacacacacaacgcctgtattaacatttattaaatctaacacacaaaacaaaaaaaataaaataatttgtttcaaaattccagtttccactatcactatttccaaattaagtttttgttttttatttgactaatcattacattatggcgtttctcattttctttattgtttattttctcagccgttacccaatggccaaaagaagtaaaaaaaaactaaaactgacaaagttgggatttgggaaagaaaaacagaaaggtaataagtgaaaaaaagaaaaatagaatggtggtactattggtaattataacaactttattgtatgtagtattgtcaataggggcaaaatagtaaaaccacattaaaaatataaaataaaaattaattaaaatttttactattttaaagtttaacatgtattaaaattttttccaagctattaaaatttttggatataataaaaattgtgtttctaaactttagcatctatcaaatcatgtctcattaactttaacatgtaccaaatcgggttcccaaattttttatccacatcagtccttctttagtaaatttagataaaaaaaatttaaattcaacaatctcaatagctcgagaagaatttttgacaactttaaaagttcagaaagcataatttagtatatgtcaaaatttagagggagaaatctaaattaacctaaaatgaaataaataaaataacttttggggtgcttctacattgtacaccactaaaataggtccattagtgcaaccctaactattttgatatttaaaagaatttattagtctattttttaatagtcgtatacgttatagttatttaagttattttacaaaattttaaaaaatcaaaataatttacaatatagaattcaacgtttaaattgtcgatttcacacgcatataaattaaaaaagtcatatgtgcaataaaatctttgaaccctattttcaacgtattaaaaatttttgaatttctcaaaattttgtaagatgtattaaatatctataacgtatacgtacattaaaaaaaaaactcagtctattttttttttgatactaaaataaagaatgatatatcagtacatcccttctaagaggtgtcttgtagaattttcctaacttttttgttatagagtgcactgatatacccttttatatttaagacatcttctaaaattttaaattttttttaaataatttcatgaaaatataatatctcttttatcttgtaggagtatgaaataaaaagtttaaattttatttttgctatcataaattatttgaatatcttaaagctttgcaaatatattaaataagtataatttacactattgtataaaaagattaagattaaaacaatctaaatacaaattttttaggaataagacaacccaatctccatttttcttttatttttttcataataagcacttacaaaaaataaagatcaaaattatcgggtaattttataatgcacctccttaaaaggaat

SEQ ID NO: 25558 - DNA, 3636 bp, Cannabis sativa
tttagaaaatacaatatctattttattaattaacaaagtaagaagttccggtaacttttacaaaacacatggatcaaaatgaaatggaccttacgaaaaaaaattgaacctttaaataagattaaaagatattttttctatctgaactcttaagatgggtgggcctaagcgcggtgctagcccacctttgcttagggtatcatatctcaaattcaatatgaaatttcacacattttagtttgataaataacattaaaaattgttaataaccgctcataaactagtcacgacgatatagtattagtattgaacatcttaacgtgtctaaataccaatcctcttaccctaacaatttcccaactctctcatgaaaccacaaaacaaccaaaaccgttgactcaaaatccaacggcaaaagtgtacaagtacactacttatacaactactacgtgtttgtgtaacttgtgtgaaagaaaagaatcttttggatttttggctttgggaacttaaaaaataataaaataaaataaaaagaaaatcactttctctctcttttcactatcatcatcatcatcatctttaaataccccacaaaatcatacacctttgctttgcccttatagaatctcactctttcttctttctttctcctcaaaactattagcttcttctttcaaggtaatatttatatataatttcaatttttattttgatttatttatttatttaatctatacatgttcatatatagatctacctttctatgattaaatatacataattatatatatatttatgaaattaatgaaatgcatgcatgttgtttttcttcttcatctttgtttttttttttcaagccaaatatatatattttttttttcgaaaatataattttcattgtaatgcagctgctctgtttttttttttttggctatgattttattaaaataaatttaattagatattactggatctgtggttaagatatatgaacattaaactcccatttttattttctgattttttttttttgttgtttgatgattttgcataaatttctgtatttttgttaatttttttaacgttatttattttctttattttattttattttttatcgaaaacatcgttgtttgttttggaactaccaacctgcgtgaatcattcaacacctttctttaaaacgacatttttttccttaaacacgacacctttctagaatagcgacaatttcccttaaaacgacaatatttttaaaaaacgacaatatcgtggaaaaacgacagaaagtgtataagttgtcttttttttaaagaagcgtaattacatagaaaaggagaaccattccaaacgacatattttgagtaaaacgacaatttcttcgaaaaacgacattttttttttctattttttttttctgaagaaaataataataataaaaaaatgccgattcagcctaggctaagctttaacttcatacacctctgcatgagttaatatcaatgtctgtggtgggtatattattcatttatatacgtatatatatttattatttaatatgataaaataatacaatttttcaatagttaaaaaatatcattttgtatatatattcgattaatgcaataaatttttcttgttttttttccctgtagacaccagaactgacattattacctttatacaatttataacctcttattttcaataatatatatatattttaatttatttttagctgtccactgtcacaatttttatttcagtgatttctgacatttcattacaaccacaactcacttattgaaattattacactctcattgttatgatttgaaattttgtgattttttagaggtaacaattttaggtcccaaaatgcccaaattgtccctagttatggcattgtgtaacattttgctctgttttttccctcttaaataaggtaaattttagctcaatttgaagtagtgtaacattttttttttgttcatttttctcaattaggggcggaaaaatgggagccggtggccgaatgcccgaggcgaaatccgagttgaatggtaataagaataataatagcctaattgagagagtaccacacaccaaaccaccattcacattaagcgaaatcaagaaagcgattccgccccattgctttaaacgctctctttttcgctcttttgcttgtgtctttcacgacctttttttcgcgtcattgttttactatgttgcaacctcttactttcaccttatcccgaaaccaatttcatacattgcttggccaatttattggattttccaaggttgtattttgaccggggtttgggtcatcgctcatgagtgtggtcaccatgcttttagtgaccaccagtgggtggatgacaccgttggtctcatcctccactctgctcttcttgtcccatatttttcatggaagtatagtcaccgtcgccaccactcaaacacggggtccattgatcgcgacgaagtgtttgtaccaaaaccaaaatcacaagtgtcaccattcgccaaatacttaaacaatccacccgggagagtcttaagcctttttgttaccctaacactcggttggcctttgtacttagctttcaatgtatcaggcagaccatatgaccgtttcgcttgtcattatgatccctatggcccaatctactcaaaccgcgaaaggttacaaatattcatctcggacatagggattttcattgccacattcgcgctataccaccttgtctcggccaaagggttaggttgggttgtgttagtgtatggtgtgcctttgttaatagtaaatggcttccttgttttgatcacttacttgcaacacactcaccctgcattgcctcactatgactcgtccgaatgggattggttgagaggagcattgtcaaccgttgaccgagactatggaattctcaatagggtttttcacaacattactgacactcatgttgtgcaccatttattctcaacaatgccacattacaatgcaatggaagcaaccaaagctgtgaagccgatattaggcgagtactaccgtttagatgacactccaattgttaaggctatgtggagagaagctaaagagtgtctctatgttgagcaagatgatgattctccatctaacaaaggtgttttttggtacaaaaacaagttttaggagaatttgttatgtaatgtccaactttgttgtgtactttgtttgtgtatgtgtgtgtatgtatttatgtagtagttaataatggggtatggcttaatgtggttaggggtgttgatttagtgtgtcttttttggtcatgtaatgaaccttgttttagtttaaatttgtgttgttatgtatgttttaatgtgtgattatatatatatatatattatattttattatattgtagttacttaattttggcaaattattaggataaggacccttttgtaattttattattatatttttctgaaaggagtccattagaaatttatactagtataatatttttttataaatgacattataattagtaaactaggaaacaaaagtttattttgttttgcaccactctaaataataacatacaattttaaatattatgtaagatatgaatgaacatatagtaa

SEQ ID NO: 25559 - DNA, 2964 bp, Cannabis sativa
  modified_base (937)..(945): a, c, t, g, unknown or other
  modified_base (971)..(983): a, c, t, g, unknown or other
  modified_base (2019)..(2021): a, c, t, g, unknown or other
gaaaagtcttaattgtgtctagggggacaataaaagaccccattagatgtcttagaattccaagcaaacacttaaagctctattcagatttttaatttatatcccaaatgagttgtcaaattattatgtccaaaactcctttaatgtcatacaaaatcaagcatgaaaaaaggaaaagaaaaagaagaagaagaagataaacttatttgagaaaccaagagctaacttgtaacactatggtgttcttctttaagggggcaaattttatattcaatcaagttataagcattatctttgtttcatgacattcataatcaagatccccactcttatgataaaggataatggtcccaaaattttggcctattaggctaacaaagtatgagtatatataggcacatatttagacaactcaactcccttgaaagtcatatggtggggaagataaaagttagggaaagttaatgaggtgataaattctaatctttctaagccgagttttgttataagataatagtagtgcttggtactaccacgaagtagtattttgtgaatggttaacgatattttataataattattaagttaaaatatgttaggttaaatacttaattacatcaataaacatataatatattatagtgatactatattacaactactagtgccttctattctcttcaaaatttgccaagcttttttctaattgcctattggaaatatcatttgtaaattgtaaggtgtatatctttaacccaatattcccataaaaggctctaaagaaatgcatattaccaaaaaaaaaggttgccaaaagcttaatcttggacaagaaaatgtcataaagtaaaggtgagagccatagttgggttttaagtctagaactttgagatatttaggtaaattaaagaattttaaatttaacaatctcaatagnnnnnnnnnaatttttaatggccaaaaaagttcannnnnnnnnnnnnagtacatgtcaaagttcagggggataaattaccaattagccaaaacaaaaacacaattaatcacacacaactctctctctctctctcttccctatttctcgacctatctcggtggatggcagcacctactcatcatcaaaaagaatcacacacattcaccttaataatgggtaagtattgttcaaaatttcttaaacatttaaattagtatgttgtttattttctatagatctatgtggttattgtttgtattactattgatgttattttgctagttttttctttgaaatggtgaaatttggttttctcaccaaactgagtttcttaacaaattatcgatatttttttgattattcatattcaccgatatcttcttaataaggatgacaattttttatatattttcaatagtttattgatactattttgatgattattgtaccaaatttaagactgaaaatttttggtaaatttttaatagtatattgatactattttatttcaggacaaaatatagcaaaaaatatcaaaattaatcacacaagagagaatcatcgaaaattcactgatattctatcgataaatcattgataatcaattaaaaaactaagcaaaaataaatatcagtagttttctattgataaaccatcggtagttttctataggattttatagtatagaaatatatatatttaaaaaaaaaaatcatgagaacaattcaataaaaagttgaaaaatattgaaaaaccaaagaatagtaaccaggtactcttggggtaactaaatgggtaaccaattatcttatatcgttttccatatttttattttttttttaaaaaaatcccataaaatattttttttgataataaatcatatttttacaaactataccttaaaactcatacaaataaaaatttcctctaactaatgtattttcttgggtttcattgtaaattttgtgtattttagtatgaatcattttaaattcgaattctcaagttgtgtgtgtgtgtttttttttctcttttcttttttnnntttttttggttgaaaagtgatggatatgaagaaataaaacaatatggagagatcattttatccaaaaagtttatttgaaaagcctggaaaatttgaccaaaaaaactataattgtattagaacacattaattatgaagggataaataaattcctccaataaagtattaactttattgaagttatttatgagaaaatacataataataatgataattaaaaaaaagagtaatggaaaaaagtttatatttttgcacatattatagaaaaaatcataaaatgtgtaatttccaaataaagtattagcttttggcttttgcttaaaagatttatatacttatgaatattatcaaaaaaaaaagatttataagttacatatatatgcattagcatacagataggaaatttgtgcggttaaagcctaaaagggaatatttttgaaaaataagatgtaatactaattaaacaaaaatagaaaaaaaccaaaaccaaacatcttcttgaataattgacatcatttgccaataaaaatgaattgttctatcatgattagagtcttttctatatgtggattccaactaaattatcaaatcaaataaagttaatttgttatctatgttaagagagatttagtaatttttagtaatctttcttaaatttattttgtaattttcgtcttatttggactttttgacactagcacgaatatatagacttgaacaagatatgataaaaaaaaaaatatgaacacacaacttgacaaatttgaaaaacacagcaaataagcatgaataatctagctcgaatgtataacatgttaaaaatcttttaaattaatgataatataaatatttattagtaaaaatttaaattttaataattaataatgtttgtcttgttttagtaattttaattatttttatattatgttttgtaaaatattat

SEQ ID NO: 25560 - DNA, 3305 bp, Cannabis sativa
tagaaatcataagggtacctaaaaaaaatacaagtaaacaaaattgacatgtgtgtagatagatagatcgttattatattatactaattatatattttatacctgtatgctagatcagtggttgagccaatatctaagcgaaaaagtagtgccaaagactcagagtatccagacgtagcagtgtaattgtaaatgttactactgaaaggcctaaactccaaagctgaaatgaatggagttcctgatccaatatttacaagacaaacgtggaggaagtctcgtgatgcaagatgaatgatctcacggatagaacttatagacacgttgataaatgtcactttggtccataagttaactcctagatggagatcgaattctggtgctgtattttggttgtcgtaattcccatgaaaaaatgttgctctgattaagtatctagttccttttgtgacatttactctgtagcagtttctaattccttctggaaagcttctaagatttttcacttgttcttgaacaccggttttgtattcgggtgctatgctgtgacttgaacctgttgtgatgaaaggtacgtctgagatatatttaagctctgttgttggctctgtatagttggagttcaatggcagaccacaatctaagctgataaagcctgagaacaaagattaatattagcattatgtatatgtattatatatatatggtgattttgttggtcatattatttacctgattggccctcttgtgcatgaacaataagtactgcagcaaaggcattgagcaacgaaaagaagaaaagcgttttgtacatcttcattactctcatgttgatctataagcttagcttgactaaatgtaagtattagaagcaattagttatatattataaatatcaccttgctatatatatatatgtgaaactaataataatgccaaagtttagaaaatggactatagcactaattgaaaatatatgctgtagaagaatatacaatacaatgtattttcatttcatgcaatataagagaattatgtaaatgagaaagtcaaagagtgtgagtcaacaaaaatggctttgtataccgacatatacatattcgtggccatctttctttcttgtttttttcatttcagtttgtttatgaaagatcgatagatatttcttaacttttagcaagcttaatttggttccagtttttggactagcgagagaggaagcattgccttcctcacccaaacgaattatcaacttgcaatgatcgatgtcaagttgttttctctctcccaaacacggtgctattactatacttgtggagcgaaatcatcccctacattgtaccatatatattttatatttatatgaagatataaagttttgactcagaaatatgtgttagtttagagtggttttgatagtggaccgtgcattaaacagtctatattcattggatatattgtagactagcatcaaatataattcattttgtaaaaattttgcttttatatttattttgaagtcaatgttaatatttaattattacattacaaacttttcacatttattttcattgtttatataataaaattatttttattatatttttaataaaattattaattaaatattaaattttacatcaaatcttataattttcattagaacagtacacaaatatatcacaaaatcattttatactaaatataatacaatttttactttcctcatttcatcccatgatatatgcttgctaactttttttttttttttgtttctagtaaataaacggcatagtcaaaccaaattaagatgtataataaaaggaaaatattactcttcctccttaatggatgtggcttactaattagtctttgaaatatattctattttttttttaatattgagatatacatttgtatttgtcattttgtcggatgctaatatacaacaatgtttgttagttttcttttcttgcaacgatttaaatataaatatatatttttttactaaacagctttttttagggttggttagtatgtcgtataagggtcgtattatattaaataataaataatattatgttgggataaaacaatgtattaattattacgagtaaaatttttaatacaatgtatgttgtattatttaatacataacaaattgtctgtattagcttgtattataatatgtgcaaaggattcagggtcaacaccaatctccaatctggacccgaacctgaaccaaaacccaagacctgagacccagactcaaacccgaacctagacttgggacccggactcgggatgcggacccgaacccagacctaaaccggacctggactcagacctagactcagactcggaccaagacctaaacctggacccatagttggtgttggggtcgagtgtattgaaaatatattataattttatacaatctattaatacaagtcaatatcaaacatagtattatattaaataatattaatacaatacaatacgacgtaacaaataagtcatagtattgagttttactttattgattcttttatttcctttgaatttttttattaaaataaaaatcaattgtgtttctgtataaaaacgtcataatattgtaataaaggacagtaaataccctccgtttccatagaaaaaccaacacaaacactggtcaagaagatcctcatctttacttatattggacagatgactagattttggaaggtatattattagctttgtttgtggtgacaattaattcactggattgattccgaaaatgacaatgcacctttggaaccaaaggtttctatcaagagaatcgattttaacgacttaaagcgaactgatgaccatattattgcatcttgaaacacagaatttaatttattttacttttgttatgatgtgaaagaaaaattggtatttttgcaagaacaaagtggaatttaattaagaggtaacacaattgtgccagcccatcagctttctgtcttgcccagctcgttgacccatgggctttgactggcacccgcttgccaaagctgctgcttgcctcccctgttcttcccacaatcactcgcctcctgtaccattcttcaatagaactctgaaaaaggagaacactgatatggacagttttatgctttgtgattggttgagagtaatttttgtaaggcgagatacggtggatacacacgcatgagattataatctttggggaacggtatccctgattaattaatgaatagtattagtttagtttagttttttttagtaaatgaatgtgaaaataacgatat

SEQ ID NO: 25561 - DNA, 2066 bp, Cannabis sativa
gatcttctccaaggatatactagaaagaatatttcagcgagatgtatcatgaaaattgaccttagcaaagcttatgatacagtagactggcactttgtggaggagctttataaacatctttgttttcctcaagatttatcacctgggttctggtttgcttgaaaggaacaagatataatctccttatgaatggaaggattcatggttctttcaaagggaaaaaagggtctccgtcaaggagatcttatgtctcctctcctttttctgattataatggagtacctaactagattattagctcaaaagtctagtaaaaaaagttttggttatcattctcattgtaagcacttgaggttattcaacctttgttttgcagatgatttgattattttatgcaaaggcaattccaattcagtgagaggaattcaagaagctttcatggagttttgtgattccacgggtttctctgtgaataaatcgaagtctcatatctactttgggggagttaaagagaatgttaaggaagagattcttgaaatgatgtaaatggaagagggtacttttccttcgaaatatctaggggttcatctttgtcctacaaaatggaaagctttggattgtggggtgatcttggacaagttgaacaagaatctcaactattgggctagcatgaatttatcttttgttgggcgtgcttagttaattcattcggttttgcttagaatcagaaacttctagatgtctattttcattctcccatccaagattactgctgccattcataagagttgtcgtaatttcctctggggcactaagggggataggagcaagcttcatctcccttcgtgggagaaagtttgcctccgcaaaaagctgggtggagttggttttcatgaaggcaataaatgaatatagtgtttatgacaaagcatatgtttgggtgatctcaagtaaacaagattgtctctgggttagatggattaattctatctaccttaaggatcataatatttggagcattccaaacaatcagggaatgagctggtattttaaaaagttgttgaaacttagacaaatttctagtgaagcgtctttgaggcttgctattaaacgaggtaaatttcgggttaaatatttctatacctctcttggtgatgctcagaaagtagcttatgctgaaactttttggaacaagcttcttgtgcccaaacatagattcatctattaacaggcctttaactcaaacctgctcactagagatcatttgagccgattcttgcctatcccttcagctctttgtcctgtttgtgaggcgaattctgaaacacattgtcacctcttcttgaattgcatattctcaaggaaagtatatgaggaaattagttgttggttgggtactattcaatggtctagttctttcttcgatctttagtaacggtgtctgcaatcgactagagatttaaagaatcaatactatttttttctgttgctctgtactttatttggaagaataagaattaatatattttttagtgtgtagctcggctaaaagaattagcttagagattagaaagattgttaaatgtagagttttgagcctttggcaccttaaagttaacaaaaaggataggtatattctaaatgtagttgaagactgataatggttttttgtttgcaactgctgctggtgctggctacgaattggctgggagtagctgttgctacttttcttgtttgtaatttgcttggtttttgaataaaagattcctcgtgttaaaaaaaaaaatatttattaattattttagtccacataaaatattctaaaaatatactctaaaatactatacatgaatgtatttgttattttttcaattaattatatttgtatttttaacaatcaaattttcgtccaacatattttataaaattcaggctaattaggatttttgccccctaaactatgacatgtaccaaatcatgctccctgaacttttaagatcgttaaaaataccccctgaactattgaggttgttggattgaaggactttttgttggaatttatttta

SEQ ID NO: 25562 - DNA, 988 bp, Cannabis sativa
ggataatgggcacattgctatcttcttccatgtccagaacaataaaatttgctaggaaaataaacttatctaccttgacaagaacatcttcgatgacccatcttggatgggccaacaaacgatcagctagttgcaagttcacgattgtaggctttgcttctcccaattacaatcttctaagataagaatgcacccatctgaccaagaatacataagcttctgaacagacattggtctatactattatagagttatgccatttggtctcaagaatgttggtgctacctaccaaaggttagtcaacaagttgttcaaaatatagatcagacgaaatatggtaatatatgtggatgacatgcccatcaaatctaggaaggctgggggcacatagaggatatggataaatgctttaaaatctttagaaaatacaacatgaaactcaatccctttaagtgttccttcggggtcagcttgagtaagtttcttggattcatcgttgatgcccgaggaataaaagccaatcaagagaagatttaagctctcctagatatgaagtcaccaacaaaattgaaggaaggacagagcctaattggttggatagccatacttagcgattttcaaaatcaatagacaagtgtgctcccttcttcaacatccttcaaggtaacaagaagtataaatggatagaggaatgtgagattgctttctaagaattaaagaagcaactcaccagcctcccatactctcaaaacctttggacggagaagaattagggatgtacctaggagtcactgaatacacaagtggcgtggtgataagagaagagaataatgttcaacatccaatttattacatcactaaaagactagttgaagcagtgggtcggtaccccctaattaataaaatcacttactgtctgatcttagccacaagaaaattaagaccctatttccaagcactgttcgggtgtacactgacaaacctttac

SEQ ID NO: 25563 - DNA, 1690 bp, Cannabis sativa
  modified_base (289)..(301): a, c, t, g, unknown or other
gtcatgacccaattgtcttaagctttgataatatatttatgattaaatgtcacactttaatttttttactacaaaaaatattacttttagttataacatatatattgtgactaaaaagtctctaactaaatgtattaatcacaataattacaatttattgtgattaaatgtatttttagtcacaacaagtgttgtgactaaaactaaatttgtaacaacttgtatctaaatattatatttcataattttttattgtgactaaaagctacatttagtcacaaaaaatttnnnnnnnnnnnnnaaaattatcactaaaagtagttatttttcatagtgctctaggaagatattacttataaatgatcctttaatgtgtatattacaaaataaatagaatagctcctatatctataaagtaaatattagtgataaaataaggaccactcattaatataaaataacaataatatcctcacagttatgtagtcaccgtaataagtcaatagataccacaataatatctagcatccattactcttcatatctaactagtacatagcaactttaagtcattcagaccatccattcaagtttaaatacaagattagtttttaatggaaagcttcataaataggataagactaaactaataacaatttttttttcctcaacgataccatcctagcatcaagctgagttcttagaataggagaaaatatgaggtgagattataaagtccagtaaaaaaataactaatatcaaaagaccctttatttaaagaaaaattcctgcatggttagcttttaaagtaaaacaactcatcaccattatcaaaatatataaacaaaatagagagaccacacataattacaaaatcaagcttcaaatgcatatcacactgtccactagactcctagctcttaataccaatcataaagaatgacatcctaacctgggtagtcgcgaaccacaaaaatattagggctcgtattcaactcactttctgtacaaattctaggtcttacacctacatgtgagtgcatacctgcagatctacctatgatgacatagagactaggtcgtgaaataataatatgcaccaaacatacatatgactctcattaatataaccaaatgcatgcattaagaacaacaatatcatatatttcctttattttagaaaattcagtagcataacgactataatttgataaaactcaaaaatcataacctacatagatgatagtaaaagaatatatttgacactcagtgcctccagacaatccaaaaaaatgtgcgaattaagtttttatatttttcaaatatattttataaatcactaaaattggaatatgccacatgctatttatcacaataaaatcaagtccagtaatcaagttgagtccctacctctcctaagtcattaaactttttccaaaaagatgatcctaagttcttaagtcttgagttccaatcgttttagtagtcctccaatcttagatatcgcttctttcacctatgaccatcaaatgactacataattatcatcattgcattctacattcaaaactaagtccaatgcatagaagtgaaataatgacttggcttaatagagataaatagttgagtactcctttcagtaattatattagcttactgaaatatcatttataggtagctaagtgattta

SEQ ID NO: 25564 - DNA, 4765 bp, Cannabis sativa
tgattttcaacctacagcccaagttgtatttggtcctggggcgacatcatctcccataaggtcatttggggtacctaaagatggaagcactagtagtaaaagtcgtgacttagacctcaacgagtctgatggtgatgcacaaattcccttctacttgccctcaaaaagttctgaatctgcagtaacatttcatgattccaccaacaaatcaactcgaagtagcaagaaagaatatattgaaccctgggtaagaagcactcaagctgatctctctctatctctctgtcttagcacacacatttacattcttgcttttgctgttttgcaggattacaacagttactatccaactgtccttcctctgaggaagccttactctggaaatccaggtatcatttgttgaaatgccttcttacgtaatcttcctagatatctaacattccgtatctgtcttagtgtgctcatgcacatatatacaagccttttgttctgtcacatattctttgcctgagttatattctttgtcatatattctcttcccactctagcctttagacactctaattgtctcactagagagatgttatgatagaaaagtatgtagaatatttaaatccagaatgaaacgtggaagttagtcaattatgaaatcttaatgttacaagataccaattcacttcacttttgctaaacattttatctttgttatcattgacttctaactttttacgatttccatattaatgtgttgaacaacattgcttcttttttcctttttggctataagatcatcttaacaaaatcgaatttggggaagctgctacaaatgctgagtatgatgaggatgctaccaatgctgcttcagaacttggattgatggtacgagagacttatagcaaaaatgttgaaacacttgcagccgatactttttgtcgaatcttttgatgtgaaatgtgatgttgatgacaggaggaaaatacagaaggaaatatgttttggttccagtttccccgcattctgccaacagttaagcaatcagctagtattaagggaaaagagaaaattggatcatcaatatcatcaccgggtccaagtgcttcaagcaaaggcgctaaattggaagagttaccaaagggacatgtggggaaaatgctggtttacaagagtggagcagtcaagttgaagcttggggatgtcctttatgatgtgagtcaaagcattatgattaattttcatatgactcgtatattgagtttctatgtattttcgttaagattcgaagctctcccctctgacacatgcgcaataatttaattgagctaggaaaatcaaatctctatgcatatagtttatcttgcagcaacaaggactatgggacatttttcaactagttggcaggctgaaaaagctggcaaactgttagcttttttgggctgccgatgaattgaaaaaagccgcatgacaacccttcaagtgctggtcagcaatttcatgtcaaactgagtacaacttggttttggttgttatgtacgtatgcaggtttcacctggaactaatgtgatatcagctgaagatgttgtggcaatcaaccctacagagaagcagtgtggtcttcttggagagatctccaaacgagttgtggtatccgctgatattaattcccttttgaattcagtgattgacttgggctaaacgagttgtatattctgaaggtagagctagtaaatgcaatgtatatgtatctgggatatgatgtctgagtaaatttgtaaccagaattgctgacattattgcttgaaatgatggtgacgacaacgtagggataacagattatggcgttgattattagagcccaaccacctaatttttctacttgaaaaaaatggctgaatttagaatgatgtaaatccttttcaaaaatgatcaaacaaacaattgatagaaagaaaaaaataattagaaaacacaatcaatcacacaaaataccaaaacctatttcataaagaaacctagtctgttaagtctagatttactacctgttttttttttttcatttctttagttatgttactagaattaacaatgcttttgctgggctggcaagaagtgctacagtttttagccagaattctggttttatttcgtatcctttggttcccatcatcaaaggattttttttttggaacactatcgttctagaaagaaaggacaacaaaataataaagtagcaaattttgcctattctagctaaatctgattttagtaagagatttgcagtgaaaatcagtagaaatttactacgtagtttttttttgtggtgaaaattcttatgcaaccaaattatcaaatatgtatcttaaataaggattatggagaataggagattacaaagtcataaaagaaaaagatcttaacacttgaaagtgaaaatccacatgtgatgtcgtcagattgtagtcaagccttgtgtgatcgagtaatgaccacaactagaagaaccataatggagagcatgaaagaggtcctcagtttctccttgaaaagatcagccatttctgatgctgttgtcttttccttctctggtggttgaaacaagtcgttcattatctttgtaattttttcaattacttgcatgatttttcctctggtgctatcaaatatcaatttcactatatttgtggcttcattacattcctccttaggcctcccatcccaattcttttcgccaccatcctcagctgcacataaagtttattattggattattattattagggaaagttaataaagtaagaatggtcattcgatccgattgaacatatttatcctaattaagtaagattttaaatcaactaaaaactaatttcataggatatcttctactcaatagtaagatctttttgttcaaaaaggaaaaaatagtaagatctataattctaagcaagacctctaccatcaaaaataaaaatgatatgttctctcttttggactgtttaaattctagcgtggaagaaggggtatggtaaacaatcactaactttttttttttcaaaaatatatatgttaatatactttttttttaatttctaaatataaatatatgtaattgaattgactcagttgttaattggattttgaaagtattatccgatattccattcaaataatttttcatttcaaatccaatcgaatccaagttttgttaattggattagattacattgattcggtataattaaattggtttggatgatgctcaccattagaggaagaacaacaattgcacatgcatcgaatgaaaaagtccaagctaggatcactaaaacatatttcaattaaggagcatggccaaataatagagttgcatggtatttaaaaggacaaaataaaacaaaaacttaatggtattgtggaaatgaaaatgctagctcaagtggttaggtagattaaataaggtgtcttttaagctagccatgcaaggatagcggggaatgagaacttgggtggcgtttggttgaaaataataaaatggaatggaatggaaatgaaacaattttcattccattcttttgtttgtttgcatattaaagtattagaatgtcattcaattttccaccattttagtggaatgactatttcattttgaaatggaaggaaagactatttctatgcatgatgagaaaaaatttaataattttgtttatatattttaaattttatttcatttcactcctattcatatttctattcctattcttatgttttcattcctcttaaccaaacgccaccttagagtttgactcattctttcgatagctatttttggtgcttttaaagctggccaagtttttgaacgaagtactatttcggaactgagtcgtgaattagattggatgggccaatgggaaatcaaattaggagagttcaaatgtaatatatttatacaagaaggaaaagcaacaatatgttttgattgataaccaaatttattatacgaacctgcagaaaatgactctttcagctccctcactacctcattgttcataacagcattccaaactgcttcatcagaagacaatgatttcaccattttctacacaatcaaatcaaataacaacacaataagaccatgagatttttcaccatagttctctacatgtacataatttagtgcatcaagttatctagaaggtaaaaatcccaacatcttaactatttcaactcccttccaaattccaatctccatatttggctttggtaggaagtactacttcaaccttacaacttatcatatgagaaagtagttaaaagttaaaacaatagaaatcaacctgtactaatggctcagtccgcaacagattgaaagcatcataaactcgatcggatccatgatactgcagcaatttagaattacacatacaaattgatggttccatccaatctgaatcggactcatcagacactaccggagaaactactcgtgctaaaccagttggactcatgactagatgatcttcatgatccctatccaattcaagagaaaacctatcccttataaggttggagtaagaatcagcattgaaaaccctgtaaacaaaaacaccattggacaaaaatcatgtatcacacaaattaatttgattgtgttttgcagtttgaagattacattctagtaacattatcacacaaattatacagaacaaaacaatcctttgaccatacacaacaagagaaacagtattcctaaatttgattaaatcaaata

SEQ ID NO: 25565 - DNA, 3154 bp, Cannabis sativa
  modified_base (1469)..(1471): a, c, t, g, unknown or other
  modified_base (1756)..(1763): a, c, t, g, unknown or other
  modified_base (2292)..(2296): a, c, t, g, unknown or other
tccaagtgttgatatcttgacttcacatgattaactattgaaaaatgataaaagcattttattttatactcatttttgcatcttttttttaacttaataaataacatgtgtatttcagtggggttttttttattgttggaaaaattatgcattttgaatatcaaataattaaatgatgtccatgccataaatcaaggaaatgagatatgtatataatgtatgtgtataagagaaatgaaagtgtgtaaaagagaatggaatgaaaaagaaaaaaaggaatgagaatgagaatgtgtaaaagaaaatggaattgattatgaatataagttcatatggcatcatcgttttttaattggtacaatcaaatgggggattccaattatttcattttaaacaaaaatataacagtcttgatattaaattatataagagtagtttattcaatgaagagttgtaaagattgtgcattgacatgttttaacatattaaaaaaatgaattgtctgttgtaaaagttgtattaaatttaacattgacttcaatttggtacaaaataaataatgaatcaaattcgcgctataataaatgttaaaattttttatttacttatttgttataaattaataattttttattattttttttataaaaaatggaaaatttctattaataggccaattggacaaaatccattacatgaaaatatagcttgtagaataaaatcatcaataatatgcttatcaagtcgcttacaataaaagggaagaaacccctaacatcaaccttaactaaatatccaaaaaagcacgtcagcgatgaagcattaaagaaatgtaaagtatatactaagttttcaaactaaatagatacttgagagagtttatctatcaatagctattaactaatgattttccaataaaaattaaaaaataataattccactatttaaataataaataaaggtaataacaagactaactatgttttgacactctttcacaattggagcataacacaaagccaatagacaaatctgaaaaaaaataagacactcttgcaaaagcaactcgagccattcaacaaatcaccaattacccaatagagatcaaattattcccctatcctcgtaccgttgacaatccttgctaattttggaaagtggtgtaaaaatcactattgaaagtaaaaacaaaacatatgaattggcataactaaataggaattagtggtactattccccaaactcatcaccacctaagacccatggctgactagtagggttgttcatcaaactgctcaaaccgcttaaactgcctgcattaccaaaaaatatagtttgcaattctttgcagtgcaattgcaatttgaatttttcctaaaccgcgacgtacggtacagtttgtagttttaaattgttgatatgcggttctaactgcattgcaccacatattataaaaatactaatttttnnntttatttaggtccaatatgtgaagcccactaattattgtattgttgaaacttaaaactttttttcatatttattttcaagctttatggtatttttgactggtattgctcaaactttgttgtatttgtgataatttaattatttggttatagtccaaactgcaaaaactgcaccgcaccgcaccattttttgcggtgcagtttttggggttttttagttttgcggtacaggtgcggtttgggaaattagaaaaattgcatctacgggttggtttgaaaaaatggtnnnnnnnngcaccacccgcaccgcgaacaaccctaccgaccagatccgaacccaccccctctgactgatgtagtgtgtgaaactaacatcctaccctaatccacaatagtcatgccatgaagccacctctcgacaacccaacattatcaaaagtcccgtaaactagccaccttaaaatcatatttgacttgtcccgtcagagaagatagcatctccaacagccgagacaacctagactcgacacgagaacgtcaacgagaaccccaacaaagaatcgcaacacaaggaccgccataaactagagaatgatggcattagatctcacaacaaacccccaagagcaatggtggcgaaaagtagaaataaagcccccaacaaatcccatctcatatggcaatcactctacccctcctccatcccatccccaacgatggccacaccaagcccaaaagaaggtcggtgagccctctccggatagggaaacaaagactcttagtggcagcatcagaagaaaacacgagagagagagagagagannnnnagagagagagagagagagactatacccctaaaagcactcacattaaaggttttaaaatagagattctttataatatttaaagaagtaaactaaaaacacgcaacatcagatgctctaaactcattctttatttcaaaacttctttaaaatttactatgcatgctctatatttatggaatattattcattgttctaaacttattttattaattttttggagttttaattttttttttatatgggaatgtgtgtaaatactaataatatatgtttgaaatgaataaaatatcttaaaatttgaaaaaaatagagttctggtaatttattttaaagaagttaatgtatggtgtaataaaaaatttgaggtaacataaaaaaaagttgagttttgtgatgtattttaaatgatagagtagaaaaactgatgtgactgctcgtaaaaaataatattgatcttttttaaaaaatgttaaaagacactactgatatttaatatctaataattttatcaattaaaaaatgtgttttatttaattataatatatattggcataattataaaacttagactaaacataataatgagttatttcttttttagttaaagtttactatgaaatatttacaccttgcagataatttaaggtagcattaagtaattctaatattaatatctatgtattaaacaaaactagatctattgacttttttttttttaaaggctagcctacaaattataattgaaaaatgctctcttttttatcattataatgaataaattaatgcatataaaaagtattagtggtgcttattacctttttaaggaaaaatgttaataggtattagtggtgcttaaca

SEQ ID NO: 25566 - DNA, 2029 bp, Cannabis sativa
gtggataattataaataggctgagattaagttgaatgatgtcttgttataggagaaatttttggaaacaaaggagtaagcaactttggctccatgagggagatcgaaattcaaagtattttcatgatatggatacttcaagaagtcgcaacaattctattcagaaattgaaaaaatcatgtggtgtgtgggtggattggcaaggtgatctctcttcagttgttattgagtattttactcatttattttctcattcagtggttaattttaaagaagtgttggagtgtacgcctgttactgtgtctgctacacagaattaggttatgcttgacacgatttcaggaacagaggttaaaaaagctctattccaaatgaatctagacaagttgcctggcccgaatagtatggcctcgtgattttatcaaaatattggaatactcttggtactggtattgtgaagctagttaggtatttctttgaggaaggctatttccctcaagcgttgaatgagactaacatagtgctaattccaaaaaaaaaaaaaaaaaacagccaaaatttatgagtgatcttcgggctatttcgctatgtaatgtgctttgcaagattattttgaaggttttggctaatagattaaaatggttttgtcggatgtaatttctgatacgcaagagtttttttgtcggtgcaattgatttctaataacatcatggtgtcttttgagataatacattatttgaagaggaagagggttggtaaggagggcttcatagctattaaactgatatgagcaaagcctataataaagttgaatggtcttttctaaagcatttgctcttcgtatggggtttaatagtcgattggtggctttgattatgtttgttgtctatactgttacttataatgtgacacgtgttatggggccaattattcctagtagagggttgagacaaggagatttgttatctccgtattttttttttctgatttgtgtaaagggtttttcatccttattgaaaatttatgagcgagtcccatatgacttaaaataataacttttaggaaaaattgttaactaatcataaagtgttacctttaggtggtgctagacaccactagtgtccaataacaatgctcatatatttaacccatttttataaaaataaactctaatgatatgcataaagtgatccaaaattagcacatgttaagagtatatccaatatagtgcttaaaacgtgatgtattgctatattttaatacacttatgaaaaattgctacttcaatggttttctaaaagtgtgttaaatatggtatatgctaaaggttgtgtcaaatttatcacacaataaatattacttttttatttactatagtgtcactaattattatgattcactgacttttataaaattttacattcataatttatcttattaccatcatttaaacaataaaaaattaccattaaataattacataaaatactaatttttgtaatttttttacaattttacattcaagttttttttttattattttatatatttacggtattctataaaaacacaagaaaatatcaagaaaattacatgaaagtaacaagaaaataacattaaaacatcaataaaacaacatcaaaataacataaaaaaaataatatgcaaataacaagaaatcgataataaaataacaagaacacaacataaaaatacactaaaagaacgtattttatataaataaaaactacaaaatcgtaagaatattgaatattcgtacaaaccgtatttttgtaaaaattttttttgttatttttgtatttttttaaattatccttaattaattattttgtacttattttacatattgttcattgaagcataattataaatagtagaccaaatataacacaaactcatttttatgtctaatttagcacaaaatttaaatcttacattggagatggtttgaaagttatgccaaatttgacacaaaatatagcataggctaaattttataccacaataaa

SEQ ID NO: 25567 - DNA, 2963 bp, Cannabis sativa
atatacttggaatgtaatttcttaaaggatgacaaattaaatagtaattaaacgccgatacggtaattagagcaaaaataatactccacctaattaagaagctctctctctctctctatatatatatatatataaatattactataaaaaaaatataaataatagaagcttcttgttttcctgccgatcgtatttttactgcatgttttgctctaattttaagactgttgattaataacttattagtgcgtgcatttaagtatccaattttacatattttagtttaataataacaatatacaaattaaactactaaaatataaagtaaagacatgtttttggcagcttaattaaagtgccagaatagcaatatatgatcatttaaatataaggtttggtaagcttcctggggaacaggtaagaagttttcccagagtttcttagtccatccaaagactttgaagaaagaaagcttgattaataatcaattttttttaacaatcgatccaatagtctttttaacaaattaattaatgaaaatgagcgtcacaaaatgcataattttgaatacattattctagtaaagggaaattttatatcttgtatattcttgtactaatatatatattaacatataaattatatatatataattgtctcttggaggaagccagcataacttcaaggcaacttcccatgccatttgcaattattctaataataatacatataatatagatgtgtttatgaacttgactaagacactgccgacaacactggctattatattttaatgttcattgattaataaattaatacacagttgctcgattatttatgtttcaaaaatatttcttcaaacaaatatctattcgcggagttcgatccgaattgaagtcttcaattaagtttatatatattgctgtgaaaaagaaggtacaattattaccatatattatactttccaattattattagttatatataatgtgtatatacttgctaatacttgtacgtaacgtctgatatatatttatattattttacgttctcggaccaacttaaaaacaaataaaagcaaactaataggaaagataggtacggagattattatgccgttattagggtatattatatatatctcatcagaacttggatatattctttgttacttagtatgatattaatttcgtaactaattaacgtataatcaattcaaattcgttgtttttataacgtacttagccacgtgggtaattaattaagtttttttctttttattattctgataaaaactagaatttgtttcttaggacttctcgatataatgatgtatgcgtacaatttgcatgtgtatatataatccggctatttaaagagtacgaatatgtataatctctggccatttaaatgtattaataattaatatgtttgttttctgactttttattggaagttttaattattagtttttaatctcttctctctctatatatatatagtctattattatatcttatataaaaaaattgagtttgaaagtaactcattatgaaaaaataaaaaataataagtattttaacacattttaaaatatatatattaactggccgcaaacttccattacctaactaatataaaaacattatccctccaaacctttacttacgctcaagtttgggaagttaattaattaatcatatatataacaaagacttcatatttcttgctaataaagatagtgagacaccaaataaaccagacatacaatatatatagtaactaactatatccttttggtaaaaaaaaaatgactgatgatggtaacatttaattagtatataattaataatatttttttattacgaacatatatattaatgaataataactaccaatgcataatctttagtctgtggtggatggagtactgggcgcacgcatgtgggatggcccccataagtatgagaaaataataatataaaatttttggtggccaattttattttttcttcatgattaatttatccatatattattattctctatattagtcattctaaattgtaattaatcttttataactgaattttcgcataacgtacacatataatggattattaaagcacatatatatttttatgtataatattttatacataatgacgatgatcgataataagatattatgcttatttgatatgtatatatacatacaatcatgctgtgctttagaagcgaataataaatatacgtataaagaaagagatagtcaaagattataatagggtctattaatcgtttatatactagatatggtttttcgtatgcacacacataaattgaaacttaattaaaagcagatattatattagttcagaacaaatattaattatagcaaagttatatatatatattatatgcatgtcatcattaggcatcaatcttttattcttttcccatttatatactaaagttgtaaacaaatgttcatgaaatataatccttaattagggctataattagatcgtattgcattattaaagagaaaaatgtacgttatatatattagtgtttcatatgttagctttattaattattataatcaatcttaagagcttaatttaagtagtgggctagttattagtacctaacgcgcacttgatttcaacagcagcttaaaatggatgattggattcgatatgccatataatctgtgcaagaaattcctctctgactaatgactagctattgttgggggtggggtggggggatgagagagaggtcttaagattcctgacataatttacatatttttgctttaattattaattcaattatttatatattttgaatctttgaatggtgaaagaataagttcaaacattgttccgtaaatatcgaggtgatatccatttatcttagtgattggtctccttcttcagattttaatatcacttttt

SEQ ID NO: 25568 - DNA, 3664 bp, Cannabis sativa
caacgcatgtccaaccgattcccatgcacatgtacataagctacaagagctagaatcaattattttcctctgaactaaactggcagccactggtatagagtgatgaaaaactctccaagcaaatatcttaaccttagaaggtaactttaaactccaaaaatatttccaccaggttgcatgacactcaaaacttgttgtgttttcttgagcggctaaggagtatgcaagctgatatctggactggacagaatacagaccagtagaggtataatgccaaatgaaacaatcattctgagcagcaaaaaaaagtggaattttgaggatattatcaacatcaattgttgagaaatcttcttgtagcttagtaacattccacactttattttcatttatttaatgagctactcgagaatctggtaaaccagtaaacattactggtgtgaagatgttttgtgctagaatccacggatcagtagcagttcgaatgtgagagcccgatcctacctgcattcggagacctttaatcaataaatctttaccccagcatataccttgccaagtcatggaggatacaccagcagaagaggcagataaaaagtcagatgtcctatagtatcgggccttcaatatccttgccaaaagtgtgtcggggttttgaaaaatccgccaagcttgcttagcaagcaaagcttgattgaattgaacataagacctgaaccccatacccccttccaattttgaagtgcaaagaaatttccatttcttccagtgagtgcgcttcttatcataagttgtaccccaccaaactgagccatcattgtgtctatatccttacagaatttggttgaaagcttaaagcaactcatagcatatgttggaatggatttgaccaccgctttaagtaacacttcttttcccccaatggaaaatagtttatcattccaagcatgcaacattttccaaattcgatccttaatatcagcaaataactgacttttttttttgctcagagtaagcaggaagccccaaatatttctcatggcatttgctaataggcatacctaaaatctgagtgaaggaatgtttaatattgtcagttgtatttggagagaaggacataaccgatttatcttcattaaggagttgtccaaaagcccgatggtatatatccaaagctcttttgatagcaccacaagacctatcattggcttggcagaacaacaggctatcatctgtaaagagtaagtgtgtaattgtaggagcagttcttgagatagccaatcatttcaacctcccaacaacctcttcatattgcaaaagtatagaaagaccttctgagcaaatgagaaacatgtatggagagagtggatctcattggcgaagaccccgttgaggcaataccgagcccgtgacagtaccgttaatgagaaaagagaatgtagttgtggtcagacaattcataattagagtaatccaacggatattgaaccccattttccccataacagcagctaaataagaccattcaactcggtcgaaagccttgctcatgtccaatttaagagcagcatatcctttagaacctcttttactgtgcttgatgttgtggatgagttcaaaagcaacaagaatattgtctatgatttgcctttgaaggaggaaagcactttgcgtttcagagataacatgaggaaggacctccttgagtcttaaagccaatatcttcgaaatcaacttgtaaataacattacataaacttattggcccaaagtccttcatagttattggcttcttgattttgagaattaaagtaatcaaagtcttgttgaaagaggttggagatgcacctttattcaaaacgtctaacactaccttggtgaccaaattcccccacaatatgccaattgtgttgatagaacatggccgacataccatctattcccggacttcaatcacttcccatattcttcagtgcataaaaaacttcatccttagtaaattcttttaaaagagatttattatggaatgaggtgattgttgttggaatggtagataagacatgtgaaagagcccactgatcttctttcccaacagtgaataactcatggaaataggaagaaacaatatcagtaataccattctttgatgacaccttgttaccatgatgatcatgcaaaaatttgatctgattgttggattttcgcatgaaaaaacttcgtgtttcgatcaccggatttaagccaatcaattctagaacgctgtttccaatattgctctttagtcgacaacaattcatccaaaacagcttcagccgtgaggattttttgggtgtgatcaggaccagttgctgcagaattatttagcacagtgacctgtttttgtgcttgctttatttcttgtttcatacgtccaaactttctagtgtgccattgctgtaaattttcaacacaattatttaaacactgtaccaacaatacaacaggatcacaatgagaatccatctgccaactggactcaatgatctctgaacattcagccaaatctcttcaaaatgaaaccgagatcttcttcttaaattaccagactgatcttgttgagaattgaacacaacatcaattaataaagctctatggtccgaactataataatccaagtgaatgacagccggttgtggaagttgatctttccaaaagttattgataaaacaccaatctaatctttctttgagagcgaatgaatttttcttattcttagccaatgtgaaatcatctcccgaataaggtagttcatttaaaaaacatttatccagtgtgtttcgaaattccttcatctgcaactcgtttcttaaaggaccaccatttttatgttcattagaaaaaatctcatttagatcaccaatcaacaaccaaggatcttgtggagagacatcagcaagtcgttttattagagcccatggatactttttattatcagtttcaggaaaaccataaacagctgagaagtgccatcgaggaccattatcaaacatcaaatagcaatcaaaatgatttgtattcattgaaagtagagttacatcaacatcatatttccacaataacataagtcctcctttcaaaccaacacgagggacttcaagtccattactaaactttaaagattgcttaaagcgagaaagagaattaaccgagacttttgtttccatgagaaacaaaatatgaggaatttgctcgtggacaagcaaacgcaaacgacggaacgcactcgggttccccaaaccccatgtgttgcccttaattttgcccaaaatacgtggaccaatgcgactgggacacgtggatttgagaaatatggttctgagataatttagctaagtctttttggatcaagagtatcaataagaaaatacctcctggagaagatatgagggctccacgtactcccggaggacaaagctgtgccaaagcacctccgggagtcaccagaccccatttgaatagtcacctcacatttaatgccgcatgggaggagacgtattgaaactgccataagcattaagtctgacagcgtaagcccttttatgcagctattacgctatgattaataagcctagtgacggctactttatgagggatcacatcagtcaagaagggataaaggattatat

SEQ ID NO: 25569 - DNA, 3484 bp, Cannabis sativa
  modified_base (53)..(55): a, c, t, g, unknown or other
ctctcaattaataataacagtttttactcaaaaaaaatgttttttttttattnnntttatttttatttaattttttttattattttagtattatttttatgaatattttaaaatataaaaaaaattatcaaaaaataataatttatgtaaatttatttataaaaaatttagcttatactgctctataatgagtcattcacaagtcacaacacaataaagaacagcacacaaactcaaattttttttaagagaaatttacactacatactttactttctattttttttactgtgagtcataatttcttttttcaaaaatataatatattttttttattttatactgtgtattgtactattaaacttttacggttatattttaatttttttactgttattttttttaattattttacaattattttataaaaaataatatatatttttttaaaaaaattagtgatagtatttttataaaaattaatttaaatttttatatattttttttataaatttcctttatttttgtgtatttaataattaccttttaaataataatgtcagtagttttttttttttttttttttataataatatcattagtcatgcatatgggaatgggacacatgtcacgaaattataaatggtgaggccacgtatcgagtctctactctgcccgaaatgcatgacattatgagtccgagacttggaaggaaggcattgattaatgtcttaattattttaactaaacaattgattataggattcaatattaggtataaagaaatatggaaaaaaaaacagaaaataaaaaaaaaaagaatcaaagtgagcaaattaaaccaagatttcattttatactgtaataaaacttaagaacgatcgaataaataaatgataaaacaaattaaagaaaagaggggagatgacctggatttctgtggtgacagggtactcgtccatgtcaacgtagttcttgttaatggaagccatgatgagtttatcgcactcaggctccatccaagtggtgacaaaagaggccaagttgagccttggagtaccgtccagcatgagctcatcgtttatgatctgatacgcagcttccttgggtattgtctgcaccggcatcctccacttgggtattggcccttgcatgtaccgagatccgaacgtcgagtgtacgtaatcgctgctacgatattcatccccatcaccgccaccgccaccgcttgctcttgttaccaccatttttatatatgttgagctatctctctttcttttttcttttctttcttctttttaatattatgatatatatatcaacactaccacacttcacacatgacccatctacatatctctattaaatattataataatatatttgttaattctaatttttaatacgtttatggtgataaaaatattttataatttattattttttttaatgatataatttattatttgatttggctgtaataattaaattaatttttatattaattaatttatttttaaaaagaaaattgtctagtatttttattaaaaataaagtaaaaataataaatttggttacttattttttttttttattttttttttctatttatccaattgtgttagtctgatcttgtatgagtttcttgatcaactgttcacgattttataagtacagaaacaaaaatttcagtgttgattgaagatcttttttaataaggaattgtctagtaacttgtagtcttcttcagactgtgtgtgagttgtcaataaagtgtatattgattataaatacaccttataacaactaggtcatatatttctttcatacactttgaattgtattcatatcttaagaaaataatatttttgttttgtagagaagagagtgtttgttactctgttaatatgtattttgtagggttgtacgtcgatcggtttggtcggtttatactacatattttctaacccaacgtaaagatcgggttgtaaaattttatgtgcaacctgtccaatttaaaaataaaaaaaattaacccgaccgacaggttggtcaatttgatcgggttaacttggccaaacttaactattttttttttctaacaaagatacatatgagagagagagaggcatagatagatacgagtgagagagggtgaaaggctgaaatgaagtgagagacaagagtgactaagtgagacaagagatgttagatcattcatttattttggattttgttttttttaatatatatattattatatttatgttataataaaagtaataactgatttttttttttttaaaaaaaacaactatacatattaaaataatattaattccaataggttattatcttaaaaaaaaaacgatttactattattatattatatttttgtatatatattaattagtatatataaattatatatctttttgacattttcgggttaaatcagtttaattgggcgggttgaaaaggcgggttgaatctattatcaacccgcctaattaactgattgggcgatttagaattttgtcgagttattttggtttgtattttttgtcgaatttttcagtttgatttgggcagtttattcaggttgggtggtttacaaaaatttatgtacaaccctagtattttgtattgtcttgagtctgtattcaagtctacaaagaagtggaacaacggtgctaccttcgggagaaagttttacaagcttttgggagattgtcttttaagtcttacctcgagagaaaacaagcactcttcaaggagatagaagggagttcgagcacttgaagttttagcaagattcaattagaaggtggaatacatcaagcttgcgacatacaataagatggagtctatttatgcataagtcaattactttgtattttgagatctatctgatgaatcttatctctaggcgtggccccgtggactcagggccgtgtcaaatattttagaggccctgttctaattttaaaaagtaggcccctaaccaaaaaaaaatataaaagttgtaaattatatttttaaatattatcatatcacaaaagtatattttacataatttagcacccaaaaactcaaacaattttattaaaattgttattaattctaatacaacttcaagccaatatcttcattctatttaaaaagggccatccttcgaacgctttttgaagtaaattcatcaactaacttttcatattttatcgtctccaatacctcatttttaatcgctatcgatgctaatccattaagcctttcttgtaacatggtagaccgcaagtaggacttcaacaactttaactttgaaaaacttatttatgcaaaagcaactgtcataagaatagtcaacaaatttttttatgcaataattgtattagaaaaacaatctacgcctttcaaaaactttaatatgtcgatagctctcattttctctctaggcaagatttgccttaatagcttcaactcc

SEQ ID NO: 25570 - DNA, 3305 bp, Cannabis sativa
gtgtttactttcattgttttaaaagctggtaaaacatattccaacaatagttagctccaccaaagatttaaactctgaaaagataccaacgttgaatttaattctactactcttcgcatatacacatttctcacaaaactttaatttctctttcaatcaaccttgaaacaagccttgcttgtccatttttataagcactctttcactaacatgtcgaagcctcaaatgcaaagccttgatgtaccatcatccttaccaattgtttgagctgcttctcaaatcactgcattcccaactagatagtacaacccatttctcaacttcccattaacaaagataaaagacccctttgtaatcttgagtgtgccattgtcaatttaaactaaatagccatgattattaaacatgcaaattgataaaatatttctctttaagtaaggattataccttacttgttcgatagttcaagtgacaccatcatgtatcatcaaatcaatggagtaaattccttgaatttggcatgccttgttgtctctcaacaacacagttctacctggtttgatagttcttgtttagtgtcatgtgaaatgaataccttgagtccaagatccactctccacctgattctaaactagatgcaactagaagcactgcaaattcatatacatctgtaatatcagattccccttggttctgattttattcttcccttgattgttgcctcttttcaatttagccttcaacgataaactttcatctctgaagtgtccatctttcttgcaacaataacacttctttcctgttgcagttctttagttagaccttggcttatacccattctcgggtttcttgaattctttcttctttgttcttccacgaacaaacagaccatcaccacttgatttaggtcgctcatcaactttcttcttaattttctttgaattcaaggctgcttaactttagacatagttgtgtatctttcccataaagtatagtatcaacaaagtgttcatataccttaggaagtgaactgagtagaattattgcttgatgttcttcttcaattcttaccacaatattattcaggtccagaagtaacttattgaaattttctagatgcctttgaagctctttaatttcatccatcttcatcgtgtaaaatcttttcttcaactagagcttattggccaatgattttttcatgtaaatcaatccaatcttgttccataatcccagggtagattcttcatcgaaaacttctctaaggacttcatctcccaaactcaaaagaatagcactatgtgcaatcatctcgatctctttagaaaccttcttaacttcttctccttccttagaactagtcaccgtgattgcatgcgcaagtctctgatgcacaagaagtgctttcatcttaattctccataacccaaagacatttagaccctcaaacttatctacttcatatatatggtagtagtcattcttgaaacttcataacttgattcttgaatcctcggtctaaccatgaagctatgatatgatttttttttttttttttggaaaattaatacctatcaatgatcaaaataaaacaagaattgaagaactagaatggttgaatcaaacaatgacataaacaaaaaataaatgcagaataaagtaaataaaatagagacaaggtttaacgaagtttattataccctttttgtggtgactatttcccaagaagaattgtcctttggtcaagcttcattcgatcttgaataatggaggaatacagaggagaatacaagagctgagctcatcaacgtgtcttgcaccttacaaattaattcacttgagagagatgtgatcaaacacacacattctctttaacaaccctcttcactcgttacaaacgtaattataatctaaatttttctctaaattgttacctaaagaagtaatacacaatgtcttatatagacaactcaaaaagaaggaatccaagttagttaactgaaatttaactactttaagaattgactggacaaacctactctatcttataagtcactagatgagagactaacaaaacagtgcaccaaattattaaaatctctcacaacatttaaattaagaatgtcttaaatgtggataagcaatcatagtttgaacattttgacattcagagttgtagcctcattttgatgagtcaaccaaactcaccatctttaactttaaacataaaagaaaaaaagtatcgtatttgaaccttcttttagcttccattttttattattagtatttttttaaaaaaaaagtcagtactaatattaataatcaaaagatgtattccctccaatccaaatcaagtgccactaataaccaaccataatctctttgctaccactcataactgtccaataataattttcaccgacattttcactctaaaaacactttactttttttaatccgtatatatatgatctcactgatcaatgatctaatattctttcatttttacagcttgagaacaactatataagatgaaccaccaaaagtcagatcagatttcggtgattaattaagcctatacataaaacaagtgaattaagtaagattaatcagacaatatatagcatatctttatgatgtgacacttttttttttcttctctttctttgccgtacagctttttgtaattaaggaccattttagccatcaactttagcaaaaacaaaatttctaaatatatatatagctgttaattaatctctttttgacttcaccatgcatgatatacatattctctttcaaaacctttttcttaatactgccatatagctttctattaatttctttaagtatgtcaccttgttcgatgtcaagtatttgaacaataccataccatatatgatcacatggctatgaaataatccaccgttaattaagaaaaaattgatataaagtgtgaagttttgtcaataaattaagaaaagcaaacagagcctaactaatattctgtttatgaataactctacataacaaggaaaaataatacttcttttggtgttgaaaatatatgtttttgtttgtcaaaaaaagcctccacacgtcacatatataatggggttgttaggatctcactttcaaaaatcagattccatcaagaaatttcactttgagttagagcaacatttctcatttgctttaaaaagaagaaaataacaaatattaatctcttagattgtgacatcatctttatttttactatttcaagcgctaattagtaagaccttcaaactttggaactaagagca

SEQ ID NO: 25571 - DNA, 3279 bp, Cannabis sativa
taagccaaccactaaaataaaggtaacctttttttaataaaaaaatgtaattttattaattaaagataaaataacaccacagattatatacacaaattctaatttgaccaaatgccataaatggcacccgctaggagcataaaaaatctctatcaacaaccctcttggcttttttacattcagccaacaaggaagattttcaaatgaacttgaccattgacattcccccaaccactacttgatattctgtaaaactctccaagagtaaaggcttttaaaaaacaaatgttcatgggattctaaatctcattcacacacgcattgataatgggtacatgtttcttgacaagattgtctccacttgccacataataaatcgatgctttggtgtcgaaagcctacaccaaattacttgtatattttcaaacctagtcccatccaaaatgagttgatcataagcttttgcaatcaaaaatctaccactaattacatctttgataatatcttcttgagcgaaagtctctctaaatcacaagagttttctccaataccaattaatgtccatctttaactcaagagaccaaatcactgacattatttatgtacaaattgttcatccatttttccctaaccacaatttgttttgtagaaatagtccaaagatatttagctaaagtcgccttgttccatttgggaccttcttgaaatctcaagcctccgagttttctcggtaaataaaccagccatgtgaagtttgttatgatttccttttttttctccaaagaaagtttctacaaattcggtcaatttttttggctattttttgaggtaatcatccaataacatcaaattctaattaaaactgagttaattagaagagctctaccaacaaagaataagtgacgacttgcctaagtgtgcaacttcagctttaatttctttaatatagtatcacaatcctcttgctttcacttagttggtctaaggaggaccccaaatatttcaaaggaaacaaacctgtcttaaaagaaacctcatgctgaatactatggattgtattatcagtcataccagcaaagtagatgttggatttctcaatattagccttgagacttgaataatttctaaaatgagctacaacctccaatatacatgttatcgagtccctatttcctttgcaaaacatgattaggtcatcgacaaaacaaagactgaagagtttcaggattttgcacattgggtgataagaaaatgctttgtctctagctttccatttaagagttcgagttagatattccatgactaacacaaaaagaaggggggacataagatccccttgtcctaagccttttgctccttcaaactgatcttgtaccttcccattcatcatcagcaaataacaatatctttgaacacaaaccattatccaatccataaatattctcgagaactgataggctttcgaaaaaaattccaatcaattgtttcatagactttgctcaaatcaattttcattagacaacgaggagagatttgttttcgacgatactctttgattaaatcctgtaggatcaacacattgtgagcaagggagcgatttttaacaattcattcttataatcaatacaaattctcttttcttcatctctatgcttttgcaacattttttgttaagatttgagaaatagagtagctgattttttttgttaatgatttgagaaatagagtatctgatttatttatttatttttgttaatgatttgagaaatgaagtagctcattttttttttgttaagatttgaaaaattggtgtgtgttttgaatcgcaactaattgatttgaaattttctctaaaatgatatttttgaatcaaaacaacaacaacaacaacaacaaaaaatcagctagcttgatatatattaatgattatttttcaaattttctctattcgcctatgcatgttatgataaatgagattgaaaagattaagacttttgtgttacacttggaaatgaatttagttgtcaatgtactccttgtttccaatttgaataatctagttgtgaatgactcttacaattccttgttttttaataatatagttctctcactcactctattgcagaatgaacatgtctcaactagaaaaatttaatcttggtatctcatgtatcataatcataaaaagctactatacatatttgatggttatatctctttgatgagaaaaactcacacaaatgacaatgagttttagagagaaaaaccttggtaacaagtttgtcccttgacattggaagtatctatttatttagattcttagaaaaataggtttgtttcaactttatcttttcaaatttttaaggatgattaagttattagtttctcaaactagtttccctatttatgctttcacctaaaaatgttagaaacatctttataagatgtggtacacttgttattgtatgtctaaaaatatatcataagttgggtgaagtgagtggagtttatcccttaacaatttctttcattagcaagttgtcaatagagtcttgagcaaaataaactcatgcataaatattggcactttgttatttttctatacaataagatattttttggggattcttttcattatttatttttattttcatgatgatttattagttatactatatattaatagcaatattttggactactttaaaaagttactataaatcatgtgtaattaattttcaattacggttgatatccaataaatttatttatttttgattaatcaatttcaaaacaatctgcatgcaataaaatattttgaactttatttttgacactcgatatctacaacaacaaaagagattatattttaaaaaagataaattttcaaacttgttctgaatttttatttatgatttctaatacttgattaatattagttaattgaattgttacttggttgatatctattggatttatctccctttatcttttcaccataacatatgtctattaattggtttacttagccaaaaaagctataggatccgatccaaatggcttattagaggaaaaggaaaaaaggttgctcattgattcttccatttaaaattgttagacaactattaattacaatctcttattataattttttagtcaactttcacactcaaaatatcatctttgtaaatttttaaaaacttccgaatagtttacaatgtcgtaaacagagttcttaatatttcagtttatcacgcgcgttcaaaaaacttcaaacgt

SEQ ID NO: 25572 - DNA, 2459 bp, Cannabis sativa
atatatatttttgctatcaattaatatatactatgtttcatcactctaatttaatttctttatatttagtttgtcacacttatatacgaatcaatatattttattttttaacttttttatttactagaatcaaaatctttatcatcattttttcatcctcaaagacttaaccctataattaactaataataaattaaccaattattatatatatatatataattaaaacactcaaatccacatgtgtaataatgagttgaccagctctggctcattgtctaggttatatatcacaacttattattttaaaataataaatataatcaaggtcagaatttgtaccaaactataaagaccatcaatttatataatcaagtaatatgttaaatgggacaaaatctagcagttagatgagcaagaaccactaactatattatatatttgtattacaaagagacatataaaaataagtgtatgagccattgggaaacatcaagtctcatataaatacacatatataaatattattatagatgcatggattatatatgcatgttatagtaataataattatatatattatattactatataagtacacaaaaaaacagagaagggctcagattccagttcttggattcccaattaatttttgccattttgggtttgtaattagatattgcaaccccatatgttatagtatattaatattaattatactaacaaactttagtgtataaaataatattgtgaaagaacttggtcgcttttctttttgttattattttaataatataataatttaatgtacatagtattttcttaaaaaaaatgagattaaagttagggttatatatataatatattaactaatatataatttaaactaatactatatattatatataaatatacttgaatttgtctatgtgacaatattttgtctgtttgtcggcctatcaaagcaccgggaatattgctttggtgtttgcctctaatttacttttcccatttttattttattaattactaatttaaatttaaattggactttattctattctatgtatgatctcattatatattattatttatactttaaaataattaaattatttcgtccttaattattaattatttcatattttagtgtttcttatatattgctacgtcaacttcgtgcagttcttcctacctttaattattctttatatatgtatataaatatatatacatttaaatgcacggctcatattaattttatatatgagattatattattttgagtagtctatatgagttttaatttaatttcacgatactatatattcctatgttgaaaaaaagaatattgagcatgcatgtttaaaatcaaatcataattagaatttttccaaaatatgttttacttgttaacttgagaaaattaatgcgtaaattttcgactaacaatctagcatattgatctctctctctatatataatattatattagaaaaaatcaaaatacatcttatatattatatttaaatatatatttaaaaaaaattataatggtaatagacacattcttaatttatagtaattagtctgaaattaaaatgtatatataattgacataggaatatatatataataaagtacgtaggtattatttagtaatataatattaaaggataatgtttgctgcgcttttctgtttgtgttcaccgttaattaataattaaaatgtaaaaatatattggttggcacaatatatatgcaaaagattctaaatatagtatcttcgagtaataactaatatagataaagattttacttattattgttaaaaaaataaagaagaagaaagaagttttacgtaccaacattattaatgaaatattgatacttgttactcccaaatcaattgggttggacaatgttactctctcgatctattttgtgatattattgctctctttcatagaatatagtgatacaaatatatatatatatatacatataatattatatacgtgggtatgtatgtacgtcgttcgtgcatgccaagctctctcattctacaaaattctatacataatgtatatatatatacatatacatacataatatataaatatatatatgtatggagaatataccaattaacaaggatgcttattgtatgcatcaatcctgggagtaggggtgagcaaaaaatctaagaaaccgaccaaaccgagtaaactgaccgttcgaacaccgaaaaaaccgacaccgaaaaaactgaaaatcgaaaaaaccgcattcaattaaaactgccttaacatggtcagttttagtgtcaatcgcaaaccgaccgattaaaccaagaaccgaccaagcatatatattatgtacatgtaatatatattatttttgtacatatttaatatacaattttattaatctaagtttacttatatcttttttattta

SEQ ID NO: 25573 - DNA, 1870 bp, Cannabis sativa
ctttgaggtagttgagtactctgtaggcagcctgtaaatgggttggcaaggagactgaagatactggcttaatttatttacaacatagttgatgtctagtcttgtgattgtgatttgtgaggttgaccaattttctaatgaaacttttatagtgagttgggttgggcaacaaatcaccaattcattgttaagcttagtgtgtttggttccatagaagttgagatatgttttgtgctaaggaaacttgagtcttgtagcaattgaaaggtaaatggttattgtgtaacagagatgcccttgttgcaaggaccaacttcaagtcctagaataaaacaatcaaaggccgtcaagattttcaagtttaaactggacatcaagagttgaaataaatgtgttcagttcattagaattgtcatgacaatgataatgtcatcaaaataaatttaaattaataaatctagaaaaatcccttattttcgtcgaatgaacaattaatgatcattttaagattatttgaagccttgttgaattagagtggtgcaaagtttagcataccactatcgtgaagtttgttttaagccatataagtattattgtttatgtccatgtgatgtaaatgctatttttaatggcaacaagagtaaatagctattttaatgtaaaaaaatttgctacacgaatatatgtatcaagaaaatcaatacatggttgttgtttaccccttagcaactaagtgggctttataacgattaatcgatccatctagtttgtattttattttgtaaactcatttattattaatagtgtgttggattgtgtctttgagaggatatataaattcataaaaaataacatctagagaatgaaatatgtgattgttttgtatgtcaagcaatgtaagcttttatattttatatgctcagaatagcctataaatatgcacgctctaactttagatgaaaatttatgttgagtgtttatatgagatgcataagcaaggcatcaaaaatttagaatatgatcatatataggggatttattatgtaaaagtttatagaaagtatgtctttaagtagaacagaaggtgttctttctaaaagatagacaacaatctttaccatatagcttcaatataaagtagaggaaggttaaattaaaaagctaattatcttgagctacatttaggatatgctaatgttaaccttcaacaacaatattctgttgtggtttttcaacacaagatttgtaattaatgacctctttgctagcaaaataattggttattatctgttcttacagatttcacattcattttatgtatagtgaacattaataaaagtaaataaattttggatgaggagtatcaaatttagctttaagaatatatctatgtatatttagaatggtcatcaacagtaattaaaaatatgtatatcctttaaaagattttatggggtacagtctacatacgtacatgtgaataagataaaaaaaaaatggtcgatgaaaaattgttattagaattcaaatgtaatttcttttgttttgcaagattgacatattagacaataaaaagatgagaaatatcagtagaaaaatgcatctgtttactaattttattcgcaatcattacaaagggctgaccaaggcatgtatttttgttattaacaaacaatattaatttaagttttttagaaattacaattttttttactagtgataaaaatataattttaaaattttaaaaattattattattattaaaagcatgtaaatttatacggtagaaaaaataattaaaaatatataaaaataaaaattttatataacatttttttatatatatttgtgattataataaattagatta

SEQ ID NO: 25574 - DNA, 2205 bp, Cannabis sativa
  modified_base (46)..(64): a, c, t, g, unknown or other
tttattttcattgttttagagattcatatttaggatgttaaacaannnnnnnnnnnnnnnnnnnagatcctggtaaaatatttccaccaacaagtatcagcatatgccaatgtcatcaaggatttatgcaccatgaaaagaaagcaccatgtgaagaaaattgtattcttgatagaagtgtagtgatcaaataaaagataccaatcaaatacaaagatccaggttatcctacaatcgcttgccaaattgggacacaaggatttggtcaagccctcctaaacttaggcgcaagtgttaatctcatgttttatttagtttacttgcaactaggcctaggagaaatcaagcccacatttgtggtgttacaattggctgaccactcaattaaataaccacgatgaatagttgaagatatcttgatttaagttggaaaattctattatcccactgactttttgcttttggacactcagtttgaggttaatattgggtcaaaaactctcatcattctcggtaagcctttccttgcaaaagcaaatgctctcattaactgtaggaatggtctcatgaaattatctttcgggaatatgactatggaggtcaatatttttcatgttgagaaataaccaccagacgaggaggaagattgctatcatactaatgtgatagacacaattgttgaggaggaaatttttattcatgatgattctgattctttaaatgatctcctccatgactttgatactgaaaatatgctttatccatctgagggaggcaatgtttcttccattcttgagatgtcccaggatgaagcatcacaatcacaatatgaaaatttgcgattacaggcccgatccatgaaaagcttcttcgggtccatgtgcaatattgacaactttcggtaagagggtaggcttacctgaggagatcacctttgtgactctagcataccctgaatgatcatgttgtttctatttttgtttattgccttgtttacattttattcgatgtttatttcctttgttatcttttttttttagaggatcaatatcatcgttatccatggttgcttgcttttcatgtgttctatttccttattcttttaatttctatatctttagacattgaggacactgtctgattttagttggggtgatgagcatatttaagtattgtgatttgtattttgtcatattaatattttcatggtcataattttcaaaaattactcaattattcttgtcgaatgttatttttaagctaatttttgctatctttgttacttaaaatttttctagagttataaaatacacatgtcaaactttgtggtaagatggttgttatcacatatttgcttaaaaaatttatcaagtttaagtatttatatttttatgagtggtgagatttgggaaaacaacctttgaattttcattgattcttagaaatggttataattattttggacatggtactagggtttgattggatgttgctttaagggataagtttttctgtagacaaatcttattaaggagcctttgtgtatttattttctttttgtaaaaaaaaaaaaggaaagagaaaaaaaataatacaagagcaatacttcatcatttatgttgcctcttagttaaaaaaaacaagagcattttatacaaatgaccaaggtgaggtcatagacgattttagtgaagtggtaaggcattttataatgcactttcagggctatatgggaactagttcaagtcctacttaatcccgaagatcggattgtatggagctggggagcagacttaatatggagcagcaactgagtatgatcaaaccgtttacaaggaaggaaattaagaaggattttttcagtattccagattctaaatcccctggaccagacggatatggagttggatttttcaagacaatgtggcctgaagtaggagctgaattcactaaagttgtggagaattttttcatgacaggtttaatgccttaggagtttcatgcaactatgataacgctcattccaaagacagaaaaccctaccaaggcagcggagtttagacctacagcctgctgctcaactgtgtataaatgcatctctaagttgttgtgttcgagactttctcaagtgctttctgggttgatcaatcaaaatcaaggagcgtttgtgcaagggagatgaatagctcataatgtcatgattct

SEQ ID NO: 25575 - DNA, 2160 bp, Cannabis sativa
tttctggatacagaatcagataaagaatgtaccaaaacgagccttttaagaggggtgtgttgtatggatttttgcaaaatattttcttttttcaaaataatctcaaagatctctacagagtggtaaattttggagtttttttaaaaatatttttatattttatttacaattttatgacctaaagtttttaattacaaaaagacgattttaaagttttaaaattacaaaaataaaatttttttagcaaaaaaaaaaaaatacaactaaaaaacaacaaaaaatcaacgttacaacaactataaatatactataaacaaccaaaaacaacgagaaaaccaaccccgtgacaattataaatcaactataaataacttataaaacaaccgaaaaatatatccaacaatttacagaagtccatatttttgtaaataaaaaagttcaaacattaaaaataaaaatttgttagcgtatttttattatttttttcaaattttttctacattatgtaaaaatttcgtaaactttttcgtgtagtgattgagatttgagaaagtgctctatccaaatatatatgtatatgggtgcacttttaatgaatattacttactcatgggtaatattaggaaattttgaatttttatgcttaattttcctatttaataaaaaaatgtttatttttatattatatacgttggggtttttccatccactaaaaaaaataataaaaaagaaagcttttcggcaaaaagaaagataaaaagaaaagttgaatttgactcaaatattttttatataaatatagtacaaaaaaaatattttcttttatatatatatattttaaattaagtagctaaattaaatagaaaaattcaatttttttcttgatgagtaagatcaattgtattgttcaatcaaaaccattacaacaacacatttataaccaaaacaaacttatcccaaaccaataataatcctttcacctatatgagcagccccctacctttatttatggctatctatacaaatttgtagaaaccaatttttatcaacactgtcatcttacatggtaatgtacctgctaatctaatcttacaatcatgttgtattatctttacagtatgcttaaaatgacatagttttttgttccaaaaaatatcattccgagctcgccaaatatgctacactactgctgcaataatggatagcaccatactcttacgagtgttgctcatcttttttcccttagatatccaccggagaatctaggcaaaatccatccaagccaaactttgataattcccgagcaccttttgctatatgaacaatcaaagaagaggtgattgatattctcttttctcacaccacacaccaagcaatgttgatctatagttggatcatattttgatattcgatttttggtgcgaagcttttaccacattaccaaccctatgacaaatctatgtttaggaataatcaatctattccaaacaaatgtacttcatgtcaccttaacttcttgttcaaatagcatcttatgcctatattgttgtgaaatgaaataatcttgattcatcttttctttattaaacgcattattcacagtaacaaatttcttccaataccagctacaatccgtgggagtctcatactcctaccaattttggtccaccaaatacacactatttatccatttgacaaataagttgtcattttctttggcaattgcccaaacatatttcttcattgcatcctctactcaaccaagagttaaattatccaaaacctcttttcatgagaaagctttgtaaatttcttcaacttctctaagaaatttcttaggtagaatcataatttgagccaatacgaatggattgacaataacacctaattaatcaatgtcactctcctcatatatgacatatttttttagctccatattctgattctattagggtgtatttggaaataattgtgtaattactaggtagaataattactagggtggtaattacacagtatagtaattacactatactgcaaaatgcaaggtgtgcttggatatgaggtggtaattgcatatgaatttctaatgtcttgtttggcaaaatagttagtaattacatgggaaaataatattttttagtagctaatgtttaatat

SEQ ID NO: 25576 - DNA, 1238 bp, Cannabis sativa
atcccatgcccatgctcttcttcttaaatttctttcacaaaaatatacagtctttaagttttacaggttatgtttttgtttggtccccaaaatgtctattaatatttcaggattatatgaatatatatatatatatatgtgtgtataggaattattaaagaaagtgtgttgtgttgtgtaagtgttatgatcatgaatgcacttttgtgtcatttaatacacttttagttgacattgaatatctcatatatatatatatatatagtgtcacctatatatttaaggaaatgccatcattatatatatacatacataatgctggaaccgactagctagggaacatgcaacaacctcagattttgggaaacacacaaaattatatattctatgagcattgctattaggcaccagtgatgtctagcaccttctcgacatgttgcattgcgattggctagcgatactctctaaaaactattatattaaattatatgagacccgatacttagttggaccaataacgatattgacacataggagggtgctagttagcatttctaatatagggagtagaaggagtagagatctcattttgtcccaccaaaaaatgtatttagtttattttaataagtgttagattatgataggattgtaatttaaccggcaccgctcttaagctaagtacgttacagttttggccggattacatcaaattatttagagtgtatttaattttagtgagagttatttttattgtgtcagataaaccgatgctattgagtaattatataggtgtcaacttataattattaaccgacactaaaaaaaatcttttgtagtagagtgatcaaaataatatgttctggctagtcattttttatccattctatcatttaataaagttgagatttaaaactagtgttacatgcatatatcattgtgtgtcatattttatttttatgtaaatattaaaaactaagctatatattgatgtagacataattgagtcaatataataggctgcaaatactgttcggatgatttgttattaatcatgggacaattagtaggatgatgacatttctttatgctattaattaattaaacgacatgcatacaattctgtattaatcattaattagtaatgactatgcatgggattaattattgtgattaattagctatatataatatatatgaattattattattatgttatataatctaacctggctttataa

SEQ ID NO: 25577 - DNA, 1878 bp, Cannabis sativa
acaactgaggatcatacacctatatcattaaatttcaataaataaaattatttattgtatctcaacaatacaattaaaattctagtattattccactacgaatatgaaaaatagtcttaaattattacataattatatttactaagtttattaacagtagtcattgatataatttgtcgtcctattatcatttcataatttgttgtcctattattattttattcttttaattaaccttttattttttaggaccattaattcactaatagtagttaattttttgatcatatcacaaatttgcatgcaacatcctaatactagaattaacacttaaaaggaaattgatattcgatgtgttaggaaacaaaaactgtataaataaacaatgagacttctcaataatccatgttactgaattctcaaaataaaaattgaaagtattcagagtgaattaaataaggaatttttacaaaaatattagattttggaaaaagtttacaattttactattatacgaaattttttacgaaaatactatctttttataaaaaaaaacgtaaattaacaaaacataacaattaaaacagcagtgaaacaactaaaaataactgcgaaataaggtaaaaacttaacgcagtacacagtataaaacttacacaatatttttaaaacagtaaaaaaaataaaaagttaaaaattttagtatgtaatgtaaaaacccattaaataactttgtaacaaaaacaaaaattcatgatactcaagatttatactgaaactaattcaacatcgaaataatataaattaactagaggtctctataataaacggtcatttcgcctgaaggagataagataaattaaaaatactatccttaaattgaaaaaaaaatgttaaatgcatccaattccaattcaagataatagtacaattattattattatttcttaagcaaaatacaagacaatatttccatatatgtataaataaactagtggaatttgcatattttatggatttttatacaattactataaaaatattattatttattttcaaaaaaattattttatgcaaaaaaatttaaaatatgagaaaacagtataaagtaactagttatccagcaccttattttccctgtttttcttttaacttttttttttcaaaattttaccacaaaataattttttcaatttgaaaacaaaaatatgtttttcttatgctatttttcttttatcaatctcaaaatcctcaaccctaatttcacattcacaacgttctacaacctcagctagttgaatgggcttcggctaaaccatatttgtctaatgggctcaccgctcaccacacatattgggcctggtggactgaattccacttgtgagatttacaaacaaagtttttttttcttcttaaaattacttgtaaaaaagttttattataaaaatacagcttttaaattttacatagaatattcctgcccggaaacttggatggcatttgtcttacaaataaatttgaataaaaaataaaatatatatatatttttaattttttttttgttttatgaagcaatttttttttttgaaagaatatgaagaaattaaaataaagtgtgatcatcaagatgtaacgtggctcattgtacttttggaaaattttatggtgtactcctaaaagtactatacaacatgtacactctatttattttagcatttagaataatttttaagtctattttttacgttaaaataatttttaagtctattttttttacggttatatacgttgtaattatttaagatatcttgtaaaattttgtaaaatttaacacgccaataacaaagtttaaaagtttattgtacgcgtgactctttt

SEQ ID NO: 25578 - DNA, 2174 bp, Cannabis sativa
aaccaaaaccgtaaattaaaaaaaaaaaattaaaaaaatagtatttagggtaatttcccaaaataatatcatttatttattttttttttaaaaaaaaaaaataaaatcatttataaatattaattactaaaaaaaatctattaaatatattaattaattaatttttcttagtatatagttaatcataattaatttaatttattaatattaataacttgttattaaaaataaaaaatataattattatagttacattcaaaatataatattaaatagtcacattttttgggcgttcacttcatctataattagaaaataattgagtttgttggttgaaaaggaaaataatataatgataatatcaagctaattaagtaacaaatatccaagtctataccaattactatcattttcaacactccttcattgtagattgtagtatatatatattgtcaaaacccaatttaaaagaaacaaacgtagctatctcaccaactttttatgacaatttgaaacaataacttcactttgtaataataatattaatatatatataaattaataattatgtaaagttagctaagagtgtttatgatatgccaagtgtattcgactatatataacttcataattaggttcaatgtggtacctaatatttttttagtagaaatacaattttattattaattcaaatcatcatttaaaaaaaaaattacgtaaactacttaaaattataaaatctaaataagtacgtacaatccgcatttaactataagattttagccaaatagtgtgcaacacgattagccgatcgtttgacaaaaatcaaaaaacattcaaactagaaagaatatccgtctgtactttaaaatgcagaacccataaacagaaatcatatctaacgaactttggatagcttagattgtgaccaaactgtctgactctaccaccacatcatgtcgctctgtttctttcagcaaactcaacacctccttaaccctgatagctttagcaagaacatgattaaccacccccattcggtttattatcctagccataataatttgaccagaagagttctgcgccacccaaccatacccatacttattctagttgctaatgatagttgcatcgatattaattttgatcacattaccaacggtgatcattccagtgctcgtgccactcgccgtcttgtaaagaaaacaaagaaaactaaaaattttatcttgatcacaactcaaaactcttagccaataaaaccacttctttaacaatcttattctcatcatttcacacatgttattgggcacaaaatcactattactcaccaataataattattttatgtagttaaaagtatatactaattataaaatcactgtgattaaaccaaaattaatgataatttataataatttttaatcataagataaattttgtgtgtgacctaaatattatcactacatttagctagcttttctttttaactttttctataagcttcattttaatttggaaatatttattctaacatgtgaccacttatatggtaattcattgttctttatcttcactacaaaaaagtgggtctgtaacgaggacacctataccgaagacatatcatcattattagtattttcgcaccactggaaaaaattcgcagtttgtgttgtagataatattttgcttcaaaagtttgttggcttagacgattgtcttatgattcacgatcactttgtcaaaaaagaaagaaaaaacacctaaactaaagaggtgacttgtggtggagtggagattatttctttgttttaatatataaacgtgtcaaacatattaaagaatggtcacttttgggaataaagatatcaatcggtctttccatgtatatattataggtatatttaatttatttttacacataaataaatttatgcttaaaaataaaaaaaaattataattaattataaattatcatttgttgtgattaaaaaatttgtagctaattgtaactaaatgtgattttagtcacaattttttaacatatattatatctttactgactctatatgagataattcactacaagaaatgtcacttttgtgctggcaaaagttggtattgcgctggtaaaatagaatttacttgtggtgttggcaaaagggggttggcaa

SEQ ID NO: 25579 - DNA, 2810 bp, Cannabis sativa
aattaaaattaaaataaattaagtaaggaaagggaaagacattccctataaaaataggaggaaaatctttccctttattttctccctaatttgtgtggatcccattagttttcctctttccaaaatttagtaaacagaatcaataccatactattcattaccattcagtatattgcatttttttttttcgtgttcgatactataatctccttatttttaatatgatagtgtatattatacatatcatatgaaatttaaaaaaaatcataattaataaattatttaaatattatttttgttaggttaaattattataatttttttaaatctgcatgatgttttaaataaggattactatcattttagacactatattttataaattttacaaatcaaattcttcttttaatgataaattagacactgtattttcttaaatggtacaaaatagtatcataaactcaatttttgacatttttttaatacaaccaacttaaaataatttatagtacaaaaaaatgtagaaaaataacacatttaaattggattattactaagttttattttgataaaaaaattagctaagctactattttaaaaaaatacatagtccaatttatcatttaacaaaatagagtgtccaattaataatttttataaaacacaaagtccaaaataatatttatcccttaaataacaatgtacactatcgtataaaaaagagaatttttcataaatatgaagaaaaaaaaattagagtttatttttatatggtataaataaataaataatgctaaaaaaatatgaaaataaaaaataaccaaagtttaaaatatagaaaaccaaacaaatgaccataaataaagttgataaaatttttaataacaaaattgccgaaaaagtcatcggagaagacgcagtcaccgaaaaagttaccaaaaaagttatcgtcgttgaaaaagtcactaaaaaagtcatcgtcaccagaaaagtcactaaaaaagtcattgaataagttaccagaattgtcatcatcatcagaaaagtcacaagaattagatatcttagatataaattaaaatagaatttattctataacataatgaataaaaataaataacagagaataactcaaactgattataattaaaatagaattggttctataacataatgcataaaaacaaataatataggataactcaaaccggttaaattaaaatacaacctgttctataacaaaatgaataaacaaataactcataaattaattataattagaaaataaaagagaaatcagttcctaaaacactaaaatataaattaaaaatagaactatttccacaacaaagtgagtaaaaaacgaataacacacaatacctcaaaaatcgattataataacaaaaaaaaaaaaaaaaccccgcggcataaattaaacagaaacggttctataacaaaataagtaaaataaataatacataataactgaaaaatataagagaaagaaattagttatatttatcaactagttaaaagttagagacaaagaaactagttccgtaaagcaaccaagataaaaacttacacacaaaaactagttaaataaaaaaataaacggttctttgaatcaactaaatcaaaaatcgattcctaaataactaaattaaaaaccaaatgagacataaatcaaaattaaacaagttccacaatcaaatgactaaaaataaataacacgcaatagctcagaaaccggttatagttacaaaatatatataaatgatataaatcatatcacatcataaaaactagtgcacttcttaaaaatctcttggaaacaagacttttgtcgtttaactaaatcaataaccagaatgagaaataatacaaataaaatacaatacggtctttgtaacttactagcaaacctatagtttgggtcgatcttcaaatatattggctgaaaaaaaaaacaacataaaaaatattaggaactagataaaattaatttatagaaaaaaaaacataaacaaacaagagaaaaataaaaacacagaaacatacaataaaatagaaccgattctataacaaaacgactgaaaacaaataacacaaaataacttagaaacctgttatacaaaaaaatagagaatcagttccaaaaatactaatacataaattaaaacagaactggttccacatcaaaattagtaaaagtaaataacaaacaataactaaaaaaacaagttctaattaataaataagagggattcagttctaacaacactgagacataaattaaatagaattgattctacaacaaaatgagtgaaaacatacaatacactttaactcaaaaactgattataattaaatatatatatatatatatttacattatgttggtcgaactatgcacacagaattgaaaaagacacatttattataattttgtcactctaataacactttaagaattattaatcaattacacaataagagggaaggaatattagctcgaaagagctagaatagagaatgaaagaaagagggagaaagagtcaaaatagaattgtattcagtggatcaaaatcagttacaaaatgattatgaacaactacttatagtagttgttattacaagctaaaccaacacataaacactaaggacagctaacaaccaaataactaacttcataactaaccaactaattaccaagctatcttaatgttggaatttattttaccaggattttagattcactaacaactatattgtttaacatcctaaatatgaactttccaaaacgataa

SEQ ID NO: 25580 - DNA, 2396 bp, Cannabis sativa
tcccatttgtctcatcatagcacaaaggaaatgccagtcaactctatcataggccttgctgagatccaacttaagagccatatacccttctttaccaacttgtttccttctcaaataatgcagaatttcaaaagacaccatgatattatcagtaatcagtcgcccaggaataaacgcactttggtttaaggaaataacctcagttaacaagctcttcattctgttggcaagaactttggtgatgatcttagcaataacattgcaaagagatataggccgcagctcgcttatctgctcaggttttttcttctttgggattaagacaatattggtatcattcattccatatggcataaattcattgtgaaaaaaattccttactgtaagaatcacatcattgcccacaatggaccaatatttttggaaaaatttaggattcataccatctggacccggcgacttgtctggatgcatctgaaacaccgcatcttttatttcttgatcttcaactggccgaagaagaatatcattatgttcattactaactgtaggcgtcacgcaagcaataacctcttcccatgtagccgcttcagcagtgaacaaattggtgtagaaatcaagaatcacgttatccaagccattgccccaatgccgagagttcccattagcatccttgagacaaaaaatctgattatttcttcttcgagccgaagcctttgaatgaaaaaacttgctattctgatctccctctttcaaccatagttgctttgatctttgtttccaaaaaatttctttttgattcagcacagcaaacaactccttcttggcctcataaaagagcttttttccttcttcatctcgtctactttttaagcttttaagttcctggttgcaatgcttgatacgagttgagaagttgccaaagacatcttttccccattgttgcaacagtcggccacattcagccattttctcttcgataccgaaccctctcatcctctcccaacaccctttaattatctcctcacaaccttgatgacttgtccaacaattctcgaacttgaaagtcttaacttggtcatgaacattctcctcttgaacctccaataataaagggcaatgatccgaaggagagacttctaaattaaaaagtttagcagaaaagaacaagtttaaccaaggttgacttacaagagctctatcaaggcgagcttcaatccagttaggggtgtctctgcttttttcccaagtaaagggatgcccaagtagttccaagtcacgtagcccacatagagtaaccgcttcattgaacccgtctattaaccatgaaggatacgggttccctccacgcttctccgattgactaagtacattattaaagtcccccatgaggcaccacggaagagttgaccgactatgaagtgtgtgaagaagctcccaagttctttgccgaagacttctatttcgctttattaattatttgcaagtctaacaattttttttttctatctaataaattacaaattggtacaaaactacaatcatttaaattatgggaaaaatattattttaaaacttgtattttagattaaattgtctgttttgttaaataataaaatagaaaaacaaaaaataacagtaaaacaactaaaaaataacaataaaaacttgacaaagtacagtatttttttaaaaaagaaaaatcgcctaaaaaaattagaaatttcggtgtaaatattcctataattttcattatttaaattcaatgagtgattgactttttctttattcatataaggtacatatctatgatacattacaatatatttagtttacttccattaatttttccttttttaatgaccctctttttttttttaatatatgactcattcaatacttacattacaataattatatagaaaaagtcatctacacttgttaattaactttctcaataacaatctggttatttgagaattgctaggttgattattaaatggcgacgtatacatcccttgataatattaatttcaaaatttctatcgatcggtttcatataattctatgatatgaaagtaatttttatatgtatataagaaaccctatgtatacgcacatagattaaattctaggtgtaataatatattagttatatatatatatatatcacgaccatcatcgatcagaacttattactaagttttctaagctattttatacgtactaagaaatccaaatatatttattatataagctagacagagaaattaagtttgttacagttaagttatagtttatatatataatcaaataattaatggggagtaacggatcaaaatatcataggagtactggcggtggtggtggtggtaattatgatcgtcaacatagtc

SEQ ID NO: 25581 - DNA, 5182 bp, Cannabis sativa
  modified_base (3083)..(3089): a, c, t, g, unknown or other
  modified_base (3173)..(3175): a, c, t, g, unknown or other
  modified_base (3259)..(3270): a, c, t, g, unknown or other
agagagagagagagaagcacaacaagttgttcacatggtagacagcaaggcagtgtgtaggctcttaacaaaaccgagtacacgtccattttccccttactcgtacatggacacctatcccccttattattccacctctctcacagtatatatatatatattaaagggtaccagtagtgtctagtactctcttatatattagtatcgctattgattcaactaaatattagatcctatataatttaatataatagtttttagggagtattgctaaccaatcgcaacgtgacatgtcgagaatgtataaagtactactggtgcctaatagcaatgctcaataaacacacatcacttaattgcttttcttttctgtgacgttggttttatttttttagttggactctttttttttttacctcattggtaagttaatacatacattatgtatatgcatttatagtataatgaagtgtgttaattatatataatttatatgatgcatttttttttcttcaaagacaatatgcaaaataatataattaagtacgaaattttacataatttaatttagtttaataattaatatataatatccttaattatttataaaactacttctatttagttctatattagtgtctaataatagtactataaaaaatatcacttttattaatatttttttagccataacaaaaaaaaatagtaactaactgtgatttttagttacaacaaaaaagttacttgtaattatagtatttaaacacaaattatcactaatttaattttagccacaataagtattataaataaaaacatatttaatcacaataagttataatttttgtaactactatttttaaccatgaattttttagtcacaatttaagactaataatttatttataattaaccacaaatttttatagtgtaatagtgttcagaattttattaatccttttgtagttaccttttttattttcttgaaccgtactatatgttgttgaaaaaagaaaacattattgtgaatcatatagctacagcttttattaatcgagaaattaattaatgcacgtaaagttattatatcatgctatagctacagggctttttttttttgaaatggtatagctagggctttggaaacgtcaaagttatttttattggcctgtatttaaatgatctgaaataaacacttcactttataatttatatgcacaacaaatcatttacctagttttttttttccttatatatgtataagacaataaacttaaaataactttttgactcgtagtaactcttagtcttacataatgtaaagtgttcaataataaatgtacgagccaattcaatactttttcttaggtcttttatttatatatattattattatatatatcaatcgtacatgtatatatatagcaatataaatgcccggcctttaacatatagttattgtttgaaagaacaaaaggtttgagtatatggatgctcgaaagtaaatgcagagatcacatcaactccatgcatgtgaacattattaagattattacagtgtagtggtatagcagtactactggcctatacatatattatatgtatatatatatatattctcagcaaaatacaaatgttacaatctcttagtcaactttcacgcttgaaaacacttattggaatatttttttttatagaggtgtttgttatgcttacaaaatcatctctgtaaatttttgaaaaatttcgaataatttacagtgtcgaaaatttgtttataattttttgaacacgtgtggtaaactgaaatatatcataaactatgttttcagtactgtaaaactattcggaatttttaaaaaatttacagggataatactgtaactataataaataccgatatgaagaaaaaaaattaaaaaaaatatttcaacatataatttcggatgtaaaaattgactaaaaaattataataggagattgtaattatcattcctccaaaatattattagctagggatatgactagaccaggtgggtgggggactgtagaaaatttcttggggccaagtgcggttgactgagtttttatgaatccacatgcactcacattcacacctctgttgcattctcttcttttctcaagaaatttttattttggaccaaatttttttttttttttactctcttataaactgaatatttctttacctctgtaaggactactaagcacgtgtgcatgtgagcacgtgtgcgtatggttatatatatgtgagcttccatatactcacacacatgtctgcacgtgcaacacgcacttcaacctaaattgctctcttaaagttgcatttaaaatatagtcacttgtgatctttgttactattttcaatgtctaagttattcccactcttatatattttgcttattcctttgtatttatgcattacaaccattaacacaatgtgcttgttttctcattttttctctaaaccttgtgtattttattatatactaattataaagctattatatataattaaaacgtaatcaaagtatagtttgtgtctgggcaagcttgtcactacttaggttcaaattctggccggaaatcaagattgtccattaagttatatacataaataaataaataagaagaaaaaagaaaaggtattctgtattaggcatgtgttggtcaaagcaaaataaactagctagtagtacaaacctccttgaccttatcctaagggctttgcttttgattaacataagttcagtttttggcggttaaacaagcacattgtgttttatttgtatttaattttttaagtttaaattttaacaataaaatccttcaaactattaaatggataataaatttaaggtgttattcggcaaagtgtcattataaactgcttatgacacatttatattagtacacataatattcttatttataaattatttttaaatattattttgaaattaaatataattataaaaataaaaataaataaatattataaattttgaaattaactttttataatttaaataataatattaattcactacaaaaaactgctnnnnnnngtgataactttttagttacaacataaattttttatgactaaatgtgacttttggtcacaacaaaaacttacttgtgactaaaannnagtatttagttacaagttgtcactaatttaattttagtcacaatatgtattgtgacttaaaaaacacatttagtcacaacaaannnnnnnnnnnntgactaatacttttagccacgaacattttagtttcaacatagaaatgataatttataattagccacaacttttttacttttaaccacaatttttgttgggactaaaagtaaaaatttttgtttttgttaactaaaagtaaaaaattttgtagcatgggtataagtataccaatataatgtgatatatatgtacaaaagtgtacacataaatcgtctatattgacaattaataaaaaaaaaataaataacaccataaatttactattagctcagtaatttgaagaatttcactgtcaaaatttgaacttaaaacgttaaatacaaataaagtgatagttgaaaaaatttagctgaaacaaaaaaactcatataagtaagtaaatagtactaataatgtctatggtgagttacctatgagcattaatgctttctagttctttttcattttttttttaattgttaaaaaactgtcattaatgggtgttttatattgtcatagggaggagggatcgagtgttatataggctatttatgttttgtggggtgtggtgtgttttcatgtggagtagtaaaaatggtctttaaaggacgctgcccactcatcattcatggccagagtccagagaccacactcacatgaaatttaaaaggaaaatgaagttaaagcttcaaaaagccatgtgcaattctccatttggatcactctatttaataataatagtccatccaaacaattccaatagtgtaatccaagattttgccaacccaagtacgtttttaaacccatctaatttggaaatgtctacagtcatgaggccctctcttttggtggaattctctctctctctctctccatttattgaagcattatcaattggtaacccccaatagtcatgacatatccagctcaatatggaccatagtttttctgatcatttgggtcattttcattacccttgggccattattgacttcctttttggagaaattagaatggatgtctaatttcatactttatttagtaactatctcctctttcttattaacaaagtaaagaaaaagaaaataaattagttcaaagtgaacagtttttactgtgataaatatatgaacaatgcgctacatgcctagatagatagatattaatattttcagtgcacaatgacacgttgaaatggacctacgcagtggacgaccttgcaatttttgccagcctaggggcaaataaagacaaataattgtttgatcagaattgctaagcatttattggtagctagtacctttttacgtgtcaatattattattggtataattaagtattaagtttcgtataattaaatttaatataataacgtttagagagtattaataataaattacaaaagtaatacgtttagaaagtactaaacactcaatgacaatgttcttattctattattattgtaatagttatatgtaattgaaaatagacatatattattttgagttttgtaccattatccgcatgatagaaaaagcaagatataattccgaatgacttttgtttgtgaaaagtggacttttgaatatagtctttaattattaaagcctaataattaatacagtttgagttagtttgtgttagttattagctgaggtcttttgtataattagctagttagtttgtctattttgttagttagtttttactcaccttgatttgtaacaaaattcctcagtacggaataagacctctataaataaagaactcaatccaagaaatgatcaagccttcactgtatatttcattgtattttttctaagattcctcatcctctaatttgtctcaaatttgtgatttcaactaccttggcagcagctcctgcaaccagggccggtcttgggcataagcagactaggcccgcgcctaggg

SEQ ID NO: 25582 - DNA, 2409 bp, Cannabis sativa
  modified_base (726)..(727): a, c, t, g, unknown or other
  modified_base (2303)..(2304): a, c, t, g, unknown or other
agcttaaattatcatagatggatttttacatctttttagaataattcctccacccccagagtaaccaccatcttgaattggttattcaaaaccctaaaccctaaaccaacacttgccaaagttggcaggcatttgatgtccagccttgaccttgacaaccacttgatgtgtagcctacatcttggcagacacttggctgaccaacctacatcctggcaggcacttggtgtgtagcctacaccctagcaggcacttgttgctcaacttgcatctagacaacaattcaagctaagaattgagcttcaaccacccacgaaaatagggtataaatattagctatttacctattcttggggtataattaccctatcaattgtctattattttattatgtaacaaatatattatattttgtatttttagggatattaggttattattctcttataagctctcctatataaagaacatcaacctaaacctaatttctctaagtcttaagcatctaaacttgtcaagctctaagttagaaaccctagctctctctccctatctcttctacactccctaggctttatagaagagactaagtgtctttcatctctctcacttgagattcgcctactttcactcactatttaatcttatcttaagagagccacttcagaatccacaacccctgtgatctaagaggtattatctctggtattaatacaaccaaaaggnnagtaggtcattacccgctaactaatgggactgaacctctataaagtacttatctctttactttcctgttcttattgtgtacacttgataatatcggtcagaaatacgactccacggttagttggccaaatcttaggtcaacagtttcgtgctttcattaagagcaatgtcaatttatctgatccatgaccatggttaaaacaaggagaactccagctacaactcctgcctcatcaggtcttccttaaaaccctatgactgctaatcccaatattcgtgttctagccacaacttttatatccacgaatctgacagatgtggctaaccctaccaacccagcaagaacaacaaacttgaccaccacgacttgtcaggttgacactgctgatacggttggtcccaatggccaacctctatcgcctagtgtagatccaccattggcaccttgtactgagggtttggccaacgtggaacaacccctgggaaccgcaactaactctagttcccagtattatgctggggaaccagggccaggaatcggtgagccagccattggcgagcctcacgtggatttaggagaagatctcaaattggccagacttagagaggttgtttgccaagtcgactaaattgaagaaccatgtgtttgttggctgcgatgcattcacacaacaaagacacaaatttttaagatggatgggtgacgaggagtacgtcctccaatctcattaggtagaggtagacagctgtaatagataagttagtgacctgatcaggcagttcaataaaagatcttcagggaaaggtcaagatctgattaaagatcctctccaaggtagactagttgatagattgggaaaggtttatagacaaatagtccaacaacgttctttaggaactaggacagacctccatacagatttagtggtgggagtagccaaactctggcaaccagtgacttggggggtcgactaaggaattcaggcacaacaacacccccacttggccagtgtttggcatgccagccccttagtggtgcacccctactggccaacaaggtgaacttcctccgtgaaacatttgggagcaagtcgtccaaagaccaatctttaatcgactaggtcaaggaatgggtggaaacacccaagacaataacaactggagaagtgaatacaatcacttcagatagttagatccaccaaactcaaacaattggtgtgatctaccccctgtcaataaagaggcatcacaagctaatcaagcgagaacgagcgcctagacattgcccaacattgggctatccggccatgaaaaatttcccaaagaagggctagccagccatggccagttacattacccagggctggctagccaaagccagctgccaagtctagggctggctagccttgaacataccctctcccagtgtatggccggctaggtcctagctaatttaaggctgcaacccaatcaagaaaggccaatcaactaggctcctactgttgagttttgtgccctaaataaaacccattacaatctgattatttatcaatttaagaaatttgaagtgatttatnnttgcatgaatttttcatgcttatgatttaatatatttaatatttgcaacaaattatttaagtccagaacatatatttatttacaattacagtattgtcaacacag

SEQ ID NO: 25583 - DNA, 3445 bp, Cannabis sativa
  modified_base (1856)..(1859): a, c, t, g, unknown or other
gagagagagagagagagaggtcactggcaaaggggaagagaagcttggttgagagtgagtgagagagtgaaagactaaagagagagaatgatggtttagtgaattagttttttctttgttattattttatttttattttttattttttatattttatttattgaattttcggttttattattaaatttaatttgttttaaaatgatttatgcttaattttaaattaacttattttatatttttaataattaattatacggactaataaaattgtgcaatgtgtaaactgtgtactagtggacaatctagcatgtcacttaacagatgaaaatggatggaatagctcaattgctaagggaatacgaattttgaggagttttgccaccaaaaaatgaattttgagagttaattgctagaaaagtaaaacttttagcctcaattaactttatatatttatgttttctttttcatatatagtggcaaaaatttaaaaaatagtatttttaaaagtataatgggatcttttttcttaataaaatattaaatgtagtatcttacaaattaaattaagcatttttttagaaaatagttatatttttttttaataagtaatagtaaatacaaaatatggtatttttaaaaaataaatttataactttttatttttaaagatttttttttgggctaggtgggggaccttgggcgtgggcttagaggtatttgaatgcaagtaatgttgatgccaaaatttggcattgatgttatactcattatttttttccatttttcattaaagtcaaaacaaatgatatattaaataataatgtgtaggacatggtagtaaatttggggagtgctaaccattagagtatttttagaagtaatattactaaagaagcaaattttgggaaatactaaccattggagtacatttagaagtaatattgttaaaaataacatgaaagaaaaataaaataaaatattatatttttagataataaaattttttttaggatatttaaagaatattattattggagatgttctaagtataggtggtacctaatttagcgggctcagtgtaatttttaatactaattattaaaaaattaaatcaaaatatataaaatttaatatttcattataataacgaaaacttataaaaatactaaaatttgggttaaattttacaaaaatactatcacaaggaaactttttcaaaaagtgtttttataaaacaccattagaatacaaaacagaacaactcaaaacaacagtagaacaactaaaagacactagtataacaatagtgaaacttaacacagtatactgtagtatgaaacttataaaaaaaacacagtataaagtactgcctgataatatttttataaaaaaatgataaaaattagtataccatataaatttccgttatactaataactgcagttagcatttcttttaaatttttcgtaaaaaaaattacaccagtataagatatttattttagatttacattaatgtttcaattatatctataacttaaataaaagtgtcaatagtttgggctttttattattgaattacacatgtatccttttagatacatatagcaacaaacaaattacttctaaatgattgaaattaataaccaaataaactttaaaaatgaatttgtaactttaatatttaaaaattattattatatataattatattagtcaaaaaaatacaccacattatagtttactaataatatatatttaagtatttaacacaaggtatattatattaaataaacaatcaattttacatatcaaattttattacaatccaataataataataatataataatnnnnataatgataataataataataaattaagtaaaaaattttcaaataatcgaatcataacattacaaaactaattgtatatataatatgtacatactttaagaataagttcactatttttttacgtaatatttttacaaagagaaaaaattctactaacatagaaagatgatactaaaaatgttatattaacaaatgaaagtggagctatatgagacaagggcgatgctaggtgtagactaggtagggcagtcacctcagatgaaaatattaagaccggtcttaaactatttgaagtttaggtctaaataaatttttttaggactttatacaaatatatttgtggtcaaataaaattaagtaaggttgtttgatgtagtagtaaagtttcttttaaaagttaaaagatcgcaagttcaacactccacaccttaatttttttatttttatttttactaatttttttttaagagaaactaaaatattattattgagatttgaactacctagaaaccgtgtaagatgaaaatatagaatgtcactctataaaaatcactttaacataattacatacgttttattatatctaattttataatcttgttaaaattttgaagtctgaagaagatataaaagtatgtaatcgtcttatttcaattttatttctaacttcgcccctgatatgagataggggagttctatttgtgctccacaaaataaaaaatatactctaatattacccaaaaaaaaaaaatttaatataattttttaaaaaattacttttaatatttttaaattttttttcttgttttaattttttttttcatgtatttttttaaatcgtgtataatttttttttctaataaatttcacatatatatatttttaattttttttataatatttataatatagttatttttgtttaatagatatatttttttttaaaaaaatgatttggaaaattaaaaaaaaactaatataattaaaaatatatatttaatgtaaaataaaattattgaaatgaggtttatttatacgtttttggggtgtaaataaaactcccttacaagataaaaataacatagaaagtttaaatacacaaaattataaatttttaacttatgcaaggaaaaaaaataactaacttagaagctaaatttaaaagagaattatgtttattgcataaaatataaatacatatattatattttttaaaataataaaataaaattattgacttatttaggccttaaatttttgaaagatttttagaaagggttttttttttttaatctttatacttcaaatatttgtttgtatttttacaaaattctacatacataaatacttatagcaactaatcgaacaatctaaatcgcaactaaaattcgtataacaacccacatagaaactatcagagaaactaccagagcaactcaaactataaattaaaaaaaaaagttaaaaaataatatatgaagtaattcccttttaaaaatcactataatattaaaaataaatttaatgtaatacaatatatgtcatttatatactaaccttcacgtcaaatttaactagttttatta

SEQ ID NO: 25584 - DNA, 2901 bp, Cannabis sativa
aggtagacaactttaaattgaaatagaaataataataagtatacaatttataactttacttcacaccatgccaagttgttgttattataatattaacaaatattattgaagttattaaaagatatgtgggatatatatgtttggtccaaataatacaaaaggggctccaaaaatatatcaaagcaaatagcaatcccaaaagatacaaccaccgcaaaaatttaagtaccccacatgaaatagaaaacgttggacaaaaatggggtccacttaatcacgtaattcaacaaaaaaataaagactttttagatcgaaaaggatatataggaaaagccatataaataattttatatttttagagagagagagagagttggaagatacatagaaagtcggttcatggacaattagtctggataatttcaagttatcatttgaatgttcttttaaatttaatcaagaaaaggttttaaaaggcccttagtcacatgttatagtataacgtccaaaaaaaaaaacatgtatacacagcaacgtttcaaaaaaagatatataatataatacatatagtaattaaaaaaatcattaattagcatgatgatttgaaaatttggcatctgatttgatcatcttaagaaaatgcctcaacatgttttccaatcactaccatcacacccgacacttttaggtcatcacatttatatactataaaataataaataaggcttaataattaattaagctcagtttaagtaaagtaataacacgtagtaattcattcgttaattaaaaaaacaccacagcaaatataattaatatcagatttaataaagaaaatattattaatttacctgattagcaaagccaacaccacaaccaagtaagatcctgccaatgatgagcatggcgagattttcagcggcggcgttgaaaatggtgccgatgatgaaaaagacgccggcaatcaacatagtgagccttctgccgagctttctggtggtgtaggaggcaaagaatgttgccgttaaaccagccaagtagagcgacgacgtgaacagttgaagcccttgattgtcgtacttgcagtaattgctttctagatgcttagctgtcgtttttctataaaccaccggaaagaatttcttcaaaaattccggcatagatgttaccccacctatatatatttacacacacacaagaaaaataataattaattatataacatacttaattacataataattcaagttccaagtttaattatataaattataatgaatgatagcaaaatgacaaaagaatccatagcctatatacctatcaagattctagacgtaaaagactatgatgaagatgctcagaacaatatgaatttattaaaatacccttctcattattatatcaaagaggagaagtcactgatcagattccaacttttggtgaaagtaaaaaagaactttagtttatcatgatatgaaaccctatagatctctcagtctcaagtacctttttttattttaactttttaataagaaaagttcacttcttttttcggaataaatttccttatcttttccaagcacaaaaaagttaaattgtcatgggaaatatacgtgagtacttattatttgtttatttatttttttttttataaatttaaaattgaaataaattttccaaccaccatggccatacgacacctaccaaacatattaaaattaaatacaataatatatgatgatccaaacctatatggatctaaactgaaaaagtaatatacatatatatatgatcatagtaataatataattacctgaaacaccaacatcgtagccaaacatgaggcctccggtggctgccattatacatgatataatgacaataggcgtaatcttggcctcaaactccgccccggaggacgatacggcgaaccctccggccatttaattatattggtctctctgctagagagcttaatttgcttattatatatatatatatatatatagcacaaaactatatctattgatgataataataagtataagagacgaagaagaataagagaggaataagaaataatggatataatggagtggtgtggggtggggtttatataggagcatgagctaccaaaatacatgatgtttagtgggagccaccgtcggatcattccacgtgtcgatttcgatggcctgcctctctagtcaacgtctgattacaactttttttaaaaaattcttttaatatatttaattaatttatttcttatattaattatattctaagataagcaatgacttaagagcgtcaaaaagatgaagagagttacgaaagataattagcccatcacttaattaatgtttaaaatttcttaacagataaattataagatcatcaaattaacttaatctatccatccttctaatttgcggataaattaactttttctttattaccccattcatatagcttttgttataataagatataatttcgtatttttagtattgttattaagaagaaaaaatgatggtttattttttaagtaagaaaaaaaaattgaatggttaataatataataatttttgtttaaaacaataatataataaatttataatgatgagagatactattattacataagacgattaagctttggtagtcaaagagatactcgttataacttcttaatgtctagtcattttcctcatccattttaatttgtggtgtcgaatccgcgtgggtaatgaagtactattttttttttttttttggaaaaatgaagtactatttctattatataaaatatcttactggaatttaatggaaactaataattttttttaaaaaaaataaaataaaataatagtacgtgtttattatcattattttattttg

SEQ ID NO: 25585 - DNA, 2822 bp, Cannabis sativa
atattttaaaggggggagattgatactgaacgttgcaaatatacgaagaatactgagaacaccttctaaactctcaaacaacagttttcaaggactcgatcaaaaaggcgagagccaacaggttaaaaaatcaagtagtacctgtacaatataatctggattgaactctaactgctctggagaactttttgagggtcgagctgcccactacagtaactggaaggaacagctgacagctctagtcttcctttccactcctcaccaggtttcaatgtgatatgtttctcaatagcagcagcctcaacacacagcatgtgcttgtattcatcatcgccaaaatcagccatagcttttgccttcttatcccaaggattccagacaactgcacaaaaataacaaatatacatgccctttgtttattagttctaaaagattttaaaggtgttttattgtatagagatctcatgaagggaatgtaatgtttggttgtaattatttcatttccttttccccattcctactaattttttagtatcttatatccatccctccctacacccaacaactatataacttctggcatgtagagtacaatgaagagaatatcaaaatgaacaggtacaggtacaggtacagcctacagctacacagatgtagaaccaaaaacacgtccaccattttttctaaaaagaaagtaaagttgtattattaaaaaaagaaaaagaatttttttacaaaagaggctttgtttatatttaccagcatctggaagtccatctttgcgtacaacaaaagttctctttttctcatgatcaagaattgcaatctttgtaggagtgcttagataaatcttgtccacctaattatttttaaaatgagtatcaggcatatgacgaagaattaagagtggcatcagaaacaaagtgatggaaaaccttacttctgattcaaatgttattgcatcaccttgttcagtaaagcgttccctactcttcaagttgtcaaaataatctagggtctctaatccttcaacccgaacttcactgcacgtacacaaatgatattaacaaaacacttagttacaactacatcttaattatatggtacagaatttgcaataatttactgcagtgaagaaagcaacaaagcttttatcttcatattaatattcctataactggaaaccaatcctaatcattttgtcatacagaaatttccaattactcacatgaggaagttgataatttttataaatatatataaaagaaacaattaaatgaagaaatttcgtagtcatatgcgcagcctagtgatactatatctctcctcatgtcccaagtttgaatctccctcctagtgtggaaagaaaataataaaaaaaagctctaaaatcttatggatagtaaagtattgggatcatttttaaatacaatctaaatttccatgaatggaatcaactcaatcataaggttctaaaggaaaatattttggcctaaaagaaaaaaggatgaaccaactggcaataacattttcacattaaatttattaagaggcaaaaattgctctactggtgtaagcattttgtaactgcaaactgttttagacgtaatcttgcaaatcacaaacaatttccaatgataagactgatttatcatcagcaacccattgtcctaatagtgagtccttttaacaagaagggtacactttaaccagtgaacatgtgagcctgtcatctatccatcaggatattaattcaagacaggaatagcaaatgacacaagtattcacttttaaaatacagtctcagcctggtttttgccagcaaggaacaaagtccagataccatctcaattataatattgaagtaaagcatcaaacttaagtaataaatataataaaacaaagtcaaatggaaggatgaaaacgaaacacatattaactacctaatatcggaaactgagaaataagtatgatacgcaaatgagaatgagaatggcttcccatcagagttggtgttcctaacacgagatgtcagcatgagatctcctcctggtcccaaagccacccgcagccgaaactcataactacaagtgagcacaatataaatatgtatattcaaatatactgatatcaagtatatataatgtaactgtactaggctgaagaagggatgaaatgattataaataatgaaattctagagtatatatataggaagagcaaaaagttctcaagtcttacctgtgtggccaaaccttgacatcatcttcagaaggcctgaggatcaaatcaacataagctttgctgtgggttggtgtgggaaaggggggtggatcattatccacatcccaaaacctgtttctagcaaacccgtgcgactcaagagggccatgatttgcaaactgcaatcataggagaatttccctgaccaagatgaatagaataaaagaaagcaataagatgggggggaaaacaaggcatacttgaggaaagcaaattgggattccaccacgaattgctttaggaggcttaaaaatagcctgcacaagaaaataaaaacattactatatatgttgtattacgtttgcaaaataagtggatgaaagttaaaatgactcataagaaaacagaaacaaaaaaaattgaaagcagaaaccacacctcccataatccattaaatatagggaactgtgtcaagattgtatatcgaacaaggaaaatcctacttattttgatatggtgaataaagagccaatcacactaagcctaaacataactaaacataaagaaagggctaataattcttcatcaattattctgata

SEQ ID NO: 25586 - DNA, 3118 bp, Cannabis sativa
aatggtgatatgtattagtttagggataaaatattaggtatatgtaagtatagaaaatcaaatttctcaaagagtatctggaagcgcatttgaattctatctcttttagatttgtgattagatgtcaggagggtcttgcagactggacctatttttggatgctcgtagagaccatttacaactttcataaaacaaacttcagactgtattcttgagagcacaacctccacaccttgaactagaagttatttttgattgcatagtagctaaggacattcttgagtgtttccttgtccttgtatacctgatctttttcaatttcagggtggtttttgtctattatgagctttgcattgttgacgtcaatctctggatctattttttttattgttgttttccaggttttctaccatttcttcatcaacaagatttgcatagtcaactatgtcaaattggtcattgtctcttgttttagtttcgtcttcttcttctggttgctccagtgtgtacgattcaattattggcgcgttattctcaagcattctcacatttttttgatattgggttgttttttatgtgaacattggtactattgcagtagctgttgtgatgttgttctgtgtgttgacgcataatggatatatggtgaaatcagtttctttgatctttagttgcaagtaaaagaagagactcgcatcgttgaatattttaatcggtggtattccctatttggcttggtactggatttgtagggttgtttttgttgggtcgcaccctaataaagaaagtagaatctacacgagttgtccatacttgcaatcttttggtacgaattctctactagtctcataatagacacaattttttctttcttcccatcgcccattgttctttaagagaaccggtatagatatcataacctgtaatattttcccaatatttaataattcaacattttaattcacatacaacaacagtaaaacaacattgaaaaaattgacgtttgttattttgtttttgtggtcctgttatgatttgggggcccatttattatccatatccttaatttataatataatgcaggttattaaccaagaacgactctacaacaacgtataatatttcaatgtgaattaatcatcgattttttttttctcaaaggtgatgtatattaatttatattttccttaatcttgcatgtatattaatacatttttagatgctactgcccgtttttatttatgaattccaaatctaagtttgggcatcatttttaatttagtatttaaaagaattttgggtggacttaagtgtctaacctctttgtttcgtttatttcaggctttgaagaagatattgggtgttcatttgttatcgatttctctttttttgctcaatctcgtcaggattaatggtttttttgggtatttttgtgttgttctggtagttatgtgcgtcgctattgaagatggagacattgttcttgctattctgtgtctacaacataaaagaaaaaaaaaaggccaggggagtataaatataatttttttccatgtggcagcaatattataaatatttgcccaaaaaccagtatttttgtaagttccccaataatttatgagaagtttacaataatatacaattttcgcatctaatttataataataacgttactactattattgatgtgccacgtcagccaaatttaacgtttctgatatttttttgattttttttaattttttttctttgtttttaaaagtaacttttggttactaatagtattgataagaaaccaattagttacctttatataaaaataattatttttatatcatataatttgcgtaatattttggttactctctaaaaacttatttgtataaatcttagtaactaattagttatttttaagttatattatgatagattataatttcaaatacatttaagtaaccttaaaaaatatttttgaaactaatgagttctcatgtactataacaaactaccacttttatataaaaatttacatgatagaccaaaattttgaaaaaatttacaaaaatacatcaacacggaaaaaaatttatttttgttccttgatcttttttatttacaaaatacctcttcggtgaaaataatgaactattttttagttgttttatagtttatttatagttgtcatgagatttttttttttgttgttttatagttgtttatagtttttgtggggctaattttttgttattttttaattatttttctttactttttgctgaacaaagtctatttttgtaatttcaaaactttacaagagtatttttgtaattaaaacttttaggccgtaaaattgtaaataaaacataaaagaaaggtatttttgagaattcctctttttatataccgattattttttatacatttttgttattttgaaagctaattagttattgtataatgtaatatatttaattaacttgattctcaattgaatgttaattaagatttagaaaatttataagaaataattgcatgaggatacatacttttcattttactaggttaatgttacgtgcaatgcacgtataattaattttttttaattaagtgatgttaaaaacaataaatgtatgtttaattttttttagttagataaaatatatatatatatatatatattgaaatggaatttaaaattttaatttttgatgatatattttgtaatgaatccctcaaaatctgcacagtcttgtcttggcttcggttgtgtagtttatttttcataaatctgaccaaaaaaatataaaataaataaatagcttcccaattatttacaaactctttagatttggattggaagttctcattaaaaataaatggattggattagaagaagaggagaaaacaatgttgtgtacgatgaaaaaaaatctcaacttagattaaaataaaaatattgtaaatacataccataatcatgaaaagaatagatttttatgaatttataaaaataagaatgtaaggatacagagtctgcaacgaaaaaacttggagtttcgatgctatcgcagtacactttaattttttggtttaattattgggtttattttttgaaatt

SEQ ID NO: 25587 - DNA, 3253 bp, Cannabis sativa
taatttcataattaaacataaacagctgctaatttccaaattaactaagcgggctttacagattttttattgaaaattacatcgtttatatcatatatacatatatatgtatatagattgtatatatgcaaaattagtaatacaggtgatggtcatcaaagagcaaaaattaatgtttaataaatctgaaactcactatataaatgtctatctgtttctgtccctaaaatcacaaaagttttttcttttaaaaaaaatacattaattatatattattaatctgccatagttatccctaaattgaagaaagtttaaaaacttaagcaaaccccctgaaatggttatgagtcttataaccaaagcagctttaagaaagacattttctcattatcgtcagctgggaaatttgatttaactactcaaacagtgaatacagactagtataaagtataaaccaacatttatatacatttccagaatcataaatctatttacagatgatagctttcttttcttttctgagaatgaatatttatatatacatgatatatattagataaaaataagttggcgtataataaagtaaatttgtgaattttttgcagaaacaaaaagcaagggtaaatatatttagtcagacgatataataatcccaaagcaaaaggacatcaaagaatttcaacgtagtttcaatgttagtacgactttgtaacaaaatgattgtatatatgtatgcatgacttggacgacatcgacagaaaagaaaggcagattgtcatccattacaaaacttaaaggtggcacagatatatatatatgtatattgacatgaacaaattttaatgaagatctatatccaaattataactcaaaagtactccaaataaatatatatgtatacataacatacacacatgtacaagatatagcaaattagcatatctaaagggttttacagtgatgtacccaaatatatctacacaatacacacctattatatatgagatgattaaagtaaacacacacaaacatatagatatatatataaccactccaaaatgccataaaatatattagcttaaagtttatcatcccttaataaaatacaaataaataaataaaagaacggagacccaaaaatattataaacaccttttttaaaaaaaaatatataaaataaaataaatgataaacaatataagttaaagctcaaataaatgataagctatattaccaaatcattaaaagagaagcaactagactataatagtttgtatataaataaaacctgtaaaaaagaaaagaagaaagatgatgatcttcacggccgtacaagtgaggtctggagcataagtgttagccaccgagtaccactgcagcatcatcaagattctcacacgacgatgatctagaattaaaagtggggaaggtggagctagcaatataagcattttaaccccacaaaaagaaagagagagagagcactctcccccaaaaataaaatagagcaattctctgtgtgaatcttgatgatgctctagtggcaaacagtgacccttttggagatctccatcattatatcatcagatatatatcatcataacgctccatgcaagaaaaggctattatatatcaaaagaagagaagaagaagaagaaaaagaaaaagggatatataattagaattctaaccctaaatcccatcccacaatacaaagttgagataaaacagaagattgaactctagacgtaactaaaaaatctaagtatcctaggaatgaaaaagtgtacagatctaaagaggaaaaaaagaaaaagggataggaaagagaggaaaagataaataccttcttgtctaaagatatttttactaatcgttacagtaataaagtgatactaggagacgaccctatttctatggctaagtcatgagatagggatataagaaaatactttaaataactaaagaattaaaaacgaacgagagaggagagaaaatgtttgatgatctaaagggaagggatagatcaactcaagagagactactctgggataatttaggggagaagctcaatggtattggtatatatagagccccatcacttagaaaaaggagagagtgagagagaagagagagggtagggtaatatcgtattgaataagagagagagaagatagggattagttggtgggtgaagagagagagaggagaaaattgtcagaagaaagagatagagaaagagcaatcagttatcaatcataatcctaggtactaaattagccaaaaactttaatctgcctcacccagtctttcttccccatatgtcaagtggtgaacaaaaatatataaaataggaacaatctctctcataatattaattggaaaatgtaaacttaccagttggccagtaatattgacgagataataattttaattatcataatatatatatatatatagatagagatttggaggatatatatatgtatcttatagatacacacacatgtcctccacaagcataattttgttcaaaatgggggcgatatataaaccaaaattgacaggccctgatcctgacccacccatatatttcaaagggcccgaagcttgtgacattgtgaaagcttctctctctccctcccctctctagggtttttgaggttcattttcatttgccacttttggattttttatcagactataagtttcaagcatgctggttgataaccctttaaggttattactccaaacaatatttactttacctgatttattatgactataaatttacttaatgtatgttattagaaatagttctagactactactcctttttattgataattagtttttgaaatatagaacctatgtatgcagctttatcctaaataacatatgtactatatattgagtcctcatcatcttcaccaatcttacttcaaaaggttatatattgattactttcacagtaatgagtaaactagtgatatatatatatatatatatatttgagtagtgatcggcacatatatgataatactttttacaacaattttttcaaacaaaaataagtcagttacaatagtatacatgtactccactatgtaagtataccatgtaaaaagaattagtattgtccctttagaagaatgtatgccacagtgtttataccacctttcatctgatgacagttatttaagggttatggtagagttacttttcttattatattctatataattatatatag

SEQ ID NO: 25588 - DNA, 1736 bp, Cannabis sativa
ttattagaaataaatggaaaaaaacgtgtcccaatgtaattttccctaaacataaacccatataaacaagttacatacttagttacatgcaacttaaaataagatttttttaaagagaaaattgcattagaagttctcaaaaagttcactccaatccacgaaaaatagcactaagtcgctaacctcattgtctattgatcctcattttaacatattccttagttgctctcaaatgccgcatattagtaaatattaaattactgtattaaattgctgtatgagtccctaaaaaatttactttgtagataacttcataatctcaaaaaattataataaaagttccaaagctcaaaattctagttagtctattactaggtacccaatttaatagctccatttagaatttttaaaattactatatattaaaattttattgatccccatcataaaaaatttaaataatgaaacaaattattaaaaactttaataacctttctttattttcttttattaaagattaaaaaaatattatatataaacaaataaaaaaattaacaaacatctaccatttgccaggttgccccgtcccaacagttatagtctctttgttagttttttgtgtttcgcgactcacccttcttggtggtggagacttagtgtcaactagtgccatccattcatctccacattcttcctcgtcccatcccactatctgagcaaactaattaagcaaaagaaaaaaagaagagatgtgatcgagatcaggatcgtaatcttagagagagattaaactttttttttaatatatatttttaggaaactgagagatatggatggagtatgcggtagagaagagaaatatggccaatggtgggttttggtggacaattctttgacttcaatttttctggtcgtttacttagtttttttttttttttttgttagagtgacccctcttgccaatggaaattggaaaattttggtagagtaaatcgggactgagcaggttgggctgagagtgaataagaagaaagaaaaataaataaataaaaaagataacaaaataaactttactttgaaaattatttaattcattcattcatttattttaagttattttaaactaaaattataatttagatcaacaaaatattaatatttagcattttagaagcaacaaatgaagcagttaaattggatatttactaactaacgagaatcatgagcttggggcgattaccactatttttcgagattgaggacttatttgtatcaaaatgaaatttttggagacttatgtcacaatttattaccaacatatggtatttttggagcaactaatacatctgtcaaaataaggatcaacagacttacaagaatcttaaatttagggactattactaccattttttaagattgaaaacttagagcactcacaacaagtgagttaaaaaatagctaagagcttaaaattaagctccaacaaatgctttaaacacttagctgttataactcatcccaaactcaaagaaattcttctctacatttagctcatgaatagtgaagaggtaaaacatattttatatttttcttgctctcttttattaaattaattaattttttattattctttttactcaattttatattttttttgttttaattaataaaatatatgtaatgtaaaaatataatatttaaatgatattgttaggttacttttagtattaatttta

SEQ ID NO: 25589 - DNA, 2802 bp, Cannabis sativa
tttagcttcctttgaaatgtgatacatactagatagataacccagcccattttccagtttccattttgggacgagttgtacggaggattgtaaagtccccttaagttatctacttcgttccagaggctgataataataatgatgtaatgcaattgcaagtgtgttttagtttgaggctctgaattgtacataaaaatcctaaattaagcagaaattttttgatatattgcatacaataatcatatacattaatctaaagtaaatcatggcaaggttggtggtggtacagcatcatcaacaccacaaatacccatgtccctctcgtctcccttcttcactctacgacttcaatggtgctggtttccacactcaagtcaaggtatagtgttttggaatgttttatcttatctgggcatggcctagaattgctttatgttatttcttttatccattttaggaccattccattcaaattctctttatatttatagcttattaacagttgctttgtgtcttgggttattgggtttcattcaactgaaaactatttgtttttttggggtttactaatcactctccttagaaattgttagtcttgaggtcttataattcatgacttgttttgggtagttagtgttttcttatattacaaactatttatgcaaattttttatcaattttgtaatgagaaagctaacttgttagagagtcacattgacaatatgtgggagtttcattccattgactactcctcttattgccaattgattttgaaatggaacgctgtgtaccttactccaccacatttttgaattctaacaaaaacacatacctgtaatgagattagaggagcttcttacttgtaagtgccttgtagtgtaggcataaaagtttactgggaatgagtttcaggaactggaaacttgctctatttgactttgacatgtctttaaacttctgtgacaaagtgactttgtcttgttttgaaatttatcagtcccattggaatgtacaagcttcttaagaattttccttgaatctacttggacatagttcatgtattaatgtcacctgtatgcagttgcagtgtaagaaaaaggtatggatcaagcccaaaggaggattaagtatcacatcttctagtgcaaaaaggacttttatgatggatgccattcaagtcaatgaaaagcagtgcccagaatctcatgccaaagagaagtgtcaggtgatattcactatactcatttataatttaagggggcattcataagcataaactttctctaactttgttgtttagtgatgaatcatacaagtttcatcatggagtggcattctatgtttgaacattgataatggtttacatgtctaatatataatcagactaaagcttttgcaattcctagaaggaatgcaatggcattgatcttgtcaggctacctcttctcagaagttgtgtcagttgatactgcatttgctcaaaaatctgttgccttcagagaatacatagatacttttgatggttattcattgaagtaccctcaaaattggattccagttcgaggagctggagcagacatatttttcagagatccttatgttcttgatgaaaatgtctcggtcgagttgtcctctccatcatcctccaagtacaagagtgttgaagacttaggtccaccagaagaggctgcaaagaaagtactgaagcagtatctgacagagtttatgtcaacgagactaggcgttaggcgtgaatcaaatattcttacaacatcatcaagagttgctgaagatgggagactatattatcaagttgaggtaacatatactttgtattgaaatgtcaattccatatggaagatgagttagctggtgttagttttcaagctcatacatcaaataaaacaccatagtaaaattattgaagggtttagcagattagaatctcctttattgatgtcatttttgtggtaaccaaactatgtgaatcaaatgtttcatgcccttttaaaaactgttttggaccttgtcttttcaccaggtaaacattaaatcgtatgctagcagcaatgagctagctgttatgccccaagaccgagtacctaggctcgaatggaataggcgatacctttctgttctaggagttgaaaacaatcgtttatacgagctgagacttcaaacacctgaaaatgtttttgaagaagaggaaaatgatctccgccaggttatggattcctttagagtaaacaaggtgactgtttaacaccatgatgtaataacaagcattattctttttctcttttatctatgtagcttttttgtcctttctaaacttcatctgtggccagatagttgattgtttgaatgagatatgcattcttgttaatgaatttttcatacaatattcaatgccaagaggagtactagtgtaaatcttctgtttcaatttcttagtcaatctctatgctcgaaaacatttgtcggaattttttttttaattttttttttcacgggggtgttcgttatgcttacaacatcattcctgtaaatttttgaaaattttcgaatagtttacagtgtcgaaaatacgtttgaaattttttaaacgcgcgtggtaaattggaatatcaagaattctatttttggtattctaaactatttggaatttttaaaaaatttacagggatgatactgtaactataacgaatagtcgaatactgctgtgaaaaaaaatatttcggcatgtaatttcgaacgtggaggttaactaagagattgtaataagaggttgtaattaacact

SEQ ID NO: 25590 - DNA, 1998 bp, Cannabis sativa
gtttgaatacaattgttgtcatttacgtttagttgagagaaatgaaaagataagaataaaaataagaatgatgataagaataggaatgaaatcaaatttaaaatgaacaaaaaaattgataaaaaaaaataatttacggcataaatacttaaatttaacttccagttacaaaaaaatatataagtaatttttgacggtaataatacttaaatttaacttgtattagaataatgcttctatttatttttattttttttgagtcaaatgatagaaaagattccattccattttattacctctaactaaacgccactttagtgttatcagttgagtagaaataccaagaaaaataagctaattctcccattttaacagcttaccaatgatgatgtgatgttatatcatcacataatatacaagctaaaatgatgatgagagcatataatatcatcaccagaaagcagcataagaaacttcttgttattttcatctccaaacatagcattgcactgattaacaagaaccttaaaacaaatgacaatttttgaaaatatataacattaaaaattaaaagatcacacaaggaaaacttagaaattgagctaacaataaaatagaattcagaaagttcacaaaataaattttctgcacagggcatgaaagtcagcagaaattattgagagggaaaggaaagatcacattcagtagagtgcctccaccaagaaaggatttttagtactttgactgtctagcgatcttgaaccattccgtatggaaagatccttcaatatcagttctttcatatgtatgggcaccgaaataatctcgttgggcttggaccaagttagctggcaacctgtcccttctgtaagaatcaaagtaagcaagactagaggacataccaggggtgctaataccagagttgatggcaagacatacaactcttctccaggcagattgcctctcaatgatttcctttgcaaactcggggtccacaagaaggtttgcgagatcagcatttctgtcataggcttgcttaattctgtccaagaaaatggcccgaataatgcaacctcccttccaaatcctagccaattctcccaacttcaaatcccatcccttttcaacactctttgcacggatcagattcataccttgtgcgtaactacagattttggatgcgtaaagagcttgtctcacatcatcaatcaactttgccttgtccaccacttggtcagtcagcacatcaccaaagccactggctttaaagactttggcagcttcaactcgttcatcctttaacccactaagaaatctagaatccaaagaagatgcaattgtgggagctgcaactgatagatcagcagcttgttgtactgtccatttaccagtacccttcatgcctgtcttgtccaaaaccttgtcaaccaaataaccttctcccttgtcatccttgatcccgaaaatatctgctgtgatttcaaccaagaagctgagaagctctcccttgttccattctgtgaaaacattgtgtagttcttcatttgacaattttccaactgatttgagcacatcataagcttctgctatcagctgcatgtcaccatattcaatgccattgtgaaccatcttaacaaagttaccagaaccccctttgccaatgtaagtcacacaaggtccactgtctcgaacttgggctgccaccttaagaagaatatcttctatgtaattgtaagcctcaatggatcctccaggcataagagaagggccatttcgggcaccctcttcaccacctgaaacacccattccaaggtaaagaagacccaactcggccatggctttctccctcctctcagtgttttcataccactcattaccgccatcaatgatacagtcacctttctccaagtaagcagagagggtctttatagtctggtcaacaggtgccccagccttgacaagcatgataatgactcgtggcttttgaattgagttaac

SEQ ID NO: 25591 - DNA, 4275 bp, Cannabis sativa
  modified_base (2156)..(2156): a, c, t, g, unknown or other
ctctatcaactgtgcttaaaattttggcattcggcttctatatgttattattggtttgacaagaattagatcagacctaaacctggtgcttctggtgctcgtgtgcacctcccttatcttgaagcatatgccactacaatggtgcatgactacggtgataacaatgcttggtttgcagacacaggggctaacagtcattttgcaagcaacttggataagatggatacatctgtggcatacaatggaacagaaacacttgatgttttggatggtaagaaactccccatcttcttcttgtccattaaacttgacatatgttcttcaacttcctgctattaaaaagaaccttgttagtgtttctaaactcactgaagacaataaagtttttcttgagttttagcgaaattgttgttttgttaaggacaaaaattttatgatatttttgctcaggggacaagttaaagatggcatttacaagcttagagatgactctgttggtcattccattccctctctttagtgccttcttgtgactgaatctaagtcaaacactcattcttgttgtaatacaccttgtatttcacataataatgacattacattattgtagtacttccaatatcaataaagataataaatttttgtatgttcttgattgcactcctttagcttttgtgtcatctttacaaattgatattaatacttgacataataaactcgggcactctggtcctgcaattttaagtagacttcttcaccatattcctcattctggaaaaataaaagacttaaagttttgtagttcttgtcagtaaggaaaaagtcacaaactaccatatcccttgtctcaaaattatgcatcttaaccattggaactaattattttggatttatggggtccatcacatgtattgtctaaagagggttacaaatactatgttcattttcttaatgattatagtcgttatggatttttcccttacacttaaaatcttaggcttttgatatgtttatcaagtttaagagcatggttaaaaaatagctcagtttgcatatcaagattgtacaagcttactggggaggagaatataggatgttttaaaggttcttaagggactaagaaattcttttttcacatccttgtccacatgatcatgcacaaaattatcgagttgaaagaaagaatccacatgtatctgaaactggtcttactatgcttgcacaagctggacttgatttgtcttactggtggtcagcctttcaaagttttgccttcactagcaataggttacctactacaattttggggttgctaacaccctatgaatgtctatttcatagtgcacctgactataaaattctaaagacttttggttgtacttgttactgttatacctaatttttaactatttaatgaataagttgagttgaatgccacatggcataaaaaataaattctcacaataaatacattgtgggacaggtcaaaataaactaaggactcaacccatgagatgatctcatctaaataaggatcacaaagttcatgaagttaggtattttagtattgtcgggatgttatttcgataaacattaaacatcttgcaataaagatcttgagctacttgtaatacaaagtgatgaatcacctcgtaatacacagtaatgatgaatcacctcgtagtatacaacagtgatgaatcacctcgtagtatacagcagtgatgaatcacctcgtaatacacatcatcgatgagtcacctcgtaatacacagtagtgataaatcacctcgtaatacacaacagtgataaatcacctcgtaatacacaagcagcaatgtattgcctcatattaaacatcagcagtgcacctgctctcaaataacattatctgaccaagtaaaataccacttcaaaggctacttttttatattttaaatataaagaagttatttatacttatctaaatattcagttatatgtaaaacgtgggcaataacaacccatcaattgtaacttttcactaagataagattgagtaaccaccatcctattcctataaagtggggttaactcaaagggaaaaaaggaggcaattttaatttacagaaaactttgccaaattgtaaacacaaccaaaactcagaaataatatngactcgtggagtatgtagattttgactacaaaaccacgtaaacatatctggtgttcatttatttttttattgtctcttcttttcttgaatttattcttcaattaataatcttcttagattaagttgacaaaaaattgggtcaacagtttggtcttttgattgagagaatgaagtctcaagagatttaagaggaagagagtcagattcatcatcctcacaatctcaacaatgaaattggttaaaattgagagtctagtggaatcttcctctagtaatcatcatcaaagcatgcagaaagtaactttaaagttcttgcctactttatataatattataattatatatgtgaagtatatataagtctttagccactaaaagggcataaataaaatatatacatatattcatatatatatatgagagaaagactatatgtatgtatattcatatatatatatatagaatgaatacatatatttatatgtatgagagaaatgttaaatagtgtcaacgtgtaagatattttatttgcctaaataatacgaagtgtttaagttgttcacttactgtctattcaagtagttgtcaaagcatttatatatataatttctaaagccaaattgtgatcaagtgatgaaaggaaaaaatcttatttgttcacagccccaaacacaatatacacgtagataactatgatcatagataaatctactcgtagataactgtgctcgtagataattatgatcaaagacgaatctacttgtagataactgtgctcgtagataactacgatcacagataaatctacacgtagataaatgtgttcgtatataactatactcgtagataactaggatcacagataaatctacttgtagataattgtgctcgtagatgactatgagcacagataaatctactcgtagataactatgatcacagataaatctactcgtagataactatgatcccatataaatctactcgtagataactgtgcttatgatatctatgctcgtagataactatgatcatatatagataaatctactcgtagagaactgtgctcgtagataactatgatcacagataaatctacttgtagatgtctatgctcacagataactatgatcacaaataaatctactcatagataattgtactcgtagataactatactcgtagatcactatgatcacagataaatctacttgtagataattgtgcttgtagataactgtgcttgtagataactgtgattatagataactgtgattatagataaatctacttgtagataactgtgctcgataactgtgctcgtagataactatgctcataagtaactatgatcacagataaatatagtcgtagatagctgtgctcgtagataactatgctcgtagattactatgctcatagattattgtaatcatgataatttttcttgtagataattgtgatcaaagataaatttgctcgtagataattgtgctcatagataaagatgactcaatctgcttaaagatgacccaataagtttactcatagaagaaatggagataatcgatagagaacaactcacagtacttatgaagaagtaaaacttctaatctggtcacaaccagaaaaagaagataacttcaatttttattatagacatggattgaagaagaaaacttctaaactggtcgcaaccagaaaaagaaaataactttgaatttcgttatagatatggaaaaaccatattatgatgaaacttttcacataaaactttgaaaatatgcataaactagtatctaataaacctggtccagaacaggaaaggtaaactagttacatataaaagaaaaaaattagaaaataggaaagttaaatgagaatatgtattacaattgcttattcgtcatgtttaagtaatattttgagctcattatacttaaaagtttaaataagcatatttggtcgtagtatatactcgtaatatttctagtcgtaatacatactcccatgcatctagtcgtagtagatactcccatgcttttagtcacagtacacactcccatgcatctggttgaagtacatactcccatgcatttggtcgtagtacacactccca

SEQ ID NO: 25592 - DNA, 1888 bp, Cannabis sativa
aaaaaaaaaaaacattgctattaatcacttgtggtgcttaatattttttcgacatattttgcgattgtttagccatatattttaaaaattattatattaaattatatggaacctaatatttaattggacaaataacactattaacacataatataatactaaggtgccatttaacatttctcttaattaaaacatgagacataaatatcattaataattaatgaaacagagttttgaaaaaaaaataaaaaataaaataatgaaagagtagggtctctttatattgctgacgtgtgacggataatgatttggaagctacagtcccaatatgatataattttttttttattgtcgtcaatatatatattcatcatatatcattacaatagcctaaaattataataaaatgacaattataatttataagtttctctaaacttaacattactcatagctcttaaaaaataatttttgattctgccaatggatgtattttttttatatgatatacatgcatggcttgtattgtattgatctaaatttcatacaagatactaattgttatacacaatgacaaataatctagaataatatatatatattatatttcttgtattaatttagtgtttagattctctctcaattttcgatcaaatatgtcacgcattgaaatatatagatataacccaaaaaatgaatcatatgaaatcgacaaacctcccaacaattccaagataggcacaaataattgagaaatattagttttgtacctagaagttagttctgtatatatatatatatatcttaatatatattatcattaattccggatagagtggaataagtacctatgctatatatataaaaggggatgtttatatatacttaatatataatgtataatcgcgcgcgcttgtcacagctaattagtttttgaattgtcacaatattatatagcaattagcaagtaaacgcacacagtgtaattttatgtatttaataagtactaattgcactattataattaacataacaatataattagaatacatatatgcactacatcatttatatatatatctttaaaaaccaagaagaaaatactattaaatttattttaattacatgatttgtatgtttttaaactaataataatattaatgtgttaacaaaaaaagacaaagctaattactatttgaattggattataactaggataacgattttttaacatccaattcttttaattggatttaattgagtgggttcaattaatgccttaatttagttggcggtatatgttttgtatagtttaatttttttcataattaaaaaaatatatatttttgtcttaattttgagaatgatgaattatgtaagtttcaattcattcatttataaatgaaaaaatattttgattatatttgaattttttttgattttaaaccaattttactcctatattttttttattaaaaaagtgatgcccaaattaatattctaaaaatatagtattattatagtaatatatggtccagcactttttataactaaagtattttggtcatttttaaaatttgaccaatttcttattgtaatattttagttgggtctaaaattatatttaaaaaaatatagagtgcaaactaccaatttatcaaaacacaaaattcaaagtaacatataacccaataaagaaactaccaatatatatatttttttttaaggaagactctttataaatttaaatttataaaggaggactcatcacagttacatgtatactcttgataatgtagtaccaattaaacaattataagactataagagggcgggtgtccacaatcatctataaaagttatagttaatttgatatatatatatatat

SEQ ID NO: 25593 - DNA, 2697 bp, Cannabis sativa
  modified_base (2221)..(2224): a, c, t, g, unknown or other
cattttaatcaagccatgcttgcttagaattcttaaaagccatgattctttgttaagtctcacacttaaagctaggtattttccttatactgccatccttgatgctgtcagtggtcatagtccttctttctcatggagaagcatcctttggggtagggatcttctaaaaaagggactcatttgaaagattggaaatggacaaagaattaatacaattgaagaccgttggctgcctggttttggtctcaatcccaatgacctgctgaaccctcttccttctcctcatttatcactttttatctccccttctggtgcttgggacttggacaatctaaaatgctactttgatgattccctcattgatagtatattggacattcctattgctgggcataattctaatgatgacctaatttggggaaaaaatagcactgggatttttagtgtaaaatctgtttatcaccttactgttagttctagggacatccatacctcctcttcttttaaaaataataaaagattttggtcaacactttggtcttcccgtgtctctcctaaggttaaacattgtgtctggcgtgtgctttccaattcaattcctgttgtatttgaactctgccataggcacataatcccctcccctatttgtccccttgccacacaaaaccagaatcggtaacatatgctttccttgaatgtcctagagtaaaaactgcttggaaacattccccatttaataattattttgctgaaaataagttccttaatattattgcttttttattgctaaggcttttgaaacttttgacaagtgtgtgttaaatatttttttgtgtttcctttggaccttatggaatccgagaaataattgctttcatcacaacaaatgtttgcttccaatgtttctatatgatcatgcaacaacttacttgcaggaatttgataaagtagaccgcatggcaagtaaaggaattcaacaataatagtctatgggaagacaacctgcccaacttatgcctacaaagtttaaaattaatattgatactgccttggacaataatgcaaaaaatcatagcttgggagtggtagctcatgatgattagggtaatgtgatggcaggtgtaattgctcccataacaagaagtgtgcctcctgagatagcagaggctaaaacctttcttctggctttagagtggattcaagcaattaaccttcatgttgctaccatagaatcggactgtaaaagctcagtggataaaatttataataagttttgtaatcattcggtcctaagtgatatagtcttgtgtatttggaacttgttgtcgtttagtcctaatctctcagtcacatttgtatctagagatcttaataagcttacgcataaatgtgctagggctggtttaggattagaaaacgagtacatttggaatggctctttgccttcctggatatcctgatatttgtacctttacattgttttctaatgaatcaagcttttattttcaaaaaaaaaaaaaaagattagaaatataatattagaaatatcttaattttgtattatcttattagttatttaattcatttaaataatttaaaaattagtttgatatttgaatttgaattgagatattttaggattttgttagatttaatatttcttaaatattttataactacctaattcgaattcaaattatgattttttttcataatattttatttattaaaatagaaatattttaactaactttttacatcttgttacatgtttgtttgtttattcaaaagtttttttttttttttatcaaacctattatttatttaatttaaattgctatgattaacttgtggataaatccaatgatctaattttaatcttagatcaaataaataatttgtaataggtaattttgtaaatagtaacatgaaaaggcccatccaaatcagttgtctatgcgagcctatatatttgtaattgggcttagatgcatataagaagcccatttaattttaaatatttaaatggaattattttataaatacacaaaaacaataaaaaaaaattacaaaaatacggtttcacggaatttcaaatattgttacgatttgtttgatttgttttacagaaaatacggtctttttatgttgtacttgttgttgactttttgttatctgtatgttattttttattgttgttttaatgttattttcatgttannnntatgtagttttcttgttattttcatgttgtttctatggaaaatcgtaaaaatataaaaaaaaaatctttcaacgtaaaaatgtaattttttttacaaaaaaaggtgccttatgtaattatctttatttaaatagagtatgttgccaaaaataaaatatcaccttgatagttttatttagacctaattagtattggacttattcaatgaataataattattaaattaagaggatttttcataaatatgagaatttttgttgccatttacttttttatggcagaaaaaaataaatcaaaaagatatgggaaaaaaaaataattaaatggaaaaatatgggaatccaaaaagtatacaaattggtttaaattgaaaaaatccgtactttccaaattaaaacataacagaaaatcatctccttcgatctctctctccctaatctctgcgatttctctccacaattctctgtgaaatt

SEQ ID NO: 25594 - DNA, 1423 bp, Cannabis sativa
tattctaatgactgaattattgtagttatttaatttattacttattataaaataaaagtgagccatgaaaatggccacacaattaatacataaatacaaatatttcttgggatttattcatttgagagatgaattaatttcagttctcttatgatatgatcttcaacaaaaaaaaaaatgttgtagagccattataagtttctcttctcatacataaaggagctgagaaaaaaaaaagaatcaaaacacaattatgagtaacaacagaagaaaagtaaaaaatattaaaaaaaaaagttgtaaactttaaagtttaattttacattcataaaaatacagaatcacatactttacaacgttataatttgagaaaaaaatttgatttttaattttaaaatcaaatataaaagaagaagctttatctcaaaaatgtagatataaccatcaaagcatgaaatctttcccaattttcctatcttaaaaagctaaattttaagaaaaaacccaactttatggtatttccctttttttttttcttttactactaattaatcacatttcactagtgacactattcattgcacataagtaaaacacagtgtttaatttatttttaagaaaaaaagggatgcttctgtctaatccaaaagaccccacttttataaaagcaaactcttttgatttatttatctcatcattcttcttgcctatgataatttaagctagagaacatctaatttaagctcacatgaggtttttcatacacatatatattataagtatataacatctccttttccttttgagaaagaaaaataaaaacaaaaatatgtttaataatgtctctcattatcaatacttactttagatagagaataatgtcttctcattctcaatctcatgggaacaaaatctttattattattattattattattattattattattaagctttgtccttagtccccaaaatcacaaatctgcctttatcatatgatacataaatgagagcaataataataatataaaattttctatttttgatttattttcaacttaatctcaagtctcatccaaaaataatgaaagaaaaaaaaaagggtcactaagaaaactgagtgatgagctttttattttatggcacatggatctaaaaaactttattcatttaatgataataataataataataataaagtaaagtataaaatgaaaagtaaaagagagtatagaagagaggagagaagagggtgaagaggggtatctcatatatctgtctgtgtgtgctttgggatctgctcacattgtttgtacggtcatgctcatcatcctaaatcatcttaaatcatcttaaatcatcaaatcaaaccataacattatattttcacaaatctttatttggtgtgtcatccatcctccta

SEQ ID NO: 25595 - DNA, 5612 bp, Cannabis sativa
  modified_base (3831)..(3838): a, c, t, g, unknown or other
actgcgtattttgctccacctcgccctgtgggtaatgccccaatcaaatcaatcccccatattgcaaatgggtatggcgaggtcatcattctcaagtcggttggtgttatgtgaggtatatgtgaaaagctttggcatttgtcacatttcttaacaaattcatgtatgtcttttttaattgttggccaataatatccttgatggatgatcttcttggatagactttgccaacctgcatgattgccacagaagccttcatggatttctctttttattttatttgcttctgttggtaacacacatcgtaggagaggaatggaataaccattcctatatagttttccctcaaccattgtgtagcgaggtattgagtacaagagtttgtgtgcctcaattttgtctgcaggaagttctccactaactagatacttgacaatgggtgtcatccatgttggtgaagtatctatcatctcaacttcttcctcttcacatatgcttgggtcattcaagacttcgtctggtaccaaattcaacttctcaagatcaaattgggatgctagctttgctaatgaatctgcattagagttttgttctcttgggatttgtttgatttttaaataatcaaacttttccaagttcttctgaactttctctaaatatttagccatttttaggcctttcgcttggtattttcccaagacttgatttacaattagtagtgagtcactataacatgtaagatttttgacctttagggcttcacctattcttaaacctaccaacaaggcctcatagtctgcatcgttgtttgaggtatcaaactggaatctcaatatgtagtggaatttaaagttatcaggtgacatcattatgactcctgccctgagccattctcgtttaaagccccatcaacatataatttccatgtttctgcttcgtgttcaacatttgggtttattccttcaatcaaaaagtcagccaaagtctgtcctttgattgacattcttgggttgtaagttacgtcaaatttccctaactaaatcgaccactttatcaatctttgtgaagcatcaggttatgataaaacttgcctgagtggttgatttgttaagactttaattagatgtgcctagaaatatggccataatttgcgagatccatgaattaggcataatgcaagttttttaagaggtgggtacctagactctgcccccaatgaccttttactgacatagtaaacaggttgttggagcttaccctcttctcacactaaagtcgcactaatggcatgcttcgagccagccagataaaggtataaagtttctccaattattggtttggcaagaattgggagtgttgacatgtgcttctttatgtctttaaaaggttcctcgcattcttctgtccattcttgttgcctagtaaaatattaataaatggaaggattttatttgttgacttcaaaatgaacctattgagtgttgccattcttcctgtcaaagactgaacttcttttagctttgttggtgaaggcatctcaatcaaggccttttttttctgggttgacttcaattcctctcgcatttactatgaagcccagaaattttcctgagaaaaccccaaatgaacatttctttggattaagcttcatgttatattttgtaagtatatcaaagcattctacgagatcatttgtatgatctttactttttatcaactttaccaacatatcatcgacataaacttccatatttcgtctgatctagttctcgaacacaccatttactagtcattggtacgtcgctccaacatttttaaatataaacgacatgactttatcacagtaaagtcccatatttgttgcaaagctcctatgctcttgatcagggacatgcatctttatctggttatatccagaatatgcatccataaaagtcatcagctcgtgtcctgctgttgcatccactaactggtcgcaactgggtagtgggaaacaatctttaggacatgccttatttaagtctgaaaaatcgatacaagaccttcaagtgccattacgttttgggacaagaactagatttgagatccacgagggataaaaggcctcgcgtataaattcattagtcaataatttgttaacttcttctttgagtgccccttgtctctcggaatctaatggctactgtttttgttgttttgctggatagctggggtcgatgtttaaatgattataaattacattaggatttattcctatcatatttgagaggctccaggcgaattgatcctaattttcctttagaaaatcaattaattgctattttagttcttactccaaatttttcccaatgtaagcacattttgtgggattatttggatctaaaataacttcttccaactactcaatagatcttcttcttccctctcgccttctttagttaagattaccatcaagatgattgggtctcctattctgcagttctattcgataacactctcgagctaataattggttgcctctaactactcctactcttgcttaggtaggaaactttaaggacaagtgtttgattgaacttactgcccccagtccaattagtgttgggagacccattaatacattatatactgatggaagatcaacaactaagaactcctacattagtgtcaatgataagggtggctctcctacagttattggaagttcaatgatgcctaggttggggacattgtcacctgtaaatccacataggctcaccatacatggcttcaacattgcatcctctaatcctattttttccaatgtctccttgtaaaggatattgactgaactcctgttttctaccaatacccttttcacccttttattagcgagttagactatcccaatgaggggatcaacatgtaggtattgtacgtgttttgtatcttcctccaagaagataattagaggttcatttaattttgcctttttcaatggttctaaagcaaatgccaattgtccattctttattcatttatatatctcttttgggcattattactatttctagcgaggtgcgtccctcccgaaatgaccagtatatcctcgccctcaataggaggaggttgtattctctagctatttggattattaaggttgttgggctggttaagttcgtttccttgatgtcttacatattgtctgaagtataactgcaagatcaggctttctatctcgtccttcaattatcgacattattcgatagtatgccctatatctttatggaattggtcgtattttgttgaatctcgcttatgtctcgcatgcctcatgggctcgggtttgcgaaatgcaactctgttttcattagcaaggaatatgttctcgcaagtttcattcaactcagtatataccatattgttatacccaaaatttggctatcattccaaaggaggacacgtgttaaatagggaagaatactaatcaatgattgtaacggtaattatattttgaaatagaataactcattaatgcggaagtgacatagtatatttataatttgctgactataaggtcttacgccagataaagatatacaaattgttgcctcatatattaacgagaaaccatacaacttcagatgtacaaggcgaggcattaacctcgctatgcattaggagatgagacatggtgattggtaagacacttagcgtataatacacaacatacaaactaagtataacagtcaggtaaacccaaacaactaatagcgaggcatccatatcgctataggagggcatgcacgtggtaccttcactaatcaactctgtcgagtcagctctctcagnnnnnnnntgacattcaaatgatgttggctgttaaagttcatcttgtagccaagaactgcgggtttttagatagggcattatgtctttaggcgcaggaatgacgaggcttacatcattagcctcgagaagacatgggaaaggttccagctcaataccaaggctattatcaccatgttcccaacgagaaattccagagcgttacagtttacgacgtgtttaatgcacatttaccttgaccaggtaaaaatggacctatcatagctgtgtgattttcaaagatttaccacatttattttacgtggtatgtaattaaactccatgatttcaggggataattattgtaagatatcagtcaactatgtaattaactgccctatgatgtaattataaatagaggcaagttatactaaaaaaaggaggaaaaattcataagaaaaaaggccctagaactgtatcagtaatctaacaagattgactcgtggactatgcagaattttaactgcgaaaccacataaaaaccttcgtgttcttactgtttgaattttctgtgcaagtttatcaccatttaggctcaaatctagtcaatgaaaatctgcattaacagtttggtgctttccttgagagcctttgtgaaaaagcttagaaaaaaccctccttacatacaaaaaacaattttcttcatggttgacaacatagagaacgttggcacaccacatgaagaaactcctcaccgtcctggaaacgaggcaatgggctccaagaggccttccaactcacagtctaaacagatcactcgctctaggaggacccaacctgagggtcgcccaagcactcggaccactcgttccaggaggacccaaccttagggtggccctagcacacgaacaacagattcgagtaggactcagcatggaaatgaacaaaattctagaattagggatgaagaacccaatcatcggggtgctcaacccatggatgagggtgcttatgaccctacaaggtacatgcctatcgtcaaattagaaaaccgccatctcaggcgctctctggaggaggcaaaccagcggaatgctgaattggagcgtgaagcagccgcagctagggcaacactggggagcaatactcaaaatcaacctaaccctagagttagaagaccacgaggcaggcctcgcagctcacgaaccagtagacaagaaactacttaagagaaccctcaaagcgctcaggaagaatgacctagagaaactgagggacctcctgaaaatgagcaacctggggaaacagaggttcctcccgaaaacctaaatgatcaaccagaaccatctcagaaaaatgagaataggaggcgaccggaaaccagggaacaggaaattccacgtggaaacaaggaaaatcctagaacacaacctggggaaagtaggaaccaccaacattcttctcggagccataggaaaggggctcgtacaaatcccaataggggaaacacaacgaaccacaccaaagggggaagaacggggcatgaagaagcgagtgtaacctcaggctgcataagaacccatagtcagtcaacacgaggaggagaaagtactcgtcacagcaatgatcgagaaagcacaggtacaagtaagattgtaagtcactcaaggacgaggtccatgagtaggacaaggtatatgagcaggacaggtttgtaagtaggacacagtccatgagtagaacgaggtccgctagtaactataaccaaccggatctgcgagagcacttgaaccagaaaaaacctg

SEQ ID NO: 25596 - DNA, 5371 bp, Cannabis sativa
  modified_base (4249)..(4249): a, c, t, g, unknown or other
tatacttgcgtagtgtttaaaattatagcaacactcttgggacaagtttgaagggttattctatacccaattctcttcagcctgacagatactgacagagcaaggtaacttagttgccattaagcaaaggcctgacgagtcactaaaatactatatccaacacttcatgcatgaagccaccaaggtaaagaacctaagtgacgacagcaagcgagccaccataatgggggcaccacggtgggaatttaactatagaaagatacaaggagaaagccaactcattctatgaaagacttcctcaacaaagttgatgaatttattaaattggaagaggctaagcgaaatcccaaaggcgtcaaccaagctaagggaaacaagaatagagcaagctctagtggccaaggctcccagggtcaggggcaacaataaaaatggctttaatagtggaaagagggcaaacaatgataacggtgcaaacaactttattaacaacaaaaagccaaacaaagcatcatcattgatgactacgtcctcataaatgatacaatcttcaaccacgtgtgacattacccttatccttacctatgggtatgatatcccatcattccaccaaaggatgacttaccactaagtacggagtagttgaggtcatcgcatctggaatatataagttagcatgttacggtgaaaagacaaagttagtactagtgccttgctattgaaatggagagcacctacaaaagtactaccaatataagttgcttttcaacagttacttaagctggttggtgtacttgaaaagttcatttccacagctggtcatcatacgttccagcaaagtttggtaatgtaaaggcacgacttgcccacttttgatgtaataaggcatgtttgccaatttcaataaaaaaaaattgcaagttatttttcatataacgacacagcttgtatgattgttattgaatcaaattgcaagccaaacaaaggtcaagagtgtatgaaattataatggcaaacccatgacaataacagttcttatgtgaaagccctgattacttaacaagtgatcgagaggtgaacctacttagtcacttgggggcaaccactctcatacatgaactagtaagcataaaatgcactaacttaaatagattttataagtttgaaaatttattttcaaattctaaagtgtttatgcattgatcaatgtcttgcgcgacctatatgtggtacatggttaactataaaaaaatacttacgcatagtgtgatacatgctagacaagttagcacatagtaacatacaataatagagccacataactcaaaagcaaaaaagaaggaatacatatgtgacattcattgtgcacaacaaaggaaaaactatatcaaggcaacaacttctcatataaacacccacatatatacatacaagtcccaaacaagtgtgcaagaaactattgcaatatcccccacgatttcatcctgaggtaatacaccctcctctccaagacaatgaaagactcatccttacaatcaatcaatagttagtgcctaaacgctccctactctgaccctaaactaaaaaaaaaaatgagctcaaatgggggtcacagttgtagtttagtctcgaagggggatcacagctatagtttggtctcgaaggggggtcacaaatgtagtttggtctcgaagggagtcatggttgtattttggtctggaaggagggtcacgatcatattttagtctcgaagggggtcacggttgtagttttgtctcgaaggggtcaggattgtggtttgacctcgggggtgacatcccgacaaccacatggtggtctcgggtggggcacctacaaatcccaatctcagggtgtattaaaacaacaataacaacaacaaaggggtcaattcgaggtgaatctcgaccttccatctcgagataaagcaaaataccaatcccaacttattgtagctccatcttaggatagccaatcccgagcccctatggtgtcatcttagagggaacctcctagccttagggtacacaccccgaccctcgagtagatgtgtctcgagtgacaaaaataattgatccaactaagggtaactcaagattccgcaattttggagtataccttgaacctctaaatggtcgtgccaaaatgtccatggttccatgtgacaaagtggcccatatcaacaatgaaaattacacacttcaaaattttactaagtatttaaaggaaaaacagtacattaagtgtatatatgtaacaccccgagaagtagacaagacgccattgccaccaacccatgaagctgcattttggtcgtctctgggtactacacccttgacctccataagatggtctcgagtagtgcacctcgaactccacttggtgatctcgggggtggtacacccccacatccactaaaagaaaatggcaatctcggactaccccgagacaactccatctcagggtaagaaataggtcttggggtataggtctcagaaggggatcttttggaccacgggggcctatcttggggtaccataccctgacttccatgtggtagtctcgaagtggtacaccccgacccccacatggtggtctcggggttgtgtacacccattaccccaacctggctcaacattcaaaaaaaaacttaccccgagagaaccccatctcggggtgagatggcctatcttagggtatacccaaatgtttgaagtggtcaaggcggaccccccaaggaggtatctcagggtagcgaccctgaccccatgaagtggtgttgtggcttggaaaaaactaggtgactcaaagtcacaactacaacactctctaagcaatgatcgttcaacaattttttccaaggtacatactaccttcacaaacacatttttctcaattttatgagaatgtaaacaagaatagagggaaaactaaaattctccatgttcttgatgttcctccaaagctcaaggacacttgccaccaaaatttctaaaatcaatcattccttcacaccaaatttcatcaaatcaaaatcaaaaacacattacccatagcctatgctacaaaacccaaccatcaaacactcatattttgttaaaaactaaaaaaatccaatgattcaatgccatttttggtcatgataaaaactaccaagaagaagtgccaaaaactatatcaaatttcaaatatcaagcaaggaaattgcaagaggaaatacagagaacttacccgctatgaagatggaaaccttaaagcttccaaggattattataatgctataagtaatttatttattttgtctttgtaaatatttagattatttcttttgtaaataatttattttttcttgcaaagagaaaaattatcattgagatatgctgtaaaaatataaaaagtgagaattacgttttgggtttaaaatgtaattctagtataagcatgtcattctcagcaccgtaccacaaagtcatcaacaactaaattgaagcgcaggctacaccaaaaggtttctaccgtgtagtcatactgctaaaaacttgagcgcaaatatttatccaaatttcgacaataatgacatggcaaaaatgatgacacgtggtacgagaatactaagattaaattgatgaagaatgtgtaaagtcatgaccgttagtcatgatcgattgcatgactgttggaagagaagtttgacggtcatctttcccctagcttaggctaggtgactactccaaagggatggtagactagcaccctcgtaaacagaataaacaatcaccacacacttacgggagtcaaactagtgtagagggtatatactactacccctacctcaaatgtaatgatctataaggggttagtctaggggtacatcccttaccccctaaagggttagtctaggcatacaccccttaccccgaaaggggttagtcttgttggggaaaacgataaacttcaagcgcagcgaaataacaaagaaacaaagcaaagcaatttactcagtttggtaaaactaccaaacccataaagagagatacatttcacttattacttcaaaattacatatactctctatctcagtctctctacccaaatcccaatacaccctttgcttcttcctcactcccaccacataacaaactcatacacttctcttttcacaactcactatttttctctctccacacacacgcctctctctctctctcacacacaaaacacatatttatanagttacaaaacttgggcaccaagacaacttggaggccaagacattccaaagcttccttaagaaggcttttcaaaacttggccaccaagactttccttttctcataattaataattacccaaaaagaaattgcaactttataaatatagataaataaataaagaaagaaataatttgagtcaaactctaacaagtctgagggtacaccccttactatgcacatcatcaaaggttaagtggaaggggtctcgggggtgtcaccccgagatggcaactgacaccctcttcatgttaggtctcaggggtgtcacctttaaatattagcttctacccctagagggggttaacggtcataccacaccctagggtgaccctcattgtcaatggctagttcaaatatttaaatcttgcaagaaactcaaagacggttacaaacccgcaaaaatagtaggatattaccatgagaaccgaatttcaaccacctctaaaaaccaaggagacaattgagatagctctatattggtcgtgtctcctgaactgagaaacactgatattttcccctgtataaaaggtcagccatgacctaggaaacagatctaaaaatttgagtacttaaagaaaaagaaaaactctatcattgttatctttcgcattcaagagtctgttcttgactttgcaactctaattaataaaatacaagtggagtaggctattatcgacatctgaggttaaacttctttaaattctggtgtcgttatttacatttatgattcattttttagtttaaatctcatttattatgattctacgttagttggttaaaaattcagtcaacataatatgtaccacttgattttattttcttccttaaaaaatgttgttgtttgaaaaagaaataatgacttattatagtaaaaattaaacaaaagttgtcatattaaaggaaaatgattattctctagactatttattgaaacaaataccaactgataagataagggtccagagtccattaaattaaagtatattaaagaaaaattataatagctggccttaaattataggattatgttaataaatatatggctaattagtaattttccccctgaacttttttggccgt

SEQ ID NO: 25597 - DNA, 1717 bp, Cannabis sativa
ttgttttcaaaattcttattttttataactttgttttctgaaaactgttttcaaaaaacaaggccaaacaagttaaattgtttacaaagaataattttctgtaaaacaattttttagttatgatgtcaaacatgcacttagtaactttgcttgtaattattagtattatgtttcttatgagttctaatcgacattagtacttaaatttatagtattgcgatttttttttatataaagtcataatattgagattttaattcattgagtaatactcaattggtaacaatattgatatattgatacagattacataaatgatacaacttatagattagttaagcatatatagcttaaagctacacacaataatcttttttcgaggaaaagaactcttcatttcttctgtaactatattatggtgcaatttcaatatgataagtattttctggtattatgttagtaaatactacgcaacacaagccttgtttgtgcaaatattttctagtattaaaaatttgtacatatgatttatatctacaaaccaagatttaatcttaaaggttcataaaactcatgttgactaattcatattttttattaaagtaaaatttcaaattcaaaataaaactcacaattaatgactacaacacgaaatttaaaatctaaaataaaattttagctagatgatatgtatgtgtttgttgttatacactaaataaatattgacttatagattacatatttacatatatcatttataaaacaagtgtcaagtggtatcataaaatgtaccttaggtacatatattatatatatttattatgtacttgtttaataatattgatcaataatcaatattatattatgatcgatcaattagtttactaatttaaaaagtttgtatggcttggatcgatagtcattatctatggttaatttttttttttttatataactaagtacttcaataaatactaaatttgataaattaaaattagattatggagaatttacatatttatttgtgtttatatgattatatatataaactaaaatttaattattataatttatatttgaattggagatatgaagaaatattatccaatagttcaaaatttatcacatcaaactaaatcagaggttgatagaagttctaattcaataaatatggcaaatcttccaattgattctggatttcgagctttgaattctgattatactcccaatattcaagatgcaattcaaagacattatttacaacaagggccttgtcaaccaagaagtcacaattcgttggttcaacattgtttggtttgatcaatttcctacatggctagaatatagtatcagtaaaaattctgcgttttgtctatattaatatacttttaaaccaaacaatggaaaacaaggtggcagtcaaacatttgttagtaaagatttttcaaattagaaggacaaaaagaaatttattagtcatgtaggagatcacaatattgatcattatcaaagttataagaagtgtgaagatttgatgaatgaaaaacaacaaattcaacatatatttttgaagaagaataacaatgatcgaaatagctactatgttcaattaactgcatcagctgatagtattcaatttcttctacgacaaggtcttgcatttcgtggttgttgaccgaggttttcggcaactaattaaataatatgtataagaaag

SEQ ID NO: 25598 - DNA, 3360 bp, Cannabis sativa
tgtgatataattttcttctttaatattttaattagtgtctaattttagttgatatgcgtccaagcatggattttgtttagaataaataatatattttttttcttggtgtaaatacttaagattaatttcatgtacatataaattaagagtgtatgtcgaccagtttggtcgatttatgttacatatcattcaatctaatgtaaaaatcaagttacaaaaatagttagtaacctgtccaataaaattggtcggtttgatcgggttaatccacctaaaccgacaattaatgttctattttttttacattcaattattatattttaattaattgtgataataagaaaaatatatataaattgattttaaaatatgtatgtatgtaaatagtatgatatataactatatataataaaatatatatataaaatcctcgtaatcgggttggttaatttagttcggattaattgggctggttggtattattttcaaccgctcaaaattaaaaattgagcggattacatttttgtcgagttattcaatttgcattattcattggagttatctttatttagtttaagcgggttattaggttatattacttaagttatatttttggaacttcagtagatatttaacttttaagtgtcaagccagtgaccacatgacaatcaagtcattaaatttttattttttatttaaaaattcatttaaatataccaataaaaaaaataacaaggggatactaacttgacacttatttgtaattaggagttaaacttaagtatttacgccgcaaattactcatctgaaaatgcatatacatacttccttaatgttttaatgtctattgttaattgtaatatgtccaagcatggattttgtttacttcttgaatcacttttcaaatgtttaaaattgatatttaaagaaagaaaaatcattgttcttcttttcttttcaaagctgagtttctagtaatgattcttgttgcttgtaatgactatggtgcagagatttcagtaacaatcatattggagggattattccttctgctttgcctccaaccgtccgaaatttgtatgtgtcgaacttcacttcactccattcatgtgtaaacatactaaagaaaagtttttgttagtactttttatgttgttttgagaaactcttatactaatctctttcaattaatgtattctgaatcaaatttggtgctttttctttcctgtttttagttctctttcgggtaatcagtttacaggaagcatcccaattgccttctcaaccttaagtcagctgttgtacttgtaagtctcaaacgaaaccgaaagagcatgttgttaacaagctatatctgttaaagtacttaacactctattttttcataggttgattgataacaatcgtcttgttggacctataccagatgtatttcagcagcttactagcttagtgattctgtaagcattgtttaaattggttgtttcggtttcccctactacatttttctaaggttttgaatgggatgatatgcctatgtttcagggatttatcaactaacagcttagatgggcaattgcctccctcaatgggaaatatgttagcactttcaacactgtgagtttcgagttagacaacaacataacataatattttctacttgtaattgctatattctttgtttcaactcaatgtaattcatgaaattcaatgcaggcacttgcagaacaaccggcttggtggtactcttgatgtcttacaagatcttccccttcaagacttgtatagtgtttttcgttcttttgttaataaacccttttcggttaaggaacaagaattgttttgtgaatttggttaggcaactcatatgcatttattttaaacaggaacatagagaacaatctattctcagggccaattccccccaagttgttaacagttccaaatttcaggtaaaaccaacttccttctcatttgtgttttaaggagtgtaagtaacatggtctttcgttttttttgaaactgggatcctcgcctaaattgctatgtaagtactcaagagagaaaattgaaccttgaacaaaccacatgcctgaccatttgagctttagtgttgctcaaattgtgtattgtttggtatgactaaattctttatgttggcttgtttgttgcagaaaagaaggaaatccattcaatacaacaataattttatcgccgttggaagcacctactccatcaccatcagcacaatctccaacttcttctgaagaactaccttggaaacgtcccattggaccttcttctcccatcaaaacaatgcccggtcaatctaagaagttcttaactgcaaaggcgatcatttggattgcgattgcaggggtttcgatagttattgcattattactatgcattacattatcaagatgtgttaaagcaaaacgaagggataaaattgctaaagaacaatactttgattcctacaagagttcaagtgagaagcctaaacccgacgaatcttcaaatgagactcttgttcggccacaagaaagaacaagtttaccaccgaagctgcaacatcatgaccaacaacgcttcatgaattcgaaaagaagtgttcgaagttcaaaggatatgagggatagtgagattgacatgacagacacagaagatgatatttttctcccaccacctcctccaccgcctttttcagttgagaatagtggacaaatcccgggagtaccttcctcaatcgaacgtcctttgcattctcaacacttgaattcaatgagggtgttcaccattgcatcacttcagcagtatacaaatagtttctcccaggagaattttcttggaacgggaatacttggtagcgtctataaggccgagcttcctgatggaaaggtataatttcttccaatcattttagatatcagcttctgattcaaatgtctaatactctattttgttttcagcttctggcagtgaagaaattggattacaacaataatatagcgattaagcaacgaagtgatgaagaattcttcgaattggtgtcaaatatttccaaacttcaacatccaaacattgtggagctcgttggttactgcgctgagcacggtcagcagttgcttgtgtatgagtattgcttaaacgggactcttcatgatgcattgcagattcacaacgaaatccataaaaagctttcgtggaataggcgaattcagatagcacttggagctgcaaaagccttagagtaagttgagatagaatgttaccttgagaaattttagtattttgaaatgcattttttatgatttttttcggttttttatgtgaaggtatttgcatggagtttgccaa

SEQ ID NO: 25599 - DNA, 6902 bp, Cannabis sativa
aaagtaaacttatgtagcatacaatttagtaacttttgaatataaaataacaaatatttattttaataaccaatgaaattagttagtatattttatttttttaaaacttaaattttagttgttttttttttgtcaattaagctaaaaaaaactaaaatgttattcttaattttgattatcttttttaataccagtaacgaaacatatgttttcgacatattaaaatgattacattgaagagtaagtcataatagtataattcttgagaccaaacaattactagtgtcgttagaaaagattttttttaaaaaaaaaaagagagagagagagaatatttgataagtatcccatctttttttaaaaaaaatcaaattgttattattaaatggaaaaaaaattgtagcttgaaaatatatgagtatagaaaaagaatagagagtagataaatacatgttaaaaaaaaaccagcgtatatacaaaaagagagaaaaaaaaaatataaaaaaataaagtaataagcactacgtatatacctattcaaaaataattataaaactaagggtaaatttcacaattaaaaataagagtgttaattgtgatgtttttttcaaaatttcatttccaagggtaattttctctatattttttcaataataacaaattaattgtaaataaaatttctatataataataatttcacaggggatttggctccaatttttattccataaactctcctgcatgacattgtgtcattaaaagatgcaaaattttatgcaattaataacggttgaaaaccaacgctaaagttagtcagtttccacatatgttacaacctatcacaaaacatccaccaattctttctcaatatcattgatttttgataaccaattcttctttcaatcttaggaccaatgatggagaaaacaaagacaaagcatgcaaaaaaagataaccattcatacaaaaaatacaataaattaataaaagatcacaattttttctcctctctttctagcctggtttggtctcatgatccaggtaaggctctgtaaatgaaagcttgagttgctttcaatgacgaactatagaaatgaatttagttaccatcccccaaaataaggatcacataatatatagacaaaaaggccaaacatcaaattgatattgaggcgtacaggaaaactttctcaaagatatatctcaccttttatttatttctttataagacattttgttttcctgtacgccattttcatggtcaacgtctgtttatgtcttatttcattccattcagccatgaatatcaaaacccacaattcttttttccttgtttttctttttgttctcttcaactccttccatggctccatctctgacttggattcgttgatattgggatgtggtactgaaaatacagccaaagatgcagatgggaggaattgggagcctgatactaaatacatcaatgaagaaaactcagtttctgttagagcacaataccaagacccttctcttatatctgaaactccatacatgacagcaagaatcttcacctccaaggtaacatacaagttcccggtcaaacccaagaaaaggtattggcttagactccatttttacccctcagtttacggtagcaacaatgctgaggaatcttatttcaatgtcattgccaatgatttaactctactgaaaaatttcagcacgtctctcacttgtaagtctcttacacaagcttatgtcatgagagaatacaccttagctccttctgcctctaattctctaggtctcacctttgagccaactcttggttttgcttttgtcaatggtattgagttaattctggtacctgaactgtttgacacagtttcagttatgggattttcagaccaaaccttagatgccaagaccacaaatatgcagactatgtatagattaaatgttggtggtcagtatatttctccaaccaatgactcaggtttaaccaggacatggtatgatgattacccttatttgtatggagctcaatctggggtgtcgattgaggccagtccaaatgtaaatattgattataaaaaagtacctaccttcgcagccccaactgatgtttataggacagctagatcaatgggaggcacaaaagaaatgaacctgaattacaatctcacttgggttttccagcaaattgatccaaactatatgtaccttgtgagattacacttctgtgattttaaatacgctaaacccaatgagattgttttcaatatctttctcaacaaccaaacagctcaatcgggagctgatgtcgttggttggtctggaggaaaggctgtgcctacttataaagattatgttgtgtatgttactgatgggaagggagatgaagagctttgggtagctgtgaaccctgccactgaaacaaagccagaatactatgatgcaatagttaatggcattgagatattcaagatggaggctaagaaaaacttggcgggtccaaacccaaagccttctgagatgttggccaagaatgagcaacaacagaagacctttcaaagcaagaaaaatcatgcccaagtcatcggtggagctattggaggagttgtatccattggcatagtggctgcattatgcattgcaatctaccaaaggaagaagaggtatactagtatagattcgcacacttcaagttggcttcctatatatggaaactctcataccactgccagcaaatcagcaatctctggcaagagcaccgctagtagccacctctcagcaactgctcaaggtcgttgtaggcgtttctcttttatggaaatgaaaaaggccaccaagagttttgatgaggctaatgtcattggtgttggagggtttggaaaagtctacaaaggaattatagatgtagggaccaaagtggccattaagagatcaaacccatcatcagagcaaggagttcatgaattccagacagaaattgagatgctttcggagttgagacacaagcatttggtctctctaattggtttttgtgaggaagataatgaaatgtgcttagtttatgactatatggctcttggtacactcagggaacatctttataaaggtaacaaacctcacctttcatggaagcgtaggcttgaactttgtattggagcagcaaaaggtcttcactatcttcacacaggagccaaatggaccatcattcatagggatgtcaaaacaacaaacattcttttggacgagcattgggttgctaaggtttctgattttgggctctccaaaacaggaccagatatgagcactggccatgttagcacagtggttaagggaagctttggatacttggatcctgaatattttcaaagacaacaattgactgaaaagtcagatgtttactcatttggggttgttctatttgaggtgttatgtgcaagaccagctttgaatccaagcttaccaaaggaacaagtcagtcttgctgattgggctctacactgccaaaagaaagggacattggaagacattattgatcctacgttgaaggggaaaatccaccctgaaagtatgaagaaatttgcagatacagctgagaagtgcttgtctgaccatggaatggaccgtcccactttaaatgacatattgtggaaccttgagttttcccttcaattacaggaaaacatggacggttcaagccattcttctaagcggggcggcgagaccagctctgaggatggtagtgtaagacaccagaacatggcaaagcattacaacaacctgagccttggaagtgatagtgagctgggaagcgatgacacttctggacagaattcaactgcaatcttctctcaaattgttaatccgagaggacgatagagtatgttgttgatggtgatcgctatgctacctgagaaagatttaatcaaagaaaataataatataataataatgaaaaaacctaaatgaatagattactttatatttgttcattgtatacaatatttcttttgttttttttctttcttagtacttcttttttggtattcagcttcatgttctatttggtgtttctaaatgatcaaactaatatttatataaacatgtatgtcaaccttacaatgtagttttttgacattacattaggttattgtagagattttaattttacaattaaaaatagtgtaatctcttcttgatgaattgtaatagtagtgaaggggcaagagttcatgttatacacgagccattgttattaatgtccttgaagtactgtgaacatatgtgatttcaagtgaatataggaatttttttattagtgtaaaacaaagactattatattacaaataatgtaccaaaaacataatattccaaaaacataatattcatatcattaaattattgaatgtaatttacttaaaaatatataaaaatatattatatcatataatgtattaaaagaggtcactaagtcattaataatatttataatgtgtaaaatagatatgatactgaaaaaagatagagttgttcatcaaactgctcacactacggtactacaacgtctaaaaaatgcaatttgaaatctttttgcattgcgcttacagtttatgtttttgtcataccacgcggtgtatagcggtttgcaattttaaatttaataattgtggttcaaatcgcaccacattacatattacaaaaatactaatttttatattttaatttttctttttatatatgagtaactcatatgccaagccatacaattaaatttaaggaacatctatataagttattctcattttttttttatttttttaacttcttattgttcaaatattattattattaatatgtataatatataatatatatatacatattatataattttttagagacaattcaatacaataatttgattagcatatgtattatgacattaaaagtttgattagataattttttttttgtttaatggttgaaactttattagactatttttttttttggtgcaatgcagattttgtggatttaaggtcttgcagtgcagttgcaatttgagaaattacaaaaaccgcatatgcggatcggtttgaaaaatagtctaaatctgcactacccgcactgcgaactctcctaaaaaagattatagcatttaaagatgctttcaaaaaaaaattatcactaaacaaagattcatggaagaggattatagaatcaagcaaggctatcaacttctacgtttagagtaggggaagagtgtgttggagtaaagaggtatagggaagatttaatattccacaacatagttttatactttggttggttgttgagaattggatgaaaacaaagatagattgcgtaattataatattatccttgattctgcttgtttcaagtgtggagagcttgtagaaatagtacaccatctgtttcttgaatgtgttatcagcatgaggtgtcttcaactcgtaaaatttggttgggttggcatgcggaagtcattacacttcaccagctgatcaggtagatttcttgagcaaaaaatgagtaaagtccgaagagtgactcacacgcaatcttccttccgaaaggtatctaacttataattttcctcccgaagagtgactcacttgcaatcttcctcttgaagagtggctaacttgcacttttcctcccgtaaagtgattcacgaagaagacttctctcgaagcttgatgaacaatatccaagatgttcaacctacacaatttcaacaagaaacaatacaaaataacacaataataaaatactaagaacttgttggactcaagttcttcacacaacaaagaaaatactctctaactttgaaagtaatttaggaaatgatacatcaagagagctaacccataccagcgacctaagagtgtatttatacactagaaatcctctatgtcgtggtcaaacaactaagaaacaattaggtcaataaatgaaaaatcttcccaaacaggaaagttaaaatttgtttaaatagacactcagttcgttcaaacaattaaattgaacctagacagtttttcagcaaagtttccataaacaaataaggcaactttaacaacctttacacacacagttgtacactgtttcttgataaagaaatcagataaaaaaagagataaatatgaatttaagaatttctttaaaaatacaaagataaaatcaaatattctaaataacaaaaactcatatttaattcacaaaaagtcaaaagagaacagaatctgattttgaaagccttttcacactagaaaagaaaactatatttttgaaaataataaataaatcattaaaatcaatttcaaaaataccacaaatattatttttatcaattttatcaaatatgtcaataaaggattttacaatcatctctccctttgataattttataatagacaaaaataaaataaaaacctacaacacacatgttaaaaataaataaagagaagaattccccctggaagcttgcataactcatatcaaacatgaaaaagaaactaaaacttaactccccctcaaaatatgaaggtccagagttacacacaacaaaataaaataggcttttgagtatctactctcctcctttgtgttgttcaaataaaaaaaaaagtaccaaaagcataaaagaaacaaatataccaaatctaagactaaagaaattatcaatgtgcttaggaatggagacaaaaaataaaagataagaaaaactaaggttttggggccttagacaaggctttgatagcatcaagaactgagcattgtagcccttcaagagtcatcactcgagcagtcatggaatcaagtgaagctcgaacaccagagagttctgcagagacaggtgctaaagcagttggaacaggagc

SEQ ID NO: 25600 - DNA, 6181 bp, Cannabis sativa
  modified_base (3880)..(3880): a, c, t, g, unknown or other
  modified_base (4433)..(4433): a, c, t, g, unknown or other
cttcaagtattatagttaaggggataaaaaagaattttgtccttaaatatattatctggaaaggactaaaaaattagaggaaaagaaacgggaacaaattcgaaaggtcaactatatggagcttcataaaagaagtagttggcacttagcacaagaaatcagcataatgaaagtcaactatttcctagatggcaaaataaaaagcctttctccactagaaagtcccaatgagaaaaggctttttataacacctgggaccatcgataagaattgatttctatccttttagggtaccaaccgaccccttttatatttctatcttttaacatataggtcataatcatgcatatatgttacatttttattttatttgatcatttttttaaacacattttatttaataatttaagtgtactgtatttataattttcacagcagttgctagttagtgaatattgttaatactatacaccagaggaggagaaataaaatatattgatataaattaaagtatatagaaccccttataatttaaaatatcattttataatttggtccatatagctaggcaagggttattattattacagcttctttttattcccaccaaaaatattattccaagaatatatataatatacatggacgcctttttttttattagaaaagtaagtaattaagaaaaaaacaatgttctataatttgtatttgtatttaatatttataaaaatttgaaagtttagaccttggaaatggtggagcatatatctctcctatagagaccagtacttttttgtgtgaagggatgtcgagtgtttgaggattggttgaaatagaaagtttgtctagtaagagagctttttattttattctattttaatatttttcacattatacctacgtgtagtaattataactttccatgcactagtgccccttaatagtaatactagtacccaatgcgacaaaaaatagttggccagacacgtgaaaatgtttttcattcttcaatttccaagtttcttaataattatatataactatatatgcctacaaatttaattttttatatagatatgtgtgtgttgatttttcttttctgctttatattgttgtagccaacaaatgatggagaatgaagaaaaaatgaataagagtatttatatatatatatctatatatatatttatcatttgaagagtaactgggagagaaagaaaaataatgttgttaaatgattaattataggatatgggcggtgtgtgataattgattacattacatctttctcatttgattagtgcagaaaagtagtgaagattcttgaatattattaattatagtaaagatcatattaggaaaaactaaacaataatagaaaaaataaataaataattccggctgtcaaatcgtggtattcaatattattgtgtgcggtttatttggtttaaagacaaaaacttaagaatatatgatgatgatgatgatgatgaggagacataatacatgatcaaaggttgggatcatgtatagggatttagtatataagtgcctcaccgaaagttttggctctctcctacagtccaatcaaaccctactcattgccttcatgtattttcatatctgaaatttaataaatattttctctagttgttatttctatcatttttctttttggaaaatgataattattttcatgatccactataacctttcgagttggttaaagtatataacactttgggtagcaatcgtttctctttggtttctcactttaggagcttataatgacattttcctttttcttctacctttaatttaaatagagatttggttaaaagagatggtatatgatatattttcaaatttaggattaaacttgagattgatagttaaaaaataaatggaatatgttttgtcaaaatgagttcaatgaattattcacatttcatttagccacttggacaacatttaggtgcattctaaaacaaaatgagacctcaccaaaaatgtaaaaatacactggaaacaagagaatatacctaacacaaataatagaaaggagagagaaagatagactatcgtgcctcacttaattacgattctataactaggtcaagaacattctcgataaaagtatgactaatcacaaatctaacctatactcagtactttaatcgtattgatgaagtagcagttaattcatactttttgaaagcctagcatatatctgttaatatctcagtgcaactctatgtagacttcactaatattctaatatgctaagctgatgatggctactgatttggctaacatatatttgttgacatgtcggtgcaactctatatacacatcactgacaccctgatatgttattctgacataaaataaaatacacactaaacatgtatacatatatgttgttgttattctaatcttatattgattccgaatgcgagtatgtcggtagccatgagtgttaactgcagctcgacgatttaaggccttaagtcacaatttacgtaaaattggtaagtgatttgctaactcactttcgggaacttaaactcaaaattaaaagttttcatatcgatagctagcatggaaaaatcttaaatatcgagaaaatatcaaaaatgagatttcatgtaaaattcttaaaaaacggcagatcgtttttcttgattttctgcctagaaaaacagtagaccatttttccataaatggtatgccgtttttacagcaaaataggcccaaaacctcataactcctccaaagcgaaagcaaaccatcctaaactatcaagaacttctattttgggtccaataaatacaaatcaacaacaaaaaaactcaacaagcctctggattgagtttttctattaataagctaagtttgagctcttaaactcaaacttagctaaccaacctcaaactcacactaaaattagctaaattaactccaaacaactcaaaataataataaaattcaaaactatacactactacaaaacaagcttttagaggcggtttttttttttcagcaaattaataaagttttaataaaaacacctacggagtcggttattttgtaataactgactctgtaggtgataatttttttaattttaatggaaaaaccctacggagtcggttattttgtaataaccaactttgtaggtgattttttaatttttattaaaaaaaccctacggagtcagttattttgtaataaccgactccgtaagtaattttttaattttaataaaaaaaaaacacctatggggtcgattattttataataaccgacgccatatgtctttatataaccctctccagctaccatcttcctcaaaccctaaaataaccagcaaccccccttcttcctctaaaaccaacgaaaccctcgcccaaccacccctttcttccccccatttcttcatttttcatctgtttttaccaattttttttttttttaaatcttgcatttttcatacccaaaaatatatccccggagtttgatcattttttatttggttttttagggtaaatcgagcttagaggtggtggttgtagctccggtcgccgcttttaatggagaaattattgaatctcaatgtccattaaggtataaatctactctctaataattttattaatataaattgctttattttttattttgtaattttttgagggtttttccatattgttaagattatgttcttgtggttgggcatggtggctggattttggttggcattggtggccgaatttcgataatagggtaaaaatctaaactttaatatcatatatttacgtatttcatattttattgaatatgtattgtatgtatacatattttgtaattgtatatatantgtatgtatatgtattgtattgtatatgtatgtatgtatacaaatattgtaattatattgtatcttttttatgtatttaagtgtatatattgaatattttaaacaaatagttttgttaaatattgtgaatgggattatgagaatgagataggagagtattaaaataaaaattttaaaaattaatttctaaaaattagtttagaaattaattctatttttatcattttttttttgtacattcaattttttcatgtgtttttattttttttagttgctaataaatagttagttacaactacttaacaagttactaatttttattcctattaatgtattcttattactaactagttactcattagtaactagttagtaactagttactcatgaattatgtaactaataagtagttaaataaagaattctttaattttgtagtattttttacattgtaggttgtgaggtcaatttataaggatccgacttatttggtgttgatctgtttctagctagctcgaggtgcacatttattaacttttattattaattaatnaagaatgcttagtagagtttgaatatcttaagtatttatccgtagggaagtaggttctgcgatatattgtattgcggtcaaacgggtgagataatatgcatgttagatgagtttgaatatcttgcatattcatccgtagtgaagtagcaactacggatacatatactgtggtcggatgggtggtaaatttttgtattgctaaatgttttgtgattgttgtatgttattttaaattgtgctttgttgttattaatagctttaaatttttagaaaacgttcaattatagtcgttatgctactgaaatttcggtagaattaggactagttactagttactaatttagtataatatacttagttactagttattaatttcgtaagtcttcaggcgtttgacgcgtaagtctcacaaattatattgaataatattttagaatacctaaggatgaataaaatgtcacacaaaatttacacataccaatgatgtatcataaaacttaaactaaagtaaagatcattatccttctagaactagaaccctaaattccattatcatagaaaatacttgactcataaaacttgaattaaaatattaatggaaaatgcaatgataattagaaattatctaagtcatcatcacttgttttatcttattttagattattttttgttgttattaataactttaaattttttgggaatgttcaattagaactcttatgttgtcgaaatttcagtagttataggataaaattatttgatagaagtttctcttaaacttggttgttaggattttttgttaattttcattatggataaattatgaatgcgtgaggagcaccggttattacatagttagtaatttagagtaaaattagttactggttagttacaaattatatttagtatactatagttagttactaactagtaattcaataggttctgcgatatattatactatggtcggatcgatgggtggaataatatgcatgttagatgagttccgtagtaaagaaggttctacgaatacatgtactgcggtcgaatggatggtaaatttttgtattgttaaatgttgttgtgattgttttatattgttttgaattatgttttgttgttattaatagctttaaattttttgaaaacgttcaattatagccgttatgctgttgaaaaatttcggtagaattaggtatacattctttaacctacttttataagaattaacaaatacatcctaaatgttgattctaatacttaacaaaagaattctattaatttattttaagtaaaacaacaaattaaaaatattacacattatttattattcaaaatactaattattttacaaaatataacttaaagaattataaaaatgatactaatatactagaaaaaaatacaaactcatattataaaatttatatgtataaaaatattaaattacataaaaattaaaatattacataatatttattattcaatatactaattattatacaaaatataacttttaaaaattataaaaatgatactaaaaaaatacaaacacatattataaaataaaaaattttaacaaaaaaaaaagccttataaacaaacgcttaaaatatgtaaatgtatatgtatttaacttttcactttaattttatttatacttattatatataatttatacttaatttaattatattaataataaaataatatatatatatatgaaaaaaaaaattagatttttaata

SEQ ID NO: 25601 - DNA, 3357 bp, Cannabis sativa
aaaaagaaaattccaattttcaaatctctagcactataaaatgcattaaacggagatacggttaagtgttacttaggaacaaacaaatggagagctcatgaagaatacaatagcaaatgtttcagtctaatcctcaatacttgaatcaatcaatcatatacctgctcgtcaagctcaactgatgaattctctacttgaattgacacatgatcagttactacttcagtattagttccctgtatttcgtgcatatcttgcaggtcctgcaaatcctgcatttcctgcacattatggtattattaaatgtgataacgagccacaaaaaacacaaacaaaattaagtcatagatctatacaagcattttagaaaaggaaacttttggccttttctgtagtttgttcagtagacggaaattcagaatttgataacaacatgaaatcatcagaacattatgacgcaattttgaatacctgatcactcagcctcaaggaaggattttcagaatccaatgagacaggcttaatctcatccgggcttccctgaagagagaaaatgattgagtcaaaacagaagccacaccataaatgtgcattttgaatacgcacaaacaatccaatgaatcacacctgaccatcctgctcatgataggagttttccgcctccacagccaaaggcttaacatcacctgtagtttcctaaagaccacatgagcaccatcaaccataaccttctgggctagatttcttattacagactacagagtattgaaatatagtggcaacataaaaagcatgaatggcaatagatcaaaagcacttaagtgaaagataattaaggttggcaattgctaagtggcacaagatttgaaatggaaaaatatctcacaaaagttaggttgcaactgaattgaacatgaatctgatgtgccagatgcactttcccaacatggtacaataagacaggaaaaatttccagtatggctcaaaatacataccatttcattttgatcaaaagtaatagcccttcctgctcctgatttggaaagatctctcagagttcccttcaagtacagaattatcacgacaaaaaaaataagtaaataaaagcagaacataaataaggtataaactataaagaagacctataattccctgagtaggcatagaaacgtaatatgacaaaagtttactgatactagtcattatagtttgaaaaacttggagcagctttaatgcattgtgattcgagatagcacagatcattttactttcctttctttcctttttctcaatgaaaaaaaaatctcctgtaacatttattatctctaaatttgattgattaagagttaggcctaccttgtttgcccacatgagcccacaagcattgcaaagtgatctaggaccaccagggccccggcgcattgcaggagtacacttttcattgatcccacaatgttggcatttacgtaatcttataatagcaacataaaaataacatggaacacgtcagcatcaccaagtaacagcagcagaatgattccctaaaaataaaatattgcatagctatgaatttaaccaataaaagctcagactaactcactcagattctgcacaaggagtgccatcacttgaatcccagtttcctacatccgttttacaagactcttttgatgatgcaaactgtccattcttgcgatgcatcctagaagaccaacaatatcatgagtaaaattgaaccaaaccaacctaaagtaaatttattcaaaacatcaacaaatcaatgtagtaaaacacacaaccatgaaaataatgacaaaggccattccatcctaacgaaaataagtttttgaagctccattgtctatactactataaaccatcagagcttactttcagtaagaataaataaaaaaaatcatcttatttggcaaatcccagaaatcttgcacattacctctgggcaacctctttccgacaagtgtatcgaattttcttttcaaaacatctttcctttctcttttcccggaacctcatgagggatgcaattcttcgtgaaacttttgaacttcgagtcaagtcactcacaccctaatgtaattttaaagaaaagtctagagttaacaaaaacattaagcttgcaagaggaaagaaagtgtgtacaagaataccctgctattctgctctactataaattcagagctaggagcgcagctgggtacatcacaccctcccaatagtaacaacactgcttgcacctgcaacattccatcttcactcattacacaaactaagataagttccgtgtttaccaccaaaatctacattttgtaaaagtaatccaaccgagtaactttccaatttggtggcagcagaatcaacttcatgtgtaaagttttctcaaataccctgatctcttttctttttttgataaggtggtaagaacttaacacaaacaaccagaagaactataaataaagggtttttggttaaatttctcattgttcaacactatacaaacaaaatcaataaaaacaaacagttcgtaacagctcactatcatttcttagcatctaacacaattatacaacccattttattacactatctttacccacaaatgttaattattgcatcaaaaatcaaattactatagcaaagcaaagccgaaccttctctggcgttaccgccgggaaaacgtagacctcgccttcgaacgcaatggtgagctcactagtccgagaaggcacaccggaatttccacaggcaaccattgcgaaatccctcggagaatctccaactcctccattcatagaatcgcttcgacctccacctccacctccaacaacatcaacatcaaaacaaactccactgctttctcccagtactgcaaactgcacgatatgacctcctccttctgctacatacggtctcacttgcagtggctgtggattgactgtgtccatttctccagcatcagctcactttctcacttcccaaacacaaaaattacaaatacatatacaaattccaattccttctcttaccaaaatcctctaaactttaactaatccccttaaaatttgactcaaattttcaaacactaaaccctaactttctatatgtttacatacataatatatacataaaattgtatccacaggtcagtatattataaggccagaaatcgaaattatataaaagagttgccttattttccatccagtttccgagaaaataactccgttgagctttacaatgaagaaactaagaacacatatatatatatatatacagtatatactatacatgtatatatatacagaagtatttaatatttatttttaatttatatgtgtg

SEQ ID NO: 25602 - DNA, 3658 bp, Cannabis sativa
gtctggttccatgtttgggtctgagtttgagtctaggttcaggtcccgagttcaggtctaggtcacgatctaggtctggtcccggttcgggtctaggtcagggttggagtacgggtcctggtccgattgcggttcggggtctaggtccaggtctggttacggtttgaggtccaggtctaagtctttcttccggtcccattcagggtcccggtctacttccggttttagttccaatttaaggtcacagggtacgggttcaggtttaagtttgggtgtgggactgggtttaggtctcggtctgcgttcggctctttgtttgggttcgggctggtgctggttcccagatccagacaccgactacgggttcggttctggttcaattttgggtgttaggttacgacctttgtcataggttcaagtccgagtctagggtcgggtcttgggtctcggtcctagtttcgttgcccaagtcctttttcgtgattctaggttcaactctcagttctggtcttggtttggatctcgatctaggttcgggtttggatcctagtcatggttcgggtttgggtctcagtctgggtttttatttgggtttgggtttgggtttgcgtccctgtcctcatccttgtcctagtcctagtctggttccaattctagttgcgatttcaagtttgagtttgggttcgaggtggggtcggggtttaagtttgggtcggggttctaatcctggtcagagtttaggttcgggtccaaatcttgatctaggtctggatcgggctccgtgtgtaggttatgatcctaggtttgggtccagattcaggttcgggtctgagtcccaggtttcgatctcgatgtgagtccgggtatagtttcgggtctaagtcttaggttttgatcccggtttgggttcgagttcgagtccacgtcgaggactaattttgggtctgggtctgagttcgggtctcaggttcgagtctaattttaggttagggtctgggttcgggtttggtcctagtaagggttcatgtctacattcctttcctagtttgggtctgggtcaagttttgggtctaggtgtgggttcgacttcgggttcctgggtccaggtcaggtcctggtttgggtttgagtcccggatttaaatctgggtctgggttctggggcctaggtcccttgtctaggtcccccatccaagttcggttcctaggtcattgtctgggtctaggttcgggttcgggtcccgagtctgggttagagtccaggtcctagtctttgttgaggtccaggtttcggtcccagtcttgatctgggttcaggtttgggtccttgtcaaggtcaagatcctggtctggatcacaggtctcacgtctcggtgagggtttaggaccaggtcaagtccatgtcccggtctggatcccggtccaggttcgggtaccaggtttcaggtcccagtcctagtcaaagtttcggtccaggttctggtctaagtttgggttatgttttgggttcgattctggtctcaggtttgggtcctagtcacagttccagttctgattccgagtccaagttgggttttgggtctgggtctgggtccttgtccaggttggggttggtgtctaagtcttagtctgagtctgggtacgggttgttcttatcctggtctgggtccacgtcagagtctggatcctgggtctgggtccaaggttcgggtctgggtctgcatctgggactaggtctatgtccgtgttttgatcccggtctaggttcgtgtccatgtcaaggtcaaaaccccattttaggtcaggggcttggtctaggtctgggatggagtcgcgagttcgagttcaggttcaggtttgagtctcagtcctagtctgggtccaggactgggtccgagcccgagttctggacctgggttcttgtctagttccaggtctcactacaggtccaagtctttgtcacggtcctggtcctgttccaaggtcttggtcacgttctagttcaagtttcggttttgggtcccaggtctaggtttgggtccaagtccaggtctagctttgggtgcttctccgagtctaaaattaagacaccgagtatgggtgttgtcccaggcctagttcctgaatcctggaacaagatctggatcctaatcacgggtcccagtctggtttcggttcatgtccgagaccgagacttgtgtgcagttttgggtctcgatcccaatttcgggtcccgagtcctgttccatgttcgtgtctgagttaaggtttgggttctggtcctgagttctgattcgggtttggatttaggtttgggactgaatcccaaggtgggtccatgtccgagtccatgtcttggtccaattacagctttcggtctagttctaggtcctggtccctgtcctgttcctgggtctcgatccacttctagttttggttcaagtttcaagtcatggggtacgggttcgggtcgagtttgggtccaagtttgggtttgggtcctcatttgggtccggggcaaggttcaggtctgggtttcagtctcggttagggttttagtttgggtccggttctgagtttgggttcgagtccaggtattgatcccggtccggttccagttcaagtttcggtttttttcccgagtgtgggttttggtctgggtctgtgtctgggtcctggtttgagttcgagtttgggttcgggttcgggttctggtctaagtcccaaatccagaaaacaactacgggtttggtccaagccctgggcctagatctggatcccaatctcgggtcctggtttgattgcattttgggtgttaggtgacgagcttggtcctaggttcaagccaagtctggggccagttactaggtcccagtcctagttctgttgcttaggtgcctatcgcgattttgggtctaggtcccagttcttttccgggtttgggtcctagtctagattcaggtttgagacctaatcttggttcgggtttgggtcccagtctgggtttttatctgggttcgggttcgggattaggtccgtgtccttatccttatcctagttctattccaattcatgttgtgattccaagtttgagtttgggttcgagttcaggccagggttcgagtccttgtccgaattctggtttgggtttgggtcctagtctaggttcaggtttcagtcctagtcttggttagggtttgggtccagtctgggtttttatcttggttcgggttcgagattaggtcctggtccttgtccttgtcctagttttattccagttctagttgtgatttcgagttcgagtttgggttcgagtttgtgtctaggtcctagtttgattccattttgggtgtcgggtgacgagctaggtccaaggttcaagctgagtttggggccggttactaggtcccagtcctagttctgttgcttacgtcgatatcgcgattctgggtccaggtgccagttctggtctgggtttgggtcctagtctaggttcaggtttgagtcctagtcttggttcaggtttgggtctcaactgggtttttatctgggtttaggttcgagattaggtcctggtccttgtccttgtcctacttctattccagttctagttgtgattctgagttcgagtttgggttcgagttcgggtcagagttcga

SEQ ID NO: 25603 - DNA, 1904 bp, Cannabis sativa
aaaaaaaaataattcaacttgtaacataaaaattaattaaaaagttataataaaaaattgttattagtattactcttgttttaaatatattgattattttttttatatataaatgtaatcaatcgaagttaaatttaatgtactttttttaggaaaaaaaaaagcggtttcaaatatcttatggcctaataagtctacaataataatatagtgccactaaatcttctccaaataactttcccgtgaatggagattaattatgtatttaattatatttatgcactattaaatattaatcctacttttatgaaagtcctaataattgatagtaaacctaaccttgttcctttttaagggctttttcaattaatcccatcccatcacattatttgtccgtaatgatttgtccacatatatatatttttcgtttattaattaatagtagttaattaaaaagaaatattgggccattagctaaatagtttattaatgtcaataattaagagtgtatatttacttacttattccatatgcaacttgcggaaagttagcaattttaaagtaatgttatatacacacaaacttaaattgtaaatacttataaatattaatcaataatatcattatgtaaagattcacattatttttaattgtgtagttgaaattaattacacattatggcgtataacaattacatgtaatttgagagtgtctcaatcattattattaaaacttgtagtcactagacttaatcagattattatcacttttaacttttaattgatggataatacaaaaattgttaaatgggtaaatattattttaaattgtgtgttttataaatgttaatgattgaactccatatcttattaaatgacaatttaaatgtattttttttttttttaaatagtacaaaatagactttgaactcaatttatatcaatttattttttaatataactaactttaaactagtttttagcactaattaacaaatacaaaaaatgtagacaattttgtcataatacctctagctatgtcaagttattattaaattttaatttaatgaaaattaagcccaaagtccattttgtactattttgaaaaatgaatagtcttaattatcatttaataaagcagatggtctaatagataacttttacaagtcactaagtccaaaattgtatttaatattgttaaattttatcttggatcttcacagtttaaataaaaaaatatgataaaacagattttattaaaatagcaaaaatagtccctaaacatgatggtattttttatttttatttcaaaaaacttacagtgtcgtctatttttaacaattaaatttttaaatcacctaaaatttaatttaacgttaattattttaattaatgttactatatatatcctcatcagataaaaagattaattgtttggcaggcaatatgaacattatatggaggagtacttctgttaattttgtatgtattacaatttcttagttaattaatttttttgcttgaaatacatgcccaaataatttttttttaattttttttaaagtagcgttcgttatagttacaatatcatctctgtaaatttttaaaaaaattctaatagtttacagtgctgaaaatatatttgagattttttaaacatgcgcggtagattagaatatcaggaactttattttatatattgtaaacaatttaggattttttaaaaaaatttaagggaataatactgtagctataaaaatatcgctatgacaaaaatatttaaaaaaaaaataacatttctaacatatgtgatttcaagagtagagataattaaaaaataaatgaagattgttatatattatatatattatttgatttataaagtataagtactacatatatata

SEQ ID NO: 25604 - DNA, 5915 bp, Cannabis sativa
taaatagaaacagaataatagattcggacttttcttacatacagtcaaaaccaaaaactaaagaatatggagcataataatgaataaatatatacctacaaaagcgatcctctctctacctaaaaatattatataaatatatatatgtatatatacatatatatattccacacttaacaaattttgtcactaacacaagaataaatccaattaatgtattaaacttacattaataaactgacctcaccaaacctaaattcaataaccaagtatatgaatatatatgtatattcagtttttgcttcgtttttttgccccttccaattttcttctgtctactgttcataaggtaagaaagaccataaaagaaaacacaccatgcatagagctcaccaacaaacactgttagcctgataatctctttaagctgtgataaattttgatgtaaaggagggctttctcagccataaatttctggagcagagatgaaccaagaacaataataattttgagctcttatcgacctgtttttgcacgcttcattccacttgtgttgaagggagagacactaccactaggcccaggactctcttctctgaaattggaattcagcatagcgagttcacgcaactgctgcctcttaatataatcttgtgactcgtcctgcgtgggaaaggattttgttccaaaaggaagagcaaaggtcaaaactatgacaatgaggccaacttagtcaatataagtttgaagactgtacataacatccattatcaagtggttctggcaggaaagtgttggatcatgagatcaaaagatatgtgaaaatgtaacacaaacaaaattatccaggttagcttttcgttagtctctccaaatgcacctaagactaaaaattatcagacagcattaaacactcaatttagcttaaccaaccaaattaacaatgttctattacaaatatctctaaactaaacatgtaatatgtgaagaagataatgtttcaagaacaaaaagtcagcaagagccatgaccaatattcaacacaaaaaattaataaggaacaggacaaataaggttgcagaaattaccacaggtttgagcaattcttcgataatttcctgtgcctgtctgagcctcatatcaactacgttggcaggtaaatcagcttcaattaaaatgtgaaggggttcattcaggtgctcatagcctggtcttccccttagcttctcctcctacataggaaataattaagaaataaatgtgtcaaacaaatctagaacaaaaatcatgatctatcacagtttacagacagcttgaagaacagtaaatccaatattaaaccaagaaagaataagaaaaaagttcaggtagatttttaccttgtctggatcctttatagaccccttccctctaatgtaaacacggcagccagtagtagcctcaacccttttcagagaattgcctctaggtcccagaagtcggcctacaaaattgaactacatagtttcattgttcaattagttataacatttgataactcaatcccatccaatcagacagctctttatacactagcatttttgtgcaaagcttacattggggtaggtatctaccggaatttccaaacgtaaaatcctcttcacagtgtaagaactagggctagcgggtgcaccttgccaatccattgtcattccaggtggtccacttaatctctgaaggaattgagcataactctctttaaaacatttcgtaatttgatagaaatcataagaaataaaatgaacaggaaaataaaacataagaacttataatataatgcataattaagtaaataatatggtcagaaaattatagagagaagcctttaatttcacatccatgtaatcaaccagaatgaaacttgataaacatacaatgtcgcgtaaatatgcagactactgacgagtaacgaaggcagtggtatgcccctattgagctcacaaagtgaactctacttaaaatgctgatgagaatgtacacaacctatacaatgtatctgcaataaagtccctctgtaagtgttgagatataactcataatttgagaaacagacaccttataatctgattctttacaaaatttacctatggaattgaaaactaattatcaagtatgatgtatccatttttttccccttataaaccatacattattaaatatgcttaaataaattactgtcataagtgtagcaatttttcttcaagatcaacccataaaacttcccatttttataactttatttataatcctaacccaaatgctcaaagaatcaccttttaaaatatttatgcataatgttagcccaaaggttagagtatgtcataaacactcattttcatactacaggaagtggagaaatttatgtaatgaattaatggctgagacatttaaattcacaaaacagaaaaccaggttatgaaggagaagaataaaaggaagaagcagatgaggtggaaagattctatgcaatgatcagaaaatttaaattgcattgtaggaaaaattaattaagaagcgaagttggagagatttcatgtaatgcttgaaacacttaaagtcacaaaagaattaagttaattcatgaacacacaagttaatgagaacatttgaatcctagtaggccctttttgttacgtatctactttgctgcagtttaaacctattcaaaagggaggacagatataatgaatactgaatacaacatagtagattactgaaaacacagattagataagacaacacaaatattaatgttccatattaagatttaagacttcagatatacaaatcaatgcatttaggccatgtttataaaaatagaattgattggattacaatgtgtcacttgtgaaattgatccacttaaaatggaataattcaacaactaaattaatccacctaaaatggataaaaaaaaaaaatcattttctctcattgagaaacataagacaatttaatcctacacaatctcccgctacattcaatggcaacacaaaaacctacattttgtatccatttattcataaaaatttattatttgcaagtgatatgctcactcattctttcttatttgtttttcttatctaatctttttcttttttatttttctctttttgttattctaatacaatactatcctgtcctaccccggctaaaagaggccatagatcattaatttaacactgatcagataaagaaggtaaccattaattttttttttattattttggtaattagacatacagggaataggaaacaggacaactgttgacgcttgttatataatgacatagaaacttaaaaccagaagctgattctaaacaaatacttgcaaaataagtcgacagtagccgtcatttaaagtgcatgatcatgtcaaacatcataactagaagagatcaaattaaaataactaagacatctttaagtcatattttcaattgcagaaagactgacaacaccatttcatattatactagtaataatgaatgaattttggtcggaaataaggaagatagataaaagtttacatgaagaagaactcaagaatcaaaaacatgcatttgtatgaacacattaatatagaaatcttaaccacctcttggggaagcccattccagccacctaatcctgttccactaacattagacatgaggtttgaagaagccatgggactaggacttctatgtcgaagcctgtcaaagtcaccaaacccttggttggacatcattccagaaacgcgtaaaatctctgcagcataaagaagcattgtgtgactaatcagaaagtgatctacaatttggatagcaaagcacaagaaagacaggcactgcaaagtaaagaagcttaaaaaaaattgaaactttgaagtcatttaaaatggaccacaagattaaacgttgaaatctcatatgagaataggcgaaatgctaaacataccttatttcaagcaaacaaagaagcctaactctgttagaatttaaaatattgaatactcacaatatatttaaactctcaagagtcagatttttgaactcttaaagaaatatgaggacgaagttgataaatgatacatgatataagataattagcgattttaatgccatcttaatttaagaacagtttttatagtgtctgtttatcttaactttcctaattacaaatatcacatatctatacacgcttgattacatagaaacttacgaaaaattaaaattacaggcaaagcacagcaagacttaaggatgcctgctgtaaattattccttccatggaagtatttatttaataataattaggttgtaatatgtcaaagctatgtaggagaaggattcagtcttatgtttgtaagtttccttttctcttaaaactaatacctttattagttgttactctagttcacttgatcagtgaaataaagtctaaattttctcagaactttttgtttggaagatgaaatctaataatactgaattattgctactctttcaacttcttctctccctaagtactcttaaaaaagagttcaaagcaataaagagttcaaacaccagcaactctagtcaaagttaatggcagccaaagaacaaaaaacttcaagataaccacagtacagatagttaattatgtcaagtaactattaaccccacatcacatcaaggtattacacaaagcttttccaaagacagaaatgtttattagttaattaaacgcactgccccaaaaattcaaagcaggtacaactgatggtgggagttccaagactcgtcagcacaaaaccaagagttcaaatcccaaagacagttccaccattgtcttaaaacaaacaaacaattatttagtatgctgtgaagctagggcatttccgcccaattgaaaaataaaaaagaaaagaaacaaaatatgacatatgatctgcctccaaacaaaaacactctactgaaaaacagtaaaacccaaccaaacggatctaaaacacaaagaagcacatttgcaaggacctaaatgatgtttgtggagacataaaaacaaaagatgacatgaacccagaaaattctagatccagaaatcaaagtctaatcaaatcaacaaccttgatttaataggcggctgcatatcggaagcacttgcatgaaaggtccaagcttctgatgctctgctaagagctctgataagtactggctacaaaaacaaaaacccacgtacagatcaaaacaaacagattttccaagtcaatcagatgttaaaaaaacacaaattgaatacctttagactaagattatggtttctttaattcaatttttatatttatttttgtaaatatgtatgtgtatatatatatatagttcagaagagagtagtacctgtcaacatctggggtgctcctaatctggggagaggcagctctggcaggtgagaaattgggattgtacaatcctgacatgtccgccctttctccctttttctcagaggatttgaacaaacaaaagatgagatggaaaaaaagggtttaagttgcagaaggaaaagaggcacaaagcaccaccatcaaaataaaaggggggattgttgtaatattaaataataataataataataataatgaaaaggaaaaatgaaataaaaaggtgtaggcgacaaccctttctctgaattttgcagaaataaaaggcaaacctctttattttattttgttttcctctaatatctcttttatttttgtattattagttacagaagggtttcattattttaatttaatttttggaaaggtattaaataaaataaaaataaagagagttggacttgttgattggggtgggggagtgagagtgagacggagaggtgaaattcggctaaggtggtaactggtaaaca

SEQ ID NO: 25605 - DNA, 1626 bp, Cannabis sativa
tcataccacatctgaaccttccaatattcagcataaaactgacttgaaaggtaccactcaactattaattggtaatggttttcccttggctgttactagatctggttcaagtaagattcataattccactggctgcttagttctcaatgacattctttgtgtacctgaaatttctaagaacttattgtctatatctcaactaaccaaagataacaaggtgtatgtggaattttatgctgatttttgtgttgtgaaggatctaatgtcgaaggaggaagtgcttcggggagtgcttaacaacggactatatcaattgaaaatcactccatcatcgtcatcacatgtccctgtccacaccaactcgagctttatagcttcctccaagagcagaaacactgccaaaattcccacagtaacaaataaaccgagtcaaactcataggtgtatttctttatttgctgagtctaccttcaattcagacatcaatgtgtggcatatgcgccttggtcatcccaatatcaatgtactaaaacacatgttgattaatgaaaaagtctctttcaaaaattccatacctttttgcaatgcttgtcacataggcaaatccaaatacaagcattacagctcttcacacactaaagctcaatcaccaattgaactcatacacactgatgtatggggtccctcacccatattatccaaggaaggatatcgatattatgtgcacttcatagatgactatagcaactttacttggatattccctcttaagttaaaatcagatgttaagaacacctttctcaacttccaaaagtttgtagaaagaaaatttgatgccaaaatcaaaactctccaatcggattggggaggtgaatatcgaaacttagcaccatttctagagtcaattggtgtacattttagacacccttgtcctcacactcatgcacaaaatggtaaatccgagaggaaacaccaacatatcatagaaatgggcctcaccttgctatcacaagcctccatgccattgagatattggtgggatgcttttagcacatccacctatctcataaatcacctctccacacccactttggcacacaaatctcccatagaaatattgttcaaagttaccccaaatttaaaattcctcaaggtgtttggaagtgcttgcttccctcaccttcgtgcgtacaacactcacaaacttgattttagatccaccaaatgtgtctttcttggatatagtccaaaccacaaaggatacaaatgtcttcatcctaatggtcgtctatatatagcccacagtgtgtcgttcaatgagtctgaatttccgtttgccactggttttggacagccaactgatccaaccactctcacacctccaattatccaatacagtcactggctaccatttatctcctcacccacatttcaggacaatgatgctgatgttgctgctgatttttcaactgatatatctccctgtgatgcaggtcccgtggcttctcctccttccccaatatcggcctgtgattcaacaaaaactcagcatagacactccactacatccaactcatacaccaccatccctcttgctgctcatatccccacccagcctctctcacc

SEQ ID NO: 25606 - DNA, 2116 bp, Cannabis sativa
tgtatatataaaatatttatatatataattcgcaaaccctatttcaaaaattaaaatataaaaagacattatctaattaaaaaatttaacatacatgcattgcacttaaaattactttttttttttttgagatagcacttaaaattacttaatcaaacttaattacaaaaaaaactaattaaacgtggattgaacgtaacatcaatttagtattaataaatgtaaacatattaattatataaataatgtacaattaactatacatttaattaaaaaaatatgttagttttaattagtatatattattaccaatttatttgttttaactgtcaaataaattttctgatattaagcccccaaatcaacaaatttaataaggtttgcattaatgcttgaagaaataagtagtagcatgcaatagttacattcaagaattttttttagagcgattcaatttaaagcacaattccacgtcggccaaaagagagagagagagagagagagaaaaccggagattcgcccattgaaaacaaaacctcaaatattgaaataattaataaccatggaataatagtgaagaattaaaactatgtcttatgatcgatagatctcatcagtaagatacgaaaatttcgaactttttattaatagttaactttcttcccctaatattgattccacgcactacagatatataattattaattaatcaataatacgaataatgatactaattattgattaactctatgatgttagagcttaatacaataaattaatgaaggttggggggtaagagatgtcttttaagccacccatataaaaaaaatatttgaagtccaaagtgggacctctaatttatgactatataaagcacacatcttcagtttgtttaaatcatactctctctctctctctctcattcataataatacattctcttatctctaccaatactctctccatacaattaacttctgccatacatataaggtgtgtcataaaaataatataactaaaaaagacatcatgaacactgatctaggccatctcccccaaacacaggggaaaaccctcccagattcttgggactgcaaaggccgcccttccgaacgctccagatccggaggatgggcctccgccgccatgattttaggttggttattagctagcctagctagctacatatattatatatacacgtaactaattaacgtgcaatatatatattaactttattattcttgtgtattattaggagtggaagcatgtgaaaggttgacaacgttaggtatagctgtgaacttggtgacatacttgaccggaactatgcacttaggcaatgctacatccgccaacaccgtcaccaacttcctcggcacctctttcatgctctgcttgctaggcggcttcgtcgccgataccttcctcggccgctacctcaccattgcaatcttcgccaccattcaagcagccgtaagtactctctttataaactaacaaacaaagaagtaagacgtgtttggctaagcttctacttttgctttattaatttacagggagttacaatattaacgatatcgaccataatcccgagcctaagaccaccaaaatgcacgccaggggcggcatcctgcatcccagcaagtgggatgcagttaacagtgctttacatagcactgtatttgacagccctaggtactggtggtctgaaatcaagcaactctggtttcgggtcggaccagttcgacgaaactgatcccgaagagagaagccgaatgacaaacttcttcaactggttcttcttcttcataagctttggctcactggcggctgtcactgttcttgtcttcgttcaagacaacgtcggtagacaatggggttacggtatatgcgctttcgccatagttttcggccttgttgtgttcttgtccggaactaagcgttacaggttcaagaagttagtgggaagccccttgactcagatagccacggtcgtcgtcgcagcttggaataatcggaagttggagatgccttctgacacttctttcctctataacgtggatgacattgctgaagggaaaaagaagcagaagatgaagcttcctcattcaaa

SEQ ID NO: 25607 - DNA, 2723 bp, Cannabis sativa
ggcataaaacccaacagcatcaccctcaaggggaggacctccaaagtgaaaagcaaagttacagtagagagaaagatgtcccatcgtttcttctccctcaccgcaaaagaggcaagacacgtcttcaatctgcattcttttagcaagagttgacctgataggtaaggcattagagagaatgctccaccaaatgactttgtggcgttccaagatcctagaattctacagtttattccaaagagcgagagccatagtgggagggggactcttgacaagggttgagcaagacatgcagattttgtagaaaagcgacgagaaggttccttagtttagatccatttatccctgccttgacctctgtgccttcccccttttgaggatattattggttgtctcttggtcaaaaaggttgttgagtttggaaatatcccaaatcctattatcaataagaagattcgctactttcttccaaccctctggtcgcccgtttttagggtagggatgaaagtcttgactatgaatcacccacgacccatcccaaatgtctgtatctttcccatccgatatgagcttacaggcttctttcttaagaattttttagttttcacaatattcttctagaataacaaatctgaattcttgtacgaacacttcaagaaaggtctaccttttaggtacttggcactgaaaaccttgcaacacaaagaattatccttattcaagaaagcccaatcccattaagccaggaaagcctgattcatttctaaggtcctctagaagccaattccacccctagacttggggaggcataactgatctcaggcttaagacaaatgccacagttgccctgctcatagccccacaaaaatctctaaccatgccatctattttcgctgcaagcttcttggacaacttcgtcgtttgcatggtataaactggtaaagaaaatcccactgattttatcagagtagcacgaccgactttagataaggatttcaacttccacccatgcagcttagagaccaagttatccatgatgaaaatgaaatctgtatctttcctacgacttcggaataacgggagacccaggtagttaatgtagttaatgttacctactactgggttgaggtcgagagcctgcttaataccacgcttcatcccattactggtattcttgctaaagaagatggatgttttctcattattaatacgttggcctgaccaatcgcaaaatagctccagatactaccaaaatctcttagcttcctctatcgtggccctacccaccaaaataagatcatctgcaaagaacaaatgggatataaaaattactctttataatatagaatatgcaagaaattctataaatgtagggagctctctacttttttgttaatttttttttaatagtactttaatcaaaagtattgttacttttttattattttataaaattaatttatatttgacaaatttaaattataaaatattatttaaataatcaataataacgtaaattttcattaatcgataaataaagtaataaataaactctagaataaataactattaataataatggcaagaaagtttttaatgtggctttgaagttaattttttatacttcacgagtccatcttatttttgggttattatagaactagaaaacaaatcgtgcttcgcgtgtggttgtattttgtttagtgaaatatcattttttaattcttttttgatatttttgttaataatatgagtaactattctagtaaactattttttttttttaatttttactcaaaaagtaaatttaaatatagtagaaaaatttcataacaactaaaaaagacaactataatatatatatatatatatatatatagaaaactaatcatatgtataaattttaaaattgttatcatcactgtcttcaagttatcgttacattcaaaattgttatcttcaccatatctcatttatagtcgccattatattcaaagtcattgttgtcatcatcatatctcgcttatagccattattgttatcactatatctcacttgtaatcattattacattgaaagcagttgttattaccgtatctcacttatgcatccaatcaaacacaaataattataattcatgtaatttttctttcaaataatgtgtgtttaaaaaattagattatcattgtcttctcgtgtagttgtattttctttagtgataattaaattataaaagtatatcaaatttcaaattttagtatttttatataatattctcctaatatataagtaactattttactaaaaataattctcttaataaagtcttaattttttaattattttgaactaaataaatgattttttaatttattatttgttataaatatattatttatatggttaattttcaaaacatatattgttagaagaaattaaaaaattataacaattgattgttttatagaaaattcatcatatattttgtcaatgtcctttctaataaatttacattgattaattactcccttttatacaaatatgtaattatatatatatatataataaattaaattattagaatcaaattttgaaaagaaaaagtaaaaaattaaggcatgaagaagggaaagattagagaagaccatgaacaaataagagcttaaaaaaaggaataattatataaggcacaattttttgtaaaataattacatttttacgtt

SEQ ID NO: 25608 - DNA, 2697 bp, Cannabis sativa
  modified_base (290)..(295): a, c, t, g, unknown or other
  modified_base (682)..(685): a, c, t, g, unknown or other
  modified_base (1347)..(1354): a, c, t, g, unknown or other
gtatatatattatgtatatataatgtatacataatatataatgtatatatagtatatatattataaattatttaatgtaaataattgagattattttgggatatttatttaaattttaattcctaataaatatcatagttatttatttgaattctaaattcaaataataactatcataattattaattaataaataataaaataattttattttttaataattaagtcaaaataataaagttttggggaacatttatttttttaaattcatatttgaattaaataaatannnnnnattttaggtttgaaattcaaactcattcctaaaaccaaattaagataaaaattttcttaacccaaaaataaacaacaaatattattattttaagacaaaactttaaagataattaaattgtcttaaataaagaattgatttaagaattaattaattagaagggtttaaaatgtatattaaattaaacgttagtttaattattattagttaattcttcttttaattaattttgaggcttacgacgatcctacaaaattataaaaatacccttgttgcgatagaaattagttttgtaatttattttctaagttcaaaggttataaaattagaaatatctaattatacccggttcatcatcattatttatttattgcttttaaataaatnnnnattaatagttgattaataacatgcatgcattaatgaataacatgtcatacatagaaatctcacacagttgtattgtcatgcatctcatagtagaaacatgatatattagaattgtcttatgtatttatgtgtttattatttttgaagtcaaaatatgtaaactggctaagatcaatttaaaattaacctattaatttaaaatggttacaaattatgaattaaggatttaattcagatttaatgattatgacgagaaatatatttataatttgagatttttattatgaataaattaatcataattattaaagtggttaatatgtattaattctagaaattaataaaataaacatattaacctaaaatagtgagtgagagaaggagtatatgttaaggtaacatgcgacctcgattattagtcaatactgagagagtatacactgacctcgagacgatattaattttgtccccataagaaaggtatgtgtctatattgttgctcaaagttgatctcttgactaagataagaggaagtgatgtaatttagtgtgacactgacccttaaggtggcacactaagttaagtcatgaaatctgaaataatgggttacactcacaaagtacaactaagcttcatagtggttagttgttaacttggtcaannnnnnnnactttatattttgaaaagaaaatatgagatatttaggtttcaaaaaataaagatgagaaatgtctcataggctcaatgaaatttactcgataccaaccctaaggcgacgattaattatcaactaggtgagctttatatcgatatattctccattaggttcgtactttattttataaactaatttacaacctatggccttgtggccaaggggaagggttgtgacaatccaagttttattagcttcaagagcctttgtctcatgatcccttgcatttatccaatgggtatattgggaagcctcactataagtagtgagtttataattggagttttcttcaagaacaacaaccttggaagggttgcataagttgtcatagtataagacaaagggtcttgtgggatggtagtgttacatacataatcaacaaggtgagatggtgttttgatggggcaacttgttctcgaagtaatggtaggggagaaagatgtgtcatgggatgtggaagattgaacagggtgagatgtggaggtgggagaagaaaataaggtttctatgtcttgttgatgtgtatgatgaagaaagggaaagctggttttacgaaagaccacatccctatttgatatatttgattggattggatgtcaagaagggtgtaagccttcatgctcgagggatagcctatgaaaaaagaagctccacttctaggagaaaatttatgcttgtgagaataagagtggaaccatatgagaagtaaccaaaagttcttaggtgatcatacgtagtttctttactatgtagtatagcaaaggaggtcttggctttgagtaaggcagatagtgttcgattgagcaagtatatagcaatctgaacaacatatgactaatataccagaaggatattagattggaataacttaatgctctagcgacatttagaatatgttgatgctttctttccacaactgaattctaatgtggttgttctacacatgagtggtgtgaaacaatgctttagaggaaaaaaataattgaaactgaattctttggtattgttcgaccttacagcttaggtagtaactgagtattgagtgcagaccatgatgtaaaattgaggaattatagtctttgctttaaacttagtttttaacatgtaattccatgtaaattttgatttttcatctactattgttaggatatagttgtactcttcaacactcgttatatggaaggagcccaaaatgtttgtgtattaaatcaaacaagccattaaggttcgtttggaacgccgtattaagtcgtattgtattgtattatattaaattatattttgtgcaatattttta

SEQ ID NO: 25609 - DNA, 2469 bp, Cannabis sativa
aaaactcactaactaacaaaaataattaaatgactaatttgcccctttattcaaccaaaaagaaatctagatatttaggggtaaaataatcaaaatgcatgacccgattaaatttgacattccaaatgtctaactaaatcgtctcgctattctaaaaatactaaaccataataaagtgactctataggccatacgtcgcgttccactattactgggcataaaaatattaaaaaaatataaaattcatataaaatacaaatagcacacttagaattcaaatatatctccaaaatcataaaataataattaaaagtctacttgcgaaattagaccctaattatttactaattctaaaaaaaataactaagcggtgattacaaagggagatggctattgtagatggctgaagagttgcgtacccaactgttaactcggtcgaagcctgcctaaacgtcaaaatctttgtttaactgggggtggttcatactgaggtctagaggtaatgtggttgggaagtttcttgcttgaacttggagaagatgatttatgatggtatcaagactctcgtacatccaccgtgaaaaagaagtttgggttcaaagtttttctggccttaagttctgagaaggaaagctttggtttgaatttgaaagcaaaaggattcaaaaagcttagaagtagtaagaaaggaaaacgatgggggtttcatacctatttatagtggagaagttagtccaatcaaaggccaggatcaaattagctcaaaagcacaaattgatccaacatggagttgagaggactacatttaatgctccttgaaagaatcaaggaatttaattgtcatcattatgtgcatttaatcatcatcatcattttcgcagccccttacgcattaaagaatcgtcacatcataactctgccaccatttgaattttcctgcaataaactcgcttcttgcaggcgcatactatttatagatctaaagaatgtgtgaactaccagttgtttaccataaaagtattttatctctcaactaccaagttctagatgaaggagatgctcccacattctcaagattcatctacatctcccaggtgtaccctggtaatccggaaggagactacaagcttccaccacgcaggaatcctgcaagcttggggggtaaatattatttgcatttttggaaaaagaacatgtgggaaaaggtagaaggtgacgacctgagtgactatcaactaagtccctttaattggagaaggtcgcaaaaagattaaacaaactcgggagaggtccaaatctagaaaaggcccaaaaatttaccacaaagaaaattaccgtccaggacccggaagccctatcatccatctgagtactggagaagactaaatcaactaagcttacaggaagacacctgggagtcatacgaagggtctaaggcaatgccaattgtacaaggaaagctggaagcttgtcacaaagcgagagttggatgactcttgtgataattatacttttctgacacaggatcagatcttttcgcctgtgtcaaatcatggtagtgcgtgtaccacctttgaatacatctttctgtccgacgactcgtatgagggttttgtctactaggtgaaacctccacccgacacacgtcctgcactaatagtgatcttagttgtatagacccttcgccccatgagaaagagccttagtcagtattcttatgtaatttaccccagtagttggtgggctttttgcaaaaaaaccctaagagggtcatggatatgcccatacttgtactttagcctatataaacatctttatttcttcacaatggggggatcgaaaaattacatagtcaaagctctgctaaaatactctctaagctttcatcttctttaagagaaacctagagaatcagaattaggattttattgtaaacacctcttgtaatatatttaaacacctataaggccaatatattgactcgtggactaggaataattaatgttccgaacaacgtgaaatcctttgtctcatttactcaatagttatttaattcataaacctttcatttagtttctaaaattctcaataaacaatttaaattaaaaaaaaaaagaaaataattatcaaacattgattgttttatgaaaatattttcatttttctaattgagaaaaataaattccattcaaataactattacaagtaactataatttttaactttaaatttatttattatgtcttttaattttttttcttcccttttttccttttttttttaacagattcgctcttttaatttatatcctttaatccttagaagaatgatatttcaaaacaaaacataagaattgaaaagagatatataaaccattttatttcaaacaaaatgatagaggacttgctacaatatcatctgaatatttattctcttttgtaagatttttttatcagtgatcactaagtt

SEQ ID NO: 25610 - DNA, 3875 bp, Cannabis sativa
atgttaaatgcctattcgaattaggaaactaccaaaacccacgtgagacaaaaaaaaaatgatttttgtgctgtttaggggggcgggcagcggcccagctttatcatgtcacggcccgtgttggaatttcacgttttgacggtgatttttctactgcgtcgactgatagtattttcgccataactctctcgatattgctcagaattgaatgattcaagatgttctggaaagataaaagagatatctagaacttttacgttttgacttttcaaaaatctaatcaaaaaatagtcaaatttaggcttgaagttttagctttattttcttgcacaattttctcgattttaaatatcatctttttgtgagatatttatatcttttttcccatgtttttccactgatattttctaatattcttttattttaaatttacaaaaataaaagataacaagcgtaacgattaaaactcaattaaaaatatatttaacttattctaaaattaatactaaaaataacctaacacagtgggatttaactcttcatcgaaatatataagcatgagatctctcattctctaaagatacttgagaatgtttttcacatttatttagtgttccagacttgggttcgattggtaatgactcacaatcactactgcatattaaatgtcaagccttgtacacaacatcgcatacattaagctcccaacttctaatgcataagtgtactttctcatgtcctccatatcttgatgagtctttggacattgattcttgtatagtgaaattccatggctggacggtaactgtcctttcttagaattctccattgagaatatttctagaaccttatctctataagttgcttaagaaagttttaatgctcccctttttctatctctatagattttaatggcaagaacatagcttgcttctcccaaatccttcatttggaattgttcggctaaccacttcttctgataacctttctccattgagtcctagaaatagaatgtcatcaatataaaaaacaaggaatgctactacattatctttaatgtatttgtatacacaagcttttttatcgttctgttcaaagtcatactctttaatagtcttattaaatgcaatattcaaagatttagaggttttcttcaatcgatatatggatttaagtaatttgtaaacctttcgaccttcccctggttgacatacccttcaggttgttccatattaatggtttcgtcaagattgccatttagaaaagcaatcttaatgtccatttaccatatctcataatcataagtggtaactactatggatagaagaatacgaatggatttaatcctcgccataggaaagaaggttttgtcataatcgacgccttctcgctgtgtgtagcttttggctataagcctagctttaaaggtctctaccttcccttcaacattttacctcttcttaaaaatccatttataccctatagccgtaacatcttcaaacgggatttcatatgcctagactttgttggtgcgcatggaatccatttcttgatccatggcattgttccacttgtctgagtcagggtcttccattgcttgttggtaagtcaatggatcgatcatcattgtctgagttagagacaagaacacgtgctttatgttcaggggacatgctgtcttacgaccctcccctacgacgatcattacgtggttaagagattctctcatctaaaatatctgtagctgaattcagttatagatatttatttgaatgattaaatatgatttaattaatggggaattaaccacaataaatagaaacctgatttgaaaaatcaagataagcttttatactgctatttttgaaatacaaaggagaaaaaaaaaattgtttttctctctcaaatagttcttgctcatgtgttgagagttaatcaataacaaattatacactttattctaatagcccacactatttcttgtgtgcggtggatcgatttagaagactacggtatgagtttctgatcaaccaaaaagatacaacttacaagaagtttcgaggatacacatctagagatccattggggccttggtatatattcttttcttgtaatttatattttgatttaatgtatacacatttattagagctacggtacaatgataattagacatatgaaatcttccgctgcgtacctgattgagtaccataaaaccaacagaggccaaatgcatcctgctggtattccctctctctacctataaaaaaattcatgcacatcttctcaatttcctcaatcacgttttgagagaaaagatagatactctccaataagatataattccaatcaaaactgagttaatgagttgcactcggcccttcctacctaagtcaaatatcgactagcccctgtgtgtagtttagatctaatattttgaagtattaactcacaataaatctctctccatttgtaggcctcaaattaaaccctaagtatttcattggaaatgagcccttccctaacaatgtccttatattttgcttctcaccatccgtgactcctgcaaaatataaatgggattcgtccttgtttgctactaaactcataaaatgcatatacgttaattgtgttgagttagtagtactcttacttaatagtataagatcattagcgaaacaaagacttaccaatcttaggttcttgctcatagggtgcaatctgaataactttcatcttgagtattgtttgaagagatgagtaagatactccttcaccaatacgaaaattaagcaatggtgagataggatcaccttggtgcagtcctagtttgcaaagttatcaaacttcaataagagagtcccttttaattatttatacatcataatgaacaaactatatatagaactgacagaaagatataagaatactacatgagctatacctagtgttgtctttggctaattgatgaaataacagaattagttatgacagttggtatcgagcttttatcctatacctataagtaagtgatgatcaactcaataagatagttgagagagtagaaaagaaaaggcttatatagttgagattgatagagaacatatttgagagtttggagggttgtaatagatagtaatggtgtgatcaaactactgtcttggacagatattgtgtgtaatctctctcaaagtgttcaataaagattaactcattagaggctgtaatttcactgtgaattgcactgataaaagtgatatttcttacagtgggagtagggaaacacattgttatcttgattgaaccacgtaatagctgttcttattactctaattttattatatatatattgcttgttcatagtttaattagtttgtgtttttattgttatggttttgtatttaacttgtcaattgtgttttgcttcattttctgttcttgttgaggtaactttcacaacatgacttagttatctataatcatgtatctattataaattatatatgtactgtattaaatccctatatattttatgttttatctatagctagctatatatatacataaacgtagacaaaccctaattaatccttgttaattaacccattgaaatatttattcaggatccctgttctagcatcagtttcgttccatcctggagtgatatatatatatatatatatatatatatatataaagtaatgatattattattatttctcaattatattaaaagtgttgattgaagttttatagtcaattgacgcagagtcgtaataaatgaaaaattagaccaacaataataataaatactaataaagaacattaaaatataaagaggttcggcctcttgtattaataatagcctactcccc

SEQ ID NO: 25611 - DNA, 3810 bp, Cannabis sativa
  modified_base (62)..(62): a, c, t, g, unknown or other
  modified_base (3763)..(3774): a, c, t, g, unknown or other
ttttattcataactaagtggtcttagtcccctgtacagctacaagccacaacctcatatatnaataaagaattttttgatatttaatataaattattcaataataaattattaacaatataacattcacacatacatcaaaagtttactctttatataataataagaaatgtctttacaggcttttcagggcataaaccctaacaatctctcactttcctaaaagcaaattggacatctcccttagtcccatattagcaatatgacccaaaaatattttgttggtggcgtctttgtgaatggatctgcgagattatgtttcgaagtgatcttcaagaccgtcacatcacttttgtctactatactccttagtaaatggtactttctctcaatatgctcgcctctcttgtggctcattggttctttggagttggcctccactccactattgtcacagtagagcaccagtgattttttttacttctggaactacttccaaagttgtgtagaatttcttcaaccaaactgcttccttagctgcttcacaagctgctatatatttggcttccatggttaatctacaatactaatttgcttaatgcttctccagacaataactcctctaccaaaagtaaatattgaccagatgttgacttttgactatctttttttaattgaaaatcagaatcaatatatcaagtaggatttaactctccatcataatatacaagcatgagatctctcgttctccaaagatacttgagaatgtgctttactacaatccagtgttccaaacctagattagattgataacgactaacaatccctacatcgtagcatatgtcaggccttgtacttgctcttcaatggtatgtacaatttgaagctccagctggggcagtgcacatctccagcttgttgcaggtagggtagagattatgattagaggccctcacatagctaggaactcacggaaggccttagaaaggtatgcaagatcactttgacatgaaccaagagctgaagtcctggaggtagcagaatgtcctccaaagtcttagcgctatggatgtgaacctatcaccttcggagaatcggactcctatcatgttagctaccctcacacgatcatttagttattgaggtacaaatagctaatatgatggtggccaggatgatgatcgatgacaaagcatcatcaaacatcctattcaagcaagtcctaatcaaaatgggtttgacgttagaagacctggaaccatgcgagcaacttatgtatggtttcagcggagccgacattgctccatgtggtaagatcaaactgccactcacagttgacactaacccaagatagaccaccatcatggccacgttcatagtagtggacgtgaagtctccgtgtaatgcgatgctcgaaaggctagctctttatgaccttcgagctatatcctcaatgtaccatttatccgtcaagttcccaatggcggatggtatcgattttctcctctgtaatcgaggaactgcctacgagtgttataacccttcattatcacttgccaagaagacctcctctattgctttggcttcagatgggacgaacaagacctcccctactgttgtaacaccaagggggatgagcaaggcctctcctgcaaaagtcgaagagatgacaaagacctctagagtccaaactatggagatgatggagacggcacctaaagccatttgaaggtgcacctaagacagggacacattaacccctgttttgggaaaattgactcgggagctggtccgaccgaggaactcaaagaacttccctcaacacatcagacctgaccaaggttgtcaagattggaacaaacttgacagagatcttgagtgagatgctcatggcttgcctcaggagaaatcaagacatttttgcttggtcgcatgaggacatgatcgagatccatccctaggtcatctgtcatgccctcaacatagaaaaacttaactttaagcatgtacaacacaaacacaggctccttgacaaagagcgttccaaagctcttaaggaagaagttaaaaaactacaacagaataacttcatcagggaagctttctactcggtttgggtatccaaacctgttctggtgccaaagccgaaaggaaagtggaggacttgcatcgacttcacctacctcaacaaagcatgccctaaagattgttttccactaccacgaattgatcaactagtggacgcgacaaccagtcatgaacttttcacattcatggatgcctattccggctacaaatagatcaggatgcatgcaccagacgaagagcatactagtttttgaactgatatcgggctttattgctacagagtaataccttttggactcaagaatgcaggtgcaacttatcaaagactattcaaccaaatttttcataaccaaattgaatataatatggaagtctacgtcgatgatatactggttaagtcgaaaagatctgaagaccacatcaaagatctagaggtgtgcttgaacatcctgggagaatatcgaatgaagctcaactcgataaaatatgccttcaatgtccagtcaagaaaatttctcagatttattgtcaactcaagaggtattaaagcgaattctgagaaaatcaaggccttgcaagacatgaagtggttgttgcgataaaagacgtgcaaggcctaacaggacgaattgctgcacttagtaggttcgtctccaagtcaaccaacaagtgtgtttccttctttaattaacttaaaggaagcaacaaggggtttgaatggaccaatgaatgcaagcaagccttctaagctttcaaacatcatctagccaagcctcccatcctatccaagctaatagatggtgaagaattatacatctatttgataatcaccaagcatgcaaccaatgctgctctggcgcgtgaggaagaaatggtacaacatcctgtctactacatcagcaaacgtctcattagggttgagtcaacttatcccccactgagaagctagcctactacttatacatggcctccagaaagctaaggccatacttccaagatcacacagtcaaggtgttaactgaccaaccacttaggcaagttttgataaagccagaatcatcagggcgcctactcaagtggacaattggcctaggtcactttgaaatcacttaccagcctctaacaacaatcagaggacaaatattagcagacttcattgctgaatacactggcctcaacgaagatgatcccattgtttgtgaagagcaagttcacatgcatgagactgtagcttgggagtgttggaatttattttactagaatcaagatttactaatatgtatgcttgattaacaccctaaatatgaattctctaaaaataatgaaatgaaacacataagagtttaaaaaaccttacatcgatgacagcaaaataatatgtctcctttcactcaaatctctaatccttgttcctctctgtcacagagtaataacaagatctaagcctagatctccttccccctttcgggtttggttaaccaccgtcctccgcactatgattgagtacttgacttgctatgtgggcatggtactctatcactaaggcttgaatatgatgaagaataatgaataaggtgcaaaattactatagaaaggagtctctcatctactagttgacagagaatgaaaactaaatttagttagttgaaagtgttggatgagatgagagcatcatnnnnnnnnnnnngtatttcaactagggtttaggatttaattatgtgga

SEQ ID NO: 25612 - DNA, 4361 bp, Cannabis sativa
attctcatatattgaactatataaaaatataattccttaattattcatatttatctaattagggttttgctaatccatttcttaattccaaggtattacattgttgttgttatggtagtttgaagagtagagcatgaggattttgattctctgttcttgagtttataaatgcatgctttggtataaattgaaccttattggttgttttgtgaattcaagtatgtcatttgaattgagaatgcttgaaaaataccttagtttgatttgaaatgtttttgctaaggttttggtaggtttggggttattttggttaaatttcgaattaggcaaaatctgaaaattaggcattttctcggctttgaacccagtggggtcacaaccaggctcaagaccaaagcaggggatatcctctgcccaggccttaatcacgaccagcattagtctggtcgcgatgataattagtcgcgactagatggcgactatagtatgatttttgactccgaacttcgttttggatgttctttatatcgttagaaagcttgtttcgagctctattacatggtccagtattggagtcttatatgtttatggatgtaatttttaggggattaaccctagtttgtaaaactcaagaattgtgactaggattaccgacgcttggtcagaatcacctgtggatcgagattcttctcatgcattggagataaggtaagatagtaaactaaacacatagaatatagtgtggtggtacagttttatgatattcaattattattgtgaaatcgtgacctagggttattaccctaagtgcgtattgttataaatagatgataatttattaattggatatctgagtagagttatgcgtgtaaggcataaccatgttagactctgacaaatccttataaggccttgaatgtaaaagagacgtgtgagcataacacgtgggtctatgctacatagacattaattatagtgacaacattatatatggaataatgtggtgtggtggcacagtatatacatagtgacgtactatatgaaatgtaaatattattataattatcatactatttaattttctattttgttgggtcttggctcacgggtgctctattgtgcaggcaagggtaaagtagtgtccggtcagccatgagatcgagggctttgaggatgacttgtacatgttctggccaagctagaccacaatggttgggttcaataaaaattgtatagaaattctatttttcctgtacaaaataaattgtaatattttaaaaataattttaatggaatcccgaatatgtaactttaaattattttggctaaaatgtgtatattaattgcaaattatttatttaattaagtttattatttattttaaatcacttggcttttaaactctgattaatgagattaatagattgtaatcacgacacgtgacgttcctttaagtaagacgttacacctacattgatcccccttatgtcgatagccaccacactatgagcacttagtgggaagccattcataggctattggaatagagtccaacaaaccacattcattctcaaagttgataagagaaggaagaccctccttaatttccatatcaaccagtaccttagaaaatttgacttgggacatttcttttgtaatattgtcatccattatgggagtaccaattgtgctaaccaaagcactttagacaattaacgcatgaatactaatgtctcagcccatgaatttttatccaaattagcaccgatttgatcatctctatggagttataatctggagaccaatgcctcgtataattagcttgttatcaaattgcataacaccagcttccagtacaaagtctcttgtatcctcatctccaaatttaaccaaattgatgtcattattcatcatcaccactctttctaaacctagattaccccatacacgcctaacaaatccttcgaacaccttgagtggagcattagctcccataaccatagacaacaattttttagtattcagattcaatttcaatttcatccaggtcaagtttagcgattacttggccctctttggtgattgggggagcgtagtgaagcctaactctaacataatttacctttgatttcatatcagaccactggttgagaggtgtctcttaaaaattcgatcgaggtccatcaccatcctctgcccaaggacttcggcttcctcatgttgtggcaaactgtatgcttcagttccaaaccaatcttttgaattgggggaaacaccccatcgatagaatcacaaattttgattaggtttctataaaatatgatggcttgtaaaatatctgagtcgccgagagccatgattgcccttttttagaatgtccaagggcttgggaacccttggactttaaacaccctcaaatcccatgttaaaaattatcatcccgggatgattttcttgtcggaaacgcggctgaatagtgttcgtatggagagtattagaattcagttggggtatgttggttgtttttcagttgatgctaagggtaaaagtggaggtttagcgcttctttggacagatgactactcggttcagatcaaatcttttactgggtctcatattgacgcccttgttgagaatgacttggggttttcttggcgatttacaggcttttatggcagccccgacccgggaggaagattagacagttggaaactcttaaaaaggctcaaaccgatgttcaatggtgcttgggtgtgtggtggagacttcaacgagattgttcataggaaagaaaaacagggaggggggcccaaacccgattatctgatgaggaactttagaagtgctatctcagattgttggttgaaagaaatcaagccggaaaatgatgggtttacctggtgtaatggaagggcggcaaatctgatttttgagaaattagacagagttttttgtaatcccgattggaagaacagtttctgcaagaataaagtttcacttttgaattggtggaactcagaccatagacccattttgattcaagcaaacccggggaaaacaacggaaacattcaacaaaagatggggcactagattccactttgaacaagcgtgggcgaacaatgaggaatgtcaaaagattattgcaaaggtgtgggaaaaaaaagctaagggggaaccggttcttcatatcttacggctgttagcttcttgtgggataaatttaaatacttggaacattcagcaaaagaaggaaatgtttgccaaatcaaaagaactcaaagggaagatagagagcctcgcaaattcaacttgtaaagaagattggatcacaaaaaacaagctcgagatggatctaaattgtgtggaggaaaaaagagagatttattggaaacaacggagtcgtgctctttggctcaaacatggagaccgcaacacaaagtattttcacttcaaagcttcccatcgtcggagaaaaaacactattttgggactgtatgataattaccaccaatggagaaccaatgagaaagagattgagatcatagccattaattattttcagcacctattcaccaaggcaaatagagactcggatatgttaacaaccctccaaagatgtgttcctcatcgtctaagtaatgctgaaaatgatgctttgctagagccttttactagtgacgaagttaagacagccctcttccaagttcatcctctcaaagcaccgggcaaagatggtcttcctggactttttttccaaaaaaactgggcattggttggcgaagaagtcacctcggcctgcttagatgttttaaacaatgatgccgactgccgtatactcaatgaaaccctgctgtgtctaattccgaaggttaaacagcccacaaggatgtctgatttccgtcctataagtctttgtaatgttatatacaaagtgatttcgaagtgtctcgcgaataggatgaagcaaagcatgaactctgtcatttcagccaaccaaagtgcattcattggaggccggattattcaagacaacgccattattggatttgaaagcctccattgtatgcgcaaaggtcgttttggaaatggaaagaaaatggcagtcaagcttgatatgtcaaaggcttatgatcgagttgagtgggactttttagaattaatgatgaattgcttgggttatgataagaagtggactaccaaaattatgaattgcatccgttcggtatccttctccattcttattaatggagctatcaaaggttccttcactcccgaaagaggccttcgccaaggtgaccctctctctccattcctttttttactatgttctgaaggtctctcttgtttaatttttgaagc

SEQ ID NO: 25613 - DNA, 7553 bp, Cannabis sativa
ttgtcggtttggtttagtcgggttattcgggttgggcggtttacgaaaatttctgtacagccctagtactagacactatgggtgcctcatagcaatgttcttatatgaggcacccatggtgtccagcacctatgatgaagtgtcatcctataattggttaacgattttctacaatatttattaaaataaaacaagtgagactcaatattgagttgcaccaaaagtgatattacaccttataagagtgttaggcactagataccctttaataattcgttcatataatgtacatcttatatatataataaatgttaaggattgaaatatcaacaaaatcgtttttacttttaaatatttaaatcttactttttaaacttttatagtttgatttgtatttagtattttaatcattaaagtcaatttttttttcacttccttacacgtagtttttgtatttctctacttttgttaaagacaattctccttctgaattgttaaagattgtattggataataataaagtttaaatataaacatcattttcattcaaaaataaaaaaaaaaatactataaaaatatatatttatatcaatttttaatatgctaaataatgtataaaacaaaatacgcctctctttccttcaacaaaaaaattacatattccgcaatttaaattctaaatttatcactgatgttatacatgttaattgcatacgtacaactaattatttaaacttaattaaatcttgtttaaaaaaaactaacaaagcaaaaacaaaaattattaataaaagcataaatgatgacccaacctaatttttttccacaatataaaacagaaaactagtgccattgttgtgatcttggtaacacatatacaagttggtggtgcatatattttaagtggtgacagaagatttgggatttgcagttaggtttccaatacacatagtattagtagtgactctattgacaaatataattaattattatcaaaaaagaaaagaaaattgagttgatattatcatggcattgtgatagggatgagactacattattagtgctggtgagtattgtcatgttggataatgttttatatcataacatcataattagtgtcactaataattattagtgggttagggttcaattctctcatatcccatatgttaaaatttattaataaaattaaactatatatttttttaaaattgatgacttcaatttatattaattctttcaaaatctattgtgtgtacatcttttttaaattattctaataattttacttttattatcttacgatattctttatttttctctaattaaaattttgttttaacttttctacaaatttatacatccatctctaaagaatacaccctattatatttgaaattatgtcttgactatataagagtgcgagaataatttaagtacaaatactcgtaacaaaagtatatttaaattaaattttatttgaatgtaaatttaattaatatagaagaaagtatattcattaacttctctcaattcatgataaatagtggatatacaagacataagcaatgacacaaatggcttattagtgaagtgacaatttgtgtgtgaggaggagtgggagagattgatcattcatcaatcattatattcattattcattcctatagtgtgttaattcttattagttactaaataattactattttgagataattcctaaaaaaaacatttaatgtggaaaaaatttcataatgcacccaaaattaatttttttttttttatacttttaggagtttttttattattattattattttacacttttatgattttatattatttttatgttatcaaatattatattatatttctgcaattttaaaataacgtgtaaacaacaactgtttgtaagaaaaaaaaattggtactaaaaaaaatcagaattctatatgtaaattttttgttggttttaggtatttcggaaataatccctttaattaggaacattacgaaaatccagcccaatacttttatgttaagaagcccaaaactcgtgaaagccataattttgtcaacccatcactaaattttaaattaaagatttataacatactactatatttttaatgatttgatttcttaacagtactttaaatcaattaaaaaaaataatgttataaaaaaaaaataataaaaattaaagatttataacacatatatgttatttgttacgtgtgacaaaacttgatagaagggtcaatttacaatactatgaatagttcacgggttgaaaagtttaggcgcacacaataatatataagtaatagttcaagcgaaaaaaaaaatctaaatagcctaaaaagtaacatacaaatggcaagatcaagaataaaataacaagagtataatataaaaataaatcaaaagattgtattttatgtaaacaaaattttaaaattcgtaaaaattctaaaattctatacaaccgtatttttgtaattttatttgtgttgtgtgtgtttgtgtattttttttttttcattgaaacaataactaaaagatattactggtgtctagcaccatcctcggtgataagagtgatactcatgttgaagtacaatcttgtcttttagttgatttgacaaattaataaaatttctatattttttttttttaaaaacaatatcgagtttcatataactttaaaaaaataacatttaaaaaatttcgttaactaatcagtacctaaacatgtgcaagttaatacttcttgcttgatgtgctctgttgctcctgaaatgacactacatgtcttagttcggtgcagctttgcacaatcctgttggagacaaatcagagtgccggctgtggctcatgctgccatgactttcaagtgctggtttgaagaaggaatgtctcaatggagtgatactgaaagtgtggaagctgccatgattctctgggctgtgtggaagttaaggaatgatgttgtttggagctcaatttctccctcgacaaatgaggttattcacgttgcaaaagtgaattatggtataatgcacaacagttcgaaagtgatcctcatagtgtgcagcaaaatgtttggccgaagaaatggtctcctcccagctttcccatcatcaaagtaaatgttgacggagctctctttacctcggaggggcattttggagtggggctggtagctcggtctgatgttggtctgattattcaagctaaaacattgatcaaaatgggttcgttgcagccgcatgaggttgaggccattgggataaaagaagctttgagttggataaaagccaatgaatggattggggtcatacttgaatcagattgtttaagtgtaatttttgatattcaaagtaatacaaatatggtttcttcttatggccatattatttcagaatgtaaggcgttgtgtgccaaggttggtaatatctctttgagttatgtgaagcgatctgctaatagggtggcgcattatttgacgcgatcctctcgtgttgaagctgatcgtattttaaatagtttttctaatttcttttttaattttggatgatgtaaagtaatgaagtttctattattattatttttttttttttaaaaaaaaaaacaatgttttttttggttagataaaaagtaaatttttgttgtaatatgtaagattaaagttgcataaattgaccttaatttttgtttgaaggtactattaggagcaacaacaatggcttcctccaaaaaaccactatctgaaaaccaaaccccaaccactcaaatcaagaagaagaagaagaagaatgataccactactgccaataccaagaagaacgacaaggccaagaccaatggcaccctaaaaaaccacgatcagcctccgtctactccatcttcaacctccgattctcatcccgaggttgagaatggcagcgttctcatcaccaaaaatctcacaacttctactcctaccaaatccagtaatgggaaacagaagaagcagaagaaacgagaacgaaaggaagagcccgaagagagcgaggacgcgaagatgaataagtttcccatggagcgtattaggaggattgttaggagcgatgatccagatatgcgtatctctaatgaagctgtttttttggttaataaagctacggtatgatcttcaaattcttttgaattgggcattgttgtattaattagggtttttttgttgattgaaatttgggtgatttagtgttcgtaaattgagtatggttttcgattttgaattcaggagaagtttattgaaaaattctgtggcgatgcacatgcttgtgctattaaggatcgtaagaaggctcttgcttacaaacacctctgtaagtattctcttcttcttttcctgtttttaaatgattcatttcgagttaagaatttagcttgtgtaaaggtacattctttaattttaatgttctttcttagtgctcaaatttaacaatgtgtttgttgccaatgatgaagttagcaagggaaagctagttcttttttaattgaactgtggagtttggtagttgaataaaagggttgttcttattgatttaggtgaatcgagctttgaaagaattttaagataattaggtcgagtgtggcaagtaaattaagcttttcatgtgagaggaattcttattcattgtctaggtattgctatgaatctaggggttttctgctaagtaaaatatgcacattactgaaatagagtatggaaggttgggcaaactttgttgttgtaagaagttgaaagctaaatttagttgccttttttcgtaacacggatatggtagtgagcatgattttgctttaatttggtggctatataataacttagttatgaaattgtataggttggagaggaactgttgcagcctatcatagtgtaaattggttaagtatgttattggttgtgaaatggtataaaactttgttatgtaatatgctgtactataatcgagctgggacatttagtttgaggttgttagatcccacattgactaagtatgggattggttggtggtagtatataactacttgggcaccctcctctcttacgctagcttttgggagtgactttaccaagtggttgtaacagatgttctgtttgtgtacttatactctgataacaatcatcaattgctaaatgtctgtcattataagaattggcatatactttttgaacttggtacattaaaagaaacaggggcttggttttttgtttactactattactaggaatacagtttattatgtattctctctcttgagaagatcaccagttatttatgctcagcttatactgtggagaggggttaggcaacttggtactcttaactctaattgtttcttacaattaattacaaaacaatttttatcatttatatgctagcagtacttaagtacaagtttgttttttcagcatcagttgtgagcaaacggaagagatacgattttctttcaggtaccttatacttttcatagacgattttaaacattttttttttcaactattatgccattattgttctctctgatgtaatgtcttgatatgtttgtagattttgtacctgagaaagtaaaagctgtggatgctttggccgaaagaaagttattggaggctgaagcagcttagtagtaactggaaaacaaattaactaactgataaggaaagcatgccattctttgagccttgaggacgaaatagagagctggtttgctagagagtctcacttccgatgacgggggacagcaggaagcggttgacggcgtacttggtacaaatttgcccaaattttatagttatcaaactaacttttctgttttgtttgctacctagtgattaggaagcactctcgttgtgttcttgtactattattgttgttagtatactctgtcaggagctgaactcattagtaaaataccaatttgtctttttatttttctttcctgaaatgggaacttcataaaagggagcaaagcaatgacaattggaaggcaaccctgtctgaaccaaggcatatgaacaaaagataacaaactctttctattagctccaagctaggtttgattgtacatggaagatttgatttgaagctaaagcaaatgagcaattttgctcttctatgagcccaaattgctatagctaaagatgaaaataccaagccaagtgtgatggtacatgaaattacctttaatgatcagctcacaattttcttcaatcctcatcgatccaagttatttcaaaatggagcctgaaattccacacaatagaatagacactatacgaatcccagttgtaaatcactttgtcaaatctttcaaaaatgaggttaacatctcttcctttttaccaagtaaaagttcttccatcgaaatcaatatcaattggagaacgcccatccaataagtttatcaaatggctccccaggaccaaatttctatggcatcaaataacagcaatttttctaggaaaataccgaaacagttggctgagatatatataagaaaacacaaaatacctttagggcacttttggaaagtcaagtgtaattggaggtgattacacaatttgacatgtttgtctgatcaatttaattacactataacagtgtaatttgaggtaattgagaggtttcaattacactctccaattctcatgaccttgtgagaattgagtgtaattactaaaaattttcaattttaaatattaactactaaaaaatattatgttttcatgtaattattaactattctctcaaataagatattaagaattcatgtaattatcacctctccaaactaattttgtatttttaactaattttgtatttttaaataaagtataattattagactgtataattacccatctagtaattacattgcacaattactttcaaaaacattcttaatgttaaaaaatcaagaatttcattacataaaataaacatgtttttaaactcaaaacaatacactcacatgaaaacagaaatagtaccatacttcaacaaatgcagataaaactaaaaatgaccccacatagtgattacaacaatcataacaactccaatgtttacaacaccattattcataagtacagcagccttcgactttgaggacttgtccccttcattcacatccgagctaatggattcttcagtagaggaagaaggtaatgacacattagtatctttagatggcttcaatggtgtgggagaaggcgctaggtgctgctttgtcttcggtttcggaccgaagattcccaaaggcagcaacaccttatcaaccttgtaaatagcaagttgattatcctcataaacagtaccagaaatggtagcattaacaattccagtagatatgttaacagagcttccttccacagtaacatttagagggaaatcattggtattactagcttgtgtccgtacaggattgctaagagtctcaaagttttgtagtgaaaccaaagagggaagaatgtggtattggacaagctggactttgtcttc

SEQ ID NO: 25614 - DNA, 2027 bp, Cannabis sativa
aaatgacccagaaccagacctgaagtgggatgcggactcaaatcaaaactcgaatccggactcgggacacgaacccgaacccagacacagacttggatctagacccagatgcaggacccggatcgggattggagactactcagacctagacccagatccccccagacatagattggggacccaaaccccaaattagaaccagaatcggggcctaggactaggaatgggacccaagacccaaccctggtctcgatccccaacccggacccggaaaaaaacacggaccgggacccaggatccgaatcggaacgagactaggaaccaagattgggatccacatcttcacccatgacccagggcttggacccaacccgtagtttgtgtttggatcttggaatcgtaccagcacccaaacctggaaccatttccagactagggctcaaaccccgactcgaaacagagacccgaaatcgaaataagaaccttaataaggacctttgaacaggaattggacctggaccaagaactggatctagacggggaaccaaacacggacccacacctagactaggatcgatacctggacccagacccagacttacgacaagacctgcgacaaagaacctggaacgcagcacccatgactcgagactttgaccaaaaccaaaacccgtacaaaaacccgaacctagaccaagacccagacccagaccaagtcccgaacccagaaccaaaccgaaacccaaaccaagacctagacctatacccagaccccgactaagggccagactcgtaccagaactcgtactcgaacccgagactcagactcaaacccagaccgagatcaagactaggacccagacctggactaggactgagccctaaagctggactgggactagaaccctgatttggaccgttacttgggacctgagaatcgaactgtgacctagatgggggacctgggccccaaacccgaacctagacccagacctggaccaaggatccaaacctagatgggggacatggtccaaaactgggctgaaactgcgaccgagacccaaaactagaccccaaactcgagacactagacacaactaagaacccagaccaaaaccaaaacatagggtgcatactcggacttgtgcccgaactggaacaaggccaggatccaagaccgagacccgaatcttgacctaaggcttcatcctgacccgtagtcactgtttgaatctatgacccagaccaagatccgtaccaagacctagactcgaaccgggatccaaacccgatctccagacccaaaatcagaatcgaacaaggactgggatgagaacccagaccttggactgtaacaggacccatacctaaacctaaacatagacaaaaacccatatcgagacttggacccggaccgagatctgtgacttgggacctaaatcgagaccgagaccttgacctagaccgggacccaacccagacccagacctaaataccgggttcaaaccagggacccaagaaccaaactcagacttggaacccaaaactctgacttagactgggactggacccgaactcgaacccaaacccaaactaggactggactcggatcgggacctgagacccgaacccaaaccccaacacgaacttggacccagaccgggacctcggacgtgatcatagatgggggacccagacctagacccaggaattacaccaccaaactaagaccagaacttgggcctcagaacatgaatcgggattcgggacccgaccccagacccatacctgcacctagaacccacctccggacttgggatctgggactcaactcgtaccccgtgacttgtaattagaaccgaaactagaagcggattgggacccataaacaggactaggatttggacccagatccaaaattctaatcggaacaggacccagactcggacacagacccacactcggattttgtgtcgcggttcgagttcaggtttgggtctggctcggggtctgagtcctggtccgag

SEQ ID NO: 25615 - DNA, 1730 bp, Cannabis sativa
  modified_base (1658)..(1669): a, c, t, g, unknown or other
ccttcaacttttcttctactttcttcttaagttctagcttcgcttaaccttttttcttgccttccagctttgcaactactttcagtttagattccaccaagtcagcttccaccttagtaagcttggaagagatcacttgttgtgcttgaacaacaaaattctgaaagccactcaacaactttacctcttgttctaggttttggattttaagggttttctcagtgatgccctccttcaaactttccattttaggagtagcattttatgccttaaactcagcttcctaaatttttagccttgagcattccacatgagcctccaatacattagcacaagtcttggcttggttgtaatcaactttataatcatcttcatgtttctctagcctctagattttatccttgtaagctgatacaaccttatttgtagccgactctagcctttatttggtttggagctccaccggctccttcgattgggtttggtcactcttcaatttagtcaagacttcttctctcttctagtttgaggcatcttttttagccgtaagagtctctagctccaaggaaatcttagctactgcctcttagcatatttatgctaacaagttcccttggaagaaatgaaataaaatcattcactaatacatgtgttgatcaaaattattattaattgtaagtaagaatacttactctagcaagttggtgacgaaaagactaagcaacgaagactagatcttgactagctgccatggcatacctttctacacctagctggtgataggtgtcactagtttgctccagcaagtcattcacaaatggagccaggtcacttctgaccttgaatttaattgcctcttagactgtcacatgatcaacggtgggaggatggataacaacatccagagttatctcagaaaattcaactttttattcggaactaattacattagttctttgacgaatcatatttaatttggcttcaaattgctttcgaaaaagctaagctgactcctcgagctggacgtcattttcttctggtatttccggtggctggataggaaaagttatagttgatggaggaagtggaggaattatcagctttgtggaaggattttgaaggtgtggctcaaaactaggtgtagagtcccgaggtttgggatcaaaagcttctttatttatatgagatcacttcctttgttctcacttcttcttcttcctctctgcatctttcttcttagcttcattctgcttaacctctctctgctcgacctctcctctttcattttttagtgttgaactagttgttaaacaacctctgcctttagcttttttccatctttaacaatgttggacccaagcctcttcctagggaagaccattcctttgccatcttattctccatctctttcaatagtaatcacttgttgaattataagtggaacctgctgcataggttccacttgaagagtaagatccacagcaacctcctggacttgagctggcaccgtaaccacctaaatttgagatctacgaatatcttccaaaacatgagcctctagaactaataatggtgtctcagctgggggtgctgattcttttcttctggttcgggaatgtaatgactgttggaattatattttaccaggaacttagatnnnnnnnnnnnnatgttgatttaacaacctaaaattgaacttctaaaatgatgaactaaacacataaaagtta

SEQ ID NO: 25616 - DNA, 2190 bp, Cannabis sativa
gcatccgtgaggcttctctgcgtcaggattaaaatgagggattttattagtgggattaagaggttaatcacttcctttatatgccacatgtcacatgctcgaaaaacacaaataacaactaccatcgagtcaattgaatcttcactttcataattttccttgaacttctctgtaacatacatcactctctaattataaattaggaatgcaattatcaacttaaaattctagcaaaagttattgaaactttaaattagcatggataaatctataaatgcacggtgtaaactttaaaaaaatagcaaaagaaagtgatcaaaatacatggaaaacatataggaggagaaaaatatattaggaggagaaaaatatacacttttagaacgagaaataacatacaaaaatataagatcttcaccttttcctcgttggagcttattgtaacttctataattttcaaacctaatccttctatgtttcttaaaaatattggttagtccaagtacatgaagatatacaagtagttttttccagcttttagtaaatatgtaatagctcaaaaataaatagttcatgacccaacattagtgtttagtgcatgttttgactaaaaacggacattgatttttttgatcaaatttacacaaaaaattttctccctcaggttcttcctctcaaagttcaaaatgcatcatttctcttagtttcatttttttgatccctctacataaacccaccctttagtctttatagtaaattctttgcatgcatgatggtgctgtcattttttaatgctctggaagacacgagtacctatatattgttaatcttccatgattagtttttgtgggattatcttctttagtctaattttgttttatatgatttggccttatttcttactaaatggtggtaggtcttatctccagctcttacattcatcttatctctactatatccaatttgtagtctcccttcgtggatctgagatacgagttatctcagatctttggtgtattttgccttctcctgatccaaggtacgatatacaacatgtttcgtcttgactcaattagaggtatcgtttatctcgacttgaaccgagatctgactggcttcggtcaagtttgaggttacggtgtcttagttggtgctaggttaggttttatctcggtctaagttgtatgacatcttttcttggtctaaatcgagtttaatctatcttaaccgggtccaaattaaaagtgatctcggcttaatctgagtcatggccttcctcgttctgattcgagttaaatcttatcttgaccttgtccaagttaagatttttgatatgagttattcatgtttatctttattgtcttcttccaaccgacttctaaaagttttaaaaatgggcttgcattttatcactccattgagttttttcctcccttaatgggctttgtaaaaaattattttttctcccccaaacactacttcctcagttccttttatgcaatacatattaggaactgattagggttttagacattttcgtatcttctctttgtagtaggggaaactcgccattgttatatctctactttgtgtcagtaagtgtcccagctttgtttatttaaatttttttgaagtgacaatattaataataaatactttgggccttgggaatcatttttctgcaaatgatacttcaatttccacaccctatttttgttggaattttatgccctaaataaaacctaattttattgtaatattatttactttcaataaagatcagaaatcatatcttgaccttgtcaatgctctgttcacatgttttataaatgattatagatttaatatataagttttattaaatcctgagaatataattattcacaattatagtgatgtcatcatagtgaaaagtaattgtgattatatgcctcaaactatttagtctcatgatttattaatgcattggttttacactgacgtgataatcaacgataaaatttaattacacactaatatgtggaatgttctttctaggacattagcaaagtatactagatgtattagatatacatcagtctggaccgatattgacaatagaaaaaatatcataaacttattggtatgtcttttctaagtcaatatcacttagttgatcttaggtcaattgatctcaatcctaagatggtt

SEQ ID NO: 25617 - DNA, 1152 bp, Cannabis sativa
acatgatggccttggtttcttggctcttgatgggttcgaaggaccagcagcagccgcaagggggatttgttcagttgagccaagagatctttggcgttcttcttgaattatcatagcaaaaacgcgggaaaggttagggatgggttcaatgagcagaatttgtgctcgaaccgaggcaaaagactcgttcagaccagtcaagaactggagaacttgattctggttgtaacagtctaaaaagactttcattgcaccacaggtgcaagtggtaattggctggaactctttgagctcatcccatagggatttcagcttagtaaaataagcagaaacggagttgtcaccctgttgaagtcgggtgatttggttctgcaattggaaaattcgagggccattgccttcattgaaacgctcagcaagatcgttccacatttcagtagctaaatcaaagtatataatacgttgtgcaatctcagacgaaacagagttaatcaaccatgacatcaccatattgttacaccttaaccaagagttgagatagatattaccgggttctgggcgaggaagagatccattgatgaatgcgatcttgtacttggcagtgagcgccatggtgattcctcgtttccagggttggtaattggtgccgttgaggacagtggagacaagaaccaagctgggatgatcaccggtgctgaggtaaaaaggattggagtgatcatcagcaaccgatcgagaagtaggggcttgattggtgttgtcgtcaacaatggtggatcgagcttggggaaacggatctgtgggctgagatggaaccctaatttgtggatttcgaatgggatttgctgagggatctggagctggtacagagtcggagatgacctctgcagcttggttgtcgatcgacgatggaggagcgccatcctgggatcgggttgaaggtttggccatggatggaagcgtggggcagtatgtatgcatgccgtctgataccatatgagaagaaagaaagaaagaatgaagaacagagaaccagagcaaggatttgttatttctgttctgattaaatgtttacaaatgagaaaatgagcttatatagctctgttcatacaaagtaaatcacttggagaattaaccaactattaacagaat

SEQ ID NO: 25618 - DNA, 1785 bp, Cannabis sativa
tttttgaattttctaaaatttttgtataatgttttaaaaaattatagtataaataaacatgaaaaaaattagattaaaatttttttcttagaggtcaaaattgaacctttttaggaaatgcattgtagattagaaagatacaatattataaatgcacactataaatattagggtgcttttacactatactcttttatttttttttataatttattccattttatacaaatttttacaattttactatctttaactaacttttttaaatttgtattttttttatgaattatacatatttaactttagtaaaatttaaacgatcttgtaaatttaccacttcatttgttaattaaatcttatttgtcaaaaactttacaaagaaaataacaagttttatttttctcaagtagaaaaataacataaaacatgcaattaatgtcttttattattcaacttaaaaatattaaatgtcctttattattattttagtgcaaatttattaatattaaaaaacaaaacataataaaatctcaagcaatcataaatcataatcattatcatcatcataattgatcaaaaataataataataattaacctaaaacaaccattacaaaagaattaattaattatagtagagtggtggttggttgtaacttgtaagagcaaagagcgtgtctctcaccttctctcaaagagcgtggaaactatataaaataaataaaaataataacaaaagaaagataatataaagaaaatttagagagagagagagaaaaaaaagaatttagagagagaaagttaagtgaaagctatctcgtgaagcaataggtgaaagaagaataagaaataaatagaccaatattattataaatgaccttttataaatgattaataatttttaataattattattaaaggatttgtttagatttaacagtataattactagaataacacttcttgaaaatgacaagactgttggtcattaaattttttttcttgaattttgacatttaatagtgtactgcaaaactttgagatcattaaaaatttatcaaaactattgagattgttgaattcgaacattttagtcttattttactaacagatgcctaacacgatgactattcatgtataaaattacgcccttaacttggacgtgtataaaatcgtgttcttaaatttctattcacgtcatatttctctttgtaaaatttaatagaattagataaaaaaatttgaatctaacaatctcaataacttgaaaaattattcaacaatttttttttttaaaaaaaaaaaaattggagggtacaattagtacgtatcaaagttgagagaaaaaaataaagaaaaatacttaaaaataatactaaatacaatctcctattataactttttagttaacctctacacccgaaatcatatgctgaattttttttttcatagtagtattttactacgcgtgttcaaaaaacttcaaacttattttgaccaccataaattattcagaatttttcaaaaaaattcaaggatgatgttataactataacgaacaccgccataaaaaaatttgaaaaaaatatcttagcatatgttttcaagcacaaagatggaccaagaagttataatagtaggttaatagcagcactcctcaatacataattataaattagtctaaaataaagggttaataccatttttttttttgaaaaaaaatcatcatctttattaattgcaatccatagtgattacatgattaaaatctggagtaacatcacta

SEQ ID NO: 25619 - DNA, 3950 bp, Cannabis sativa
tgggtaggttgggctgggagtgaagaagaagaagaagaagtagaaagattaaaaaaaaaaattaattaatttagtttttaaaataatttatttatttatttattttaaagtattttcaatcaaaactatgacttgtagcaataaaatatcaatacgtggtatttttaggagcaacaaacagaatagttacattgggtacctacggacatacgagaagctcaagtttgaagactattaccgtaattttttacagttagggacttatctgcatcaaaataaatttttgggacttatgccttaatttaatatcagcatgtgtcgttttaggagctactaatagatttgttaaaatgaggaccaacagacttacaaaaatctcgagcttggtgactattattgtaactttttgaggttggaaatttatctacatcaaaatagacttttttggagcatataacgttatttttccttttattaattaaattttttatccgtttgttggttttttgatttataaaatattttctttttattaatttaaggaatatttagagtatttctttcttactttttattcataatttcttattattttctatttaactttatattatatttcaatgtaatattatgatattatacatctaatattctaaaaacaaacttatatgtttttggaaaaaaaattatgctatgcttttcaaatatgagtatatatatttaattaatttatttattttctcaacttgtgtttatgctaattctctttttaattaattttgaattttcttaaaataaaatgataatttaattttttttaaagtagatcttttctattatttagtttatctaatatgaaaaagattgttatctgctagttggttttgggtgtggaattttaggttacaacctcaattatctcaagccaaggtaaacgtaggtacaataatttttcattctcggggttattatggaattaggtgggctgttagggaccatgatgggagagggatggaggggcgtttttgttgttttgatggagtgttttatgagggtgtaactgaagctgttggtattcgagaagtattgagttagatacaaatgtgatttcgatggtgctcaagtcaaattttctacttgctggacaggaaattcatgacaatttttctatgctttcacctttcagtgttattgttaattactgtaaaaaactgttactactatcaaagagtggtgtctctttgatttttatttatctgtttgcgaacaagggcgctcatagtgttgctagagctttttattctttctctaaatcgtagtttaaatgggagtgatgttccagctaattttttgtctattattgctggagacatcaattattattaaagtttgatatattttcaaaaaatacgaaaagattaattatttgtcaaaaaaaatattgatatttattttataaaaattagaataaatgtttaacaataatatatttcatacatttacttaattataaaatttaaaattattcgttcatttattaagaacatataataatatttttaatatcttcaaatttgtgagtattattctgttaacacgaatttttgttaaccagatatgacccttgaaggtgataaacttgcacagaaaaataaaagtagtaaagaaagaagtatgaacacaaaggttttttacgtagttttgtagttaaaattctgcatagtccacgagtcaatcttattagatttctgatagtattttagggccttttctcttatgaattttttcgtctctttttcagtctaacttgtccctatttataattacatagtcagccagttaagtacatagttgactgttatctttacaataattatccctcgaaatcatggggtttgattacatacgtaaaataaatgcggttaatatttgaaaatcacacagctgtgattagtccgcttagcgagctggaactttttccctttctttccgaggttgacaatgtaagcctcatcgcttcttctctgaagacataacgctccatctgacaatttcagttcttggtgacgaggtgaacttcaacagccaatatcatttgaatgtcagctttatctgagagaactggctcgttaagactataaatctcattaagagatgtctgaaactgattggtgaaagtacaaggagcgtgccatcctatggcgagatgggcacctcgctattagttgcatgggtttacccgactattatacttagtttttatacggtatattatgagctaagtgtcttcacagtcattatacctcgcttacatctactcatgcgtaacgaggttgatgtctcaccttgttcatccaataccgtatggtttctcgttaatgcatgacgcaacagtttgtatatctttatctcgcataagaccttatagtcaacaagttgtaaatatactctgtcacgtcttcatttaatgagttattatattttcaaatataattaccgttacacgcattgatccatattcttcctaccttgacacgtgtcttcctttgaaatggtagccgaattttgggtataataataacccttaaaaaagttctttcttaataaaaagtgctttttaaatgatcacagagggtacatttgtcataatccctttcttcaagaccacgcatgcccttaaattttatggcttcacggtttcgaaggtcattattagcattaacgaattgccctttcatcttctacctcgctcccaatcgttagatttcccaacctttgcccttaccgttactgggttctaagtataaaatggtagtttaggctggacatattccataaacttttggtttttggtgaatttaatccagaaattggattgttattctcttgcaaagatgtcccatccaggttcagaaatttatcccgcaaaacttgtagctctggaatataccaaacacctatctttccccaacattcccaaaaacatcaaacctcagtttaaattggaaacgaaagattccaagactgaagatcatccgattaatccaaatcaaggagataatgtcgatcgttataggcgattcttacaagggatttctgaaagtaagcatcattctttgtaaatggtggtctgatctgaatttgtttttttaccactgttgcttcattgatcttttatctttgtctctacaggaatggacgtagattttgagagcgtgttcaaaggtcctccccaagccgataagaaatccaagaagaaggtaaccaaagttgatgaagtctcaagttctaccaaagaacccaaatggctcaagacagaagcttacacgagaaaatctttgagccaaccaatcgcaagccttgataagttcagggaaggtctcatgcaggaaatgggatcctctgatgcgagaaaatgggatcttctgatgtgaggaataaaggtccctactgcaaagaatgagatctatgcagcgaggatcatagagggacatcttactaaatcagtgcatcaggtcgagtcctcttgcttggagccagtctttcttgagccctcctgttccctatacagaaccttgtaatcttttaggaaaatggccaaatggtttgcccattgtggcacttttgtaaagacaagtttgtaaaccaacttagctttcttcttatcttaaatgccttgtactttaatatatttgtgtttgcttgcatttttattcacaatgtaaacaattatatattttgatcaaatgaagagtacttttggtctttccattgcacgtaattcttctatttaagtagttagtaatctactatgtgtgcgtgtagtttattatctaccagacttttgatctacgagcagttattaattctgccttgcaataacagttataatctgtcttaagcaaacttaaatatgcttttaatgttctcatcactttgtacatttttga

SEQ ID NO: 25620 - DNA, 2387 bp, Cannabis sativa
  modified_base (2359)..(2360): a, c, t, g, unknown or other
tggaggcttgaagcggggacgttacaaagaattttctcaaccgtagttacctagggagtgtcaaatgcttccttccctctcctaatcagctggcaactatcccaagggaaggttactacgcccggtcgagagttcataccaagcagggtgcgatgttgcccttgcttccatactgcaagaggattgtggactattaccatataagtttgacaaaattcacccccaagggcctcaagcatttgtctgctctatttgtcctctacgccacacaaggatggggtgagctctccccgtatgacacccactggctttttgatctaaagtgaagtcccaagcagaataggtcaagaaagttctatttttcccagataaaaaaaaaggttgacttgcaccacggtcaccgaggttaccaagataggggctttgtggacgaaaactacttcgtcaaaggaatgggcaccgttcacaacagcttccagcaggtgccgtcctactgccaccctccgttcacactgagctcaggaagagggcacaaaagattcttcaactggtttctgatgcacggaacatctcactcttgacttttgaggccaatttcgtaaagtacactttttttgactgattttataccaaaagttgtgaagaaggcgaaagaggctacactcgagttggagactgttcccgaacaagagactccaagcaaaaagaggaagaaggcccctccaagcagccaagtacttgttgagcagtctatcaggatcagggaagagcctgaaagacctgctcggcaatccgcccagtggcgggaaagggaaaagtcgtcctgacgaagtaggagccagaagactcctcaaatgatgagcctccatctttgcttgtccgggagaatacttcagcgtgcatgtagggtattttaactcatacataatttttgtctgttttggcttatatcatacatgtttttaaccttcttgtttgttcatatgcagttatgtctcaaaaggtgttcaaggctcggaagaagaggtcgggtgacagctccgcccagacccctccacccaaacgatcaaagggtgatgaaataccgcctaaggagaaaagctcagtcgattcccctatcaatgtctttgaggaggtggtgtctaaggttacaccaactaagaagccctccaagtccaaatgtgccaagggaggtagcacagatgggtctggtccacatattccctcaaacactcctgtcgtgttgagccctgagaccaagaagggcaaggagatgctttagcactattaggatcagctgcaacctgaggtaaacgacccgttttttgaagcggacaaaatgtctgtggagtttctgatgggcaggctcctgaaggaggcaacccgagtaagtatttctcctttggtttttatcttgtccttttatccatgctagttttaactttttcctatgtaggtcaatttgaagatggcctacacctactcccaagccaaatctactgccctaaaaactatcaccaccaccaccaatctacagaaggaggaggaggcaaccaagaaggaggtcgaggtcgtaagggcaaagctgagcaaggttaaaaaacaacttttagctgccaataatcgagttgaggagctaaagaaggaagttcaggagatgccatgtaccacctaacttgaggcggatgtcgaggttctatcaaaagaggttaatagtttgaaggacgagaaggagagtctctagactcttcttgcaaccttaaccacagataagacgaacttggaagaggacatcaaatccaggtagacgagggaggaagagcttttgaaggagttcgagagtttagagtctgccgccgtggaagttttttatgaattctggaaggccaacccagaaggaaactttgattacctcaataggcatatcttagttactgtacgggctagaaagacaaagaaaaccttgaggcagccagctccacaaccctgaccgaccagatccctgagactctcgcctccaacgaccaagttgacctgtacaaggaacttgggactccaactgtgtgatcctttcttttttattattttttcagctcatgggccttttttaaatacaatatgaccgaccaagcggtctttaaacttggtaatacttcattttattttgaaacaactagctgaccgggcagtcgttaatcctaggtttatatcgtgattttgtcatctttttttaagatgaatatttttccttattttagtaattgcacatggaaactgctatgtttttttttcgaacttattatttatcaatgctttgtatgggtatagttgcccccaagtgaccgagcagacttatganncttggtcacttgcatttcacaagttca

SEQ ID NO: 25621 - DNA, 951 bp, Cannabis sativa
ggcaatcatggaagggtgccacgtcagatttcgcatggatagtatatacccttcgctcctcagagtcactaaaagcattatatacctgaagctacccggtggcccttcttgttaggcagaatgaacttcaggattctcattgataaaacttctataaagaaggatcaaaagttatgagtgcttcaggttagtagtcgattagtttcgtcaggagggccttagcaatgtgctcctggatcctactcaggtgtgtcctatctagagccgcatgtaacggttgtataccttctgacaccaaattagatcttatcccatgcgtcagaccttggtagtgcatgtacgtgctctgcagctcctttttgtccaacggttggtctagacactaactttgcaaggtgaaacctttaggcgacacatgtccttaatcctacgagttggatggcatcaactgaacaccacacgatgaggatgctccctacctaccaacggtcagattgctatattgtaaacgacagctattgtaacgtgcctagtacaaattcctaggtgggtgaagggtatgccctcacccacacatgtgcttataaataccccattttttcatgtggaaagggtgaacaattttcacttacagaactcctgccaaaattcttatgagatttcttcttctccaagagaaagcaaaggaatacagagttaatactcatactgtaaacacttgtaatatttaaacactcgccgacgaggctaatataataaactcatggactagggatcattaatgcccaaaccacgtaatttgtctataatttactgcttaatatttccttaagcgctaattaatcagttttcaaaaatctcagtaaccattttagtgctttcattgagagctgaagaaagtttactagttgttgcatcacttcaaccatggtgatgttgggttttatgccc

SEQ ID NO: 25622 - DNA, 1440 bp, Cannabis sativa
  modified_base (1389)..(1394): a, c, t, g, unknown or other
aatattgcgaggggctcgagaaccactcacatcatttgtatcattgttatcatccccttggggatgattctctccattcttcttatatttgctgaattttcctcgtctgattaattccttaatctcgtcctgaaggaaccagcactctaaagttgtatggtcaatatctttgtgatacttacaaaatttcttggggtccttcttatcacgattaccctagattggaggtggctttttgaaaatgtcattttattcttctattgcatatatatggtcgcaaggagcagacaactcgatgtaattaacaaaatgtgggccccctttccttttggggatgcttcctttttagtgggggacttggcgagctttggacttcttcgtctagatggactgcgtcttctggggctttgacccctagaattctttcctttcgggcttcgagaatgtgatctaggcataggaaactcgcgcttctcatttcctctttccaacttagccaaagaattctcaattcttttatgcagttcatagtaaagaattccactaacaactcgggtcgtcacgcttacaatttttcccaaaattcggttcttagcaagacacctataattaacatacagaccaacgaagactcaggggcccttctcgaccttggttatctcaacattaaaaaatttaaaataaccttgtaaagactcaccgacttcctgtttaatatttgccaacattgtgtacgatagtttgtacgtcatcgtggcctgaaagtgcgttaagaataagtctacaaaggtttcctaggttgatatcgaggcctcaggtaattggctaaaccaatcatgagcattatcttccagagtcgcggcgactatctgacattttgccagttgtggtacctggtttacttccataatcatattaaatttatctaaataatagatggggttagtagtacctttgtatttgagcgattcagatagcctaaagccttttggaagcctggcttgtcgcacttcttctgcaaagggctacgtcctatgaagtttgtaaatgggctttctctgctgctcaatcatccttagtgctcgcaagaggctctcttggtcaatacctcctagtaatatgggattggtttgtgtcactgttggtacagcggtaagtgctgctatgttggcagggatcattacttctgtagtcgtagcaggtgcgattggcgggttgactggattagtcgggttgttcatgttctgcgtgccttaatcgcccacatggggatcatggggctcgtcattatcattgcgattcctcagtgtttgagatcacgctctgaaaatctcattgagatgatcgtgaagatcacctctgtgcacatgtgttatagtgagatttctnnnnnntagaaactcgagaccagactcctctttaaaggacacgtgtattcag

SEQ ID NO: 25623 - DNA, 2035 bp, Cannabis sativa
atttcaagtgtgttaaaaatcttcaactttccaacacctcaaaaacataattaatacaaaagtaagaaatgtggtatttttcaatttcaacaccaattctagtgtccatagaaaagatggtattttccaaaacactcaagcaatccagctcaacccaacaacaagcaaaacttactcacaaaaatccaacaatggtttggcccaagactattgggataagttgaggaatacctcttttttgtatcctttaatctaaaatacccttatattatatttcattgaaacatacccacttttgtgagagggttgtccaatatacactcactttttacttaagtctagcatataatttacattaacctaaagggtataatagggacatcatttataaaagtaagtatatcttaaagaatatgaaaatgaaggtaaaaattaaaatatgtaaagtaaaatgggtatataatgtaatttcctcataaagaaaatcctaatactaaccctagtataaaagataaatataaggtaagtttttcaaactctaattcctcttctacacacttcgcttacccttctctcttactaaggattcaaaatttttgctagggttcttctaagaatattcatatcattattaatattaataatataatctatatgactaagggaggaagtaagaatattaacattaataatattgttccacaaaagtaaaagaccttccccaaaccacacctaggaacttcaaagacattatcaaaacctaatttgttcttgatacaagttccatggtcagggctaagcttggtttccatcacaaaaaacaaaataggttggtgttgcttcaccaataaggagagatttcgaaatgcctgagaactccccatatggtggcggccatgcttggttcctggataatggtgcctctgttaagaggcctggaggcaactaaaattggtggaggaggggcttcagaaagggctatgcccttccccttcttagtgtgtgtgatcacagaggtggccataataggggagggtgagagggttgagaaagccatattcaaacctggtggtggggtacgaagttcagtaggggtagttgtgctcacttggtcaatggttgggaccatgaaattagagccagtactcagaaattggtcaatggtttgttgtaagccttggtcagagttgcttccatgacttaagtattcttcaatgggaatggagttggagagatcaaaggggtttttcttgacatgagttttagtaggagcacggagggtgtccttatagccaagctcaggagggactgaaaaattgttgcatctcatgaggtatttcccacatttattgtaagcgtggtcgagcatactgcagaaatagcaaaaattttgcaaagccttgtacttaaagtaaagccatttggttttggcaatgttacagaactcgatgttcttacctcgcctaagaggcttggtgacatcgataaagactgtgattttgagataaggaccgaagctttcaaacaaggagaggggtgaatttcaatgaggtctccgattttgagaatgtgttatttattttaattataaatattttcatactaaattttaaaaattatatattaatataaataaataaaaaaattataaaaaagaattgatgtgagaaataaatgattgttaatgattgtaaatatcttctaaaatttaaccattagagatgttctaataacaatactcatattttaaattatatatgatcaatttatacaagtacttagtgtgtcaacattatttaatagtctcttgaatctaatatgtaattccaaactctaactaatcctaatcaaattatttgtgatgagaccaaataatttttagagttaattgacatgcttttcttttttggtaagaaagatgagtttttattgcatcgacatcaaagtacaaacctatcaaattgcctatttacaactgccaataagcttcaaatccctttctgcaaaatatagaagagccaatctatattttttt

SEQ ID NO: 25624 - DNA, 4918 bp, Cannabis sativa
cgctcgttatcacttgccaagaagacatcctctattaatacggcttgagaggggacaaacaagaccccctctgttgctatggcaccagagggacgaacgagcctctcttgaaaaagctagaaagatgaagaaggcctattcagagttcaaactacgaaaaagacaaagatggcacctaaagccacttgaagttgcacccaagacggggacgacattgagccctattttggggaatcaacttgggagttggtccaactaaggaatacaaagaacttcccttcaaaatagcagacctaaccaaggttgtcaagattgaaacaaacctgacggaggtcttgagcaagacgctcatggcttccctcagaaaaataaagacatttttactttgtggtatgaggacatgatcgggatcaacccccaggtcatctgtcatgccctcaacatacacaaagtaaactttcgacctgtacaataaaaacataggctccttaacaaagagtgctccaaagctctcaaggaagaagttgaaagactctcggacaacaactttgttggggaagctttccacctagttttgatatccaaccctattcttgtgcctaagttgaatggtaagtagagaacttgcgtcgaattcactgagctaagcaaagcatgccctaaagattgtttccctctaccacgaattgatcatcttatggaagtaatagctggccatgaactcctcacattcatggatgtctattccgactataaccaaataagcatgcatgcaccggatgaagagcatactagtttttgaattgacattgggctttattgctacaaagtaatgccctttagactcaagaatgcaggtgctacttatcaaagactagtcaactgtatgctccacaaccaaatcaggaacaatatggatgtctacattgatgatatgttggttagctcgaacaaatccaaagaccatatcaaagatttagaggaatgcttcaacatcctataggaatatcaaatgaagcttaaccctctaacatgtgccttcgacatccagtcaggaaaatttcttataatcattgtcaactgaatagggattgaagtaaatctagaaaagatcaaggcattggaagacatgaagtcaccatcatagataaaagacatgcaaagccttaatggatgaattgctgcacttagcaggttcatctccaagttaaccaaaaagtgtgttcccttctttaacttccttaaaggaagcaacaaggggtttaaatggactgatgaatgtgagcaatccttatgagctcccaaacatcatctagccaaacctcccatcctatcaaaccaatagattgggaagaattataaatctattttgtcatcatcgagcatgcagccaatgctactctagtgtgtgaagaagaagggatagagcaccatgtctactacaccaataagtgtctcattagggttgagttaatgtatccctccattgagaagctggcctacttcttggtcctagctcacacagtcaaggtgttaactaaccaaccacttaggtaggttctgatgaagccaaaagcattagggcacctactaaagtgggcatttgaactaggttagtttaaaatcacctaccaacctcaaacatcagtcaaagggcatgcattatcagaatttattgctaattgcactaaccttgaagaagacgatcccatgatatgtgaagaccaagtccacacgcctgagactgcaactcgggaggacactagaccatcttggagactatatgtagatggatcctctaacaagcacggttctagtgttgggcacatcttagttactctagagggatttcaaactcatagtgcattgcattttgagtaccacaacaaacaacaaagcaaagtatggagtactcctagtagaactatgattagcactagcaataaaagtcgaatcacttaagatctacaatgattcgcagctagttgttaactagattctcaatgagtatcaagcccgatggtcaaacatgatcgcatacttaagcaaagctaaatatacattaggcagatcaagcactactccatccaacaagtgttacgtgaataaaacgcaaatgcagactcactagctaaactagctagtacaaaagattttgacactcttagtgtagttcccactgaatgcctacccaaatagagcattaatgaagacttagagcctatcctgataatcaacatagtctatcatgtctgaccccaattgcacaatacttagaacatggtattcttccaactgattggaatgaagcaaaaagattgagagaaaatagctcgttttatcatcatggatggagtaatgtatagaacaagattttaatgccaatttgtgggttgtcacaaaagaagaagcaaaacaccttatggtcaaggtacatgagggcttttgtggcaaccatgttgggggaaagcctttcaaagaagatcttgagataagggtacttttggccaacattggcagaagatttgatggactatgtcgagaaatgtgacgagtgtcagagattctccaaaatacctagagttgccccgaatgaactcaagagtatgcaaacaccttggccattcactgtctagggaactgacctataggttcactacctaagggagaaggtgaaattcaatatgcagtggtggtggtagattacttcaccaaatgagtcgaggaaggacccttagccactatcatgtcaaagatagttctagattttgtggtcaagaatatcatttgtcgcttttgactcccacataagatagtgtcagacaacaaaacacagttcgacaataccattttactaatttctgcatcagacatggaatcattaagagtttttcaacggttgcctatcgacaagcaaatggacaagtggaagcagccaaccaaactcttaaggatatgctaaagaaattccttgagcaagcaaaagggaattagcttgaagaattgcttgaagtactatgggcttatcctacaacagaaaatataataacaagtcccactcccttctctcgaacctaagggccatgatacctgtagggctcacaccaccatcacattgaagactcagatctgacaaataaactgatcatcaaatgctagccaagtctttagatgaaattgaagagatcagagaaaggtttgatcttagaaaggcgacgtatgaacaaagagtcacaaaaccctacaactccaaggttaaggataggaaatttaaacctagagacatggtattacgatgagtattcctcaacatgcaagacgcatcaacatcagtacttgggtcaaattgggaaggaccagatgccatcactgaagcacttgaacctggttattaaaatttggcatgctatgactacaacttgaacccagtaccagtaccaaggtattggaataaggtgcatctatggcggtactacaaataaaagcagttgtcctcaaaattgctcgcttcatagtaagattcactttaccttgtgcaagttaatcgactgcctcttaaattaaaagggttgtgatgaagttatctctaacttaagaggtccatcactaaggtatggcacttatactgaaaattcaaacaatgcattagtatagtgagaatcacttcagctaagcttggatgaaaaaggaaatctacgactactactttaaatgtacttttttctttcaactttgctcacagtaatgtaattttatttaatttgatgagaaaaagtgttgaacaaatttatttcggtattcattaaaattaatcaattacagttgacagacttgacgacactctcaagcgttgagtaaagctagtagggttggtcttgagataacttcagttgtttctttagtgagttcaacactaacaccccacaaatcctttgataagtggagagtgttcacacgtgtaacaccacccaagagcaatgatcatgaaggcccatgggaattcggtatggaaagtgaccaatgaaggaacttccttgataacttgggggcacataggttatgttatggtatacgagagccatatgttacatgagcattcaaaattttttgcacatatacgtaagtactctcatggtaaatataactttaagaagtagtgacattactcctagtggttgagtttcttaaaacatggtgtacagggaaattaaacggtcaagcggtaacggataaagtaaaataaagaaagctaacatcagaataaaagttttattaagttagaaataatttctaatttaactaaaacaaattctgagaatattttactaaggtttatccatatggaaaggtcgcccgagaatgaccaactaaaacactaaagttaaatgctacaaaaaaaaggagaatggacttaggaaacatctaggaagtttattacaacaatggtaaactcatccttatcctcactctctacaactagcacaacaactgtagaagggggaaagtcgggatgcttagggttgtagcgttcaactctggcagcttcttcgaccactaactcaccaccattaagagtaaagtctattttttggagagcttcttcaccgaaacactggtcacgacactttacaaactttgacacctgtgtattagggaaggccgaccaattgaatgacttcgctccttcattagcagaccaggcattgtagatggcatcaaagcataagttattgtagaaggtgacatcaagaacagcttagtcttcaagagtattcacttgctctttcaaggccttgacatgatctctaaggtaagcaaccaataaggtttgttcatcgagttcaagacgagaagactcttcaacatcaaaagtcttcttttgagcaattggcatgctcttcttcaagctactctctcg

SEQ ID NO: 25625 - DNA, 3711 bp, Cannabis sativa
tgaaatgggttttatttaggacacaaaacccaacagatacaactttgttcattgaatttgtcttcattaaaaataggaaattaggtccttttggagaaaaaacaacaagttctgcacacaaataacagggcccagcgcccaggttgacaatttgtcaatctgggccacaaaatggagttttcccataattgtttcaagaatcatttctgttttcaaaaaatattgagaatcaactatttctcggaaccaaatgggtagaagtgggacccccagcgcccaggttgacacctaggactgggccttgcgcctaggttgacattttgtctacctggaatgtttccgattcagatctgtgaaaagtgctccaaaaatattcaccatcatcaaaaataacaaagattcaactaaactcagggataaaaccaggtcaaccattaagttcagaagccttggaagccttggaagtatcaaaaatagaatcttgggagctcaatttaaaggccctaacccccaggtcaacgtttgacctaattcgctaggttttacttatccgaatctgatgtcgttttgattgtttgtcaattttttcacaagtggaatgatccattaagtcagatcaactaaattcataactttaattttggttcattcgaaagctaaaagtttcgagtcttctactttttcaaaataggaacatctccaagaatgtgtgactagcttcaccaaaacatataaaaggacaaaggggtgtcaaaccatctcttaggcatcttaaaagacttcccttggacatttctacacttttacaatgttcaggttgatatcagatctcaacctgggtgctggaatgtcaacatgggggctggaatgtcaacctgggagctgaaacttgaacttccttcagtaaaatggcaataagtcactcaattttcatccaattgatgcaattcaaccagcatttttaagatatttaatcccactatcaagtcttgcctcacacactagtccaaattctgaagctattgtcaccaaaattcacctccaagggagttacaaaataagctctaattaactcgcaacgggatccgctagacaataaaaaatcagccatcactactagatgctaatttttaccgttagatcatcatcaatggtggaaaacaatctatttataatttatctcctatttttgtgggcctccttcacctataaaagagagctctgttagtgtatttttcacatttagaaaactacccacaaggtcagagcttctatctcttgagtttggagtttctgatacttaaacagttgttgcaattaccatctcatgagaaatcaaaacttgaagtatacatagccccattactattgcaacataaggggtgaactactataaattattgtgtctctcgttaattattatgcaacttttcatattctcgccaatttagcgagcgggtatggcttagaagtctagtctagatttctaagtcaacatgaagatatccgacctaggcaaggccaaagtaggtctcacagtggggaatttgaccccaatctcaatggggatggtgcaactagctaccctattgatgggtgcaccaaccaaagatagcgcaatgaaaatagagggtgtgataacaacattcctcctcgaaatacttagaaaaattctaacccaatgcccaaagattctatctttgatagaataggtcctaggggagaagtaaaccttcaaaactatttgaaccgaagaagaaccaatcgggatggaaacatcctgccctggaataaataacttcctatcaatccacaagggttggccagacaaggaacgaccagagtggatcctacagtgcaagcacagttggattaactcaagagcctaatacaaggcctctccggcccaagactttccaacttggaacttgacagggctcgagggtcacctttctctgtgtgcatcaatgggttgcccttaccaaccaagtttaagatgccaacttggaaaatatacactaggaaagaagttcctttggccacatcaaatacattgaagatccaaacagatctacaaggggtgatagatgacgttagctgtaggattttcccaaaaaccttgattgaaactggacaatagtggtagtttaagttgtccccaggaagatttgattcccgagaagcattcactactgagttttacatgcaatttttgtcttctagccaaatatagtcccaccatcaagacttagtggaaataaaataaaggccaagtgagcctttgaaagactatatctaaaggttcatgaccaaagccataaaggtcaatggtctaacggaagaagggcggtatacaaccatattatgaggtatcctacctctgagcgaccattggagagacataaggaaaatatcaaccaaaaatatgaaagattttttagatcgggttgatgtttttataaaacttgaagatgttgttcgataggtgcaaattggcaagagaaagacagttaaccccaacaacttacctgccacgactgggaccagtaatatcgcctagacccagaacaacaatagtaatagagggaaacagaacaatagcaattttggccaaggaaattcaaagaaagggaaattcaataatccccttacacaacaacagcctagacgttttatataccgttttaaagattgtgacgagctctacaacatggtatacaaattagagccaaaatatgtgttttattttagggtgttttcactatgaagtttggtaaaaaaaaaccctagattttatatatgggtgttaggatatgttgtagagtaaacacttgttagttttacgttaatgtgacttaagagtctccaatcatcgagcaacaatttctactcaggttgaacaatacacctgaattcaaaatcaaggtaagattagtatagagatatacatgcatacatgtttatcatacatgtttttatgctttcttattagataacacatcattaagagtgatagtagtgttcatagagttacactggataccaacaaaaataagttgggaaatttagttagtatgaatcgatgctaccttatcagtacgactagagtgctgagtataggttgttattctagtcgattgtactaatagtatggattagcgctatcacatcagtgcgactagagtgccagtataggatgatattatgattagtaatacttttgttaagaacgtccctaacctagttataggatcacgatacagtgtattggtaccttgttacagtctagttttatgtttatgtttatgttttttttactaagtctgttgactcaaaaatatatgtttcatgtgcaactaaagactagggctgaaccactgtgggtattggagctcagtgaagattgtacatatctagatgattagacttaaaatattcaggtcttcaagacaatatgggctcagctttattaatcattgagtattatgtttgaatttgaaagacagattttgggatctcaggttttgtaaaacaatttatgtttatgacattatttctgaatttattttattattttaaagttttaattgaacacgattttatatcaaactcaatgcccctaaccgaattgactacgaaaaatcacagatttgtgtggtcagataaatgtgaaacaagttttcaggtgttgaagcaacgtttgataacagc

SEQ ID NO: 25626 - DNA, 1247 bp, Cannabis sativa
  modified_base (49)..(56): a, c, t, g, unknown or other
gttctaacattaaggaggaacttcatctctttgggagctttggatactnnnnnnnntgtctattccgcaaaagatggtgaaataactatcaagaaaagtggtttggtagttgtgaagggtgaggaagagcaaaatttggataaattagtcgagaagactattctaggtagagtcaagttacaaaatgcattcagttaaagtgaaggaatacgacaaggtggagaaaactccaatttcagttagaagttgtttgaagaaagaagaatcaatgaaagattgaagaatgtgaagataagtgttcaagtgaagtttaatgagagtatgaattcagtgcatatatactcttattgatggtttgagttgtgagtttatagaatttgtgccaaggtagagattgttggagtttgactcaaattatttgtttcttcctttatttatctatatttgtaaagttgcaatttctttttgagtaattattaattgtgagaaaagaaaagtcttagtagccaaaagttttgatgagtcttcttaaggaagctttagaatgtcttggtctccaagttgtcttagtgcccaagttttgtaagattatagatatgtattttgtgtgtgagagaggtatgtatatgtgtggagaaaatagttagttgtgaaaaaaaaagtgtgcgagtttgttatgtgatgagagtgagaaagaagcagagagtgtattgagatttaggtgaagagattgagataaagagcatatgtaattttgaagtgataagtgaaatatatctctcttagtgatagtttggtagttttaccaaactgagtaaattttcttcgtttcgtttctttattatttcgctgcgcttgaagtttatcattatcattctgctccacaattaaaatgtgttaacaatgggttaagaaaagaaaagtgagagtagttgaccatcttggagtggtgtgatccacaaatcatgtctatgaccgttaattgtggggttggacttaatcctggtgggttgtctagcttatttttgtaggttaaccacctgggctgagatagactcaaatgagctctcgtgcttttgggcttaccacctcttgtatcgttaagttttgaattggatttccagataaatttgagaaaagaatttatgtgtttaataataatgagagatagccacgttcagggtcgttgtctaaattccctctcagtccaagagatttttcataatttttttcttttaagtatattt

SEQ ID NO: 25627 - DNA, 4085 bp, Cannabis sativa
ttaatggaagtaattgcgttttcagcagattggtggtgaagcatggcatgaatttcctcacaatgcattttgttaaaccttagctttttaattgtgaaactcttatagttttctcttacaatactaattaaaatgattcatttattatttacaaagaactagaaaaacaaacatttgtatttttgaaaactctttattcaacttatattggaattttttttaatgtggattatacatgttctgctatttaacttctttgataatcaatcttaatggaaatctttaattctatttaaccttgacactttcatttcttacatgcatttttggaattatctttattctacacttatttagaacaatataattttgattattagctgttttttcatttgaggaagaagtatatatattgttacaccctttatggatcttctttttatatactttacgtatagatataaatatatattaataagtgtttattccttgatttaaaactctctcaacctgttgggattgggatgcaccaaacaatgttgattctgatactttgaacactgagaaggcagcagatacagaactaaagttcttgaatatacgatacagagcaatgatggtggtgtccaagaaagttcttaaaacacaactgctagaatatgggaataagcttgtggaacctccgttgttcgtcgatgaactcattcctcttctcgacagagttgagtgttgtctatcaaaggttctgcagtctccttctgaatcaatgaaaaatgcactttctccgtcattgaaagcattggttgatgaaaaacttttaggacattcaaatgttgatgtcaaagttgcagttgcatcttgcatcagtgagataacgagaattactgcacctgatgttccttacaatgatgtccagatgaaggcggtcttccagcttattgtgtcatcatttgaaaatttgtgtgacaagtcaagccgatcatacacaaaaagaatctcaattcttgaaactgttgcaaagctcaggtcttgtgtcgtgatgttggattttgagtgtgatgcattgattgtggagatgttccagcattttctaaaggcgattagggactatcatccacagaatgttttttcatccatggagacaataatgactcttgttttagaagaaagtgacgtaattccaactgagcttctcagccctatactagactctgtgaaaattgacaacaaagatgttttgcccattgctcggaaattgggagagagagttcttgaaatatgtgctgccaagcttaagcgttacttggtacaagctgtaaaggacctgggtgtttcattagatgactacagtaaaattgtatctaccatatgccaagatgctgatgatggtaatgttgagcagaataaagtccaagcttctgatgagaatatggtacttatctttgtattatgaactgtgatttcattgcttattctgtgaaaaaaatatatcttgtggtttgtatgaatttatcttattcttctatggaaattgtttagaattctttgtgtttgatttttccttcttttgttcagcaaagggttttatttgatgcatgcaatgttgtcatgttatctcactttcttgcactaactgtatcttcattaattttcctaactccttagttctgttattgtgactcaattatacacatgtttttgcaggctgttgagaacaggtcgacgaagccacccttggataacggatcccaggcatgccatctttctactttaatttaatttattgagataattgtgacataagtacttacaattttgagtttgtaagtagcacgagtacctaatattaataaaactgtaattttcatatagtttcgtcagtagagactattttatatttattaaaagaagatttgaaagtaatttttaccaatttctctttgctgaagctttgagattaacttaaaataagtcttacccaacttagtttcttatgcaggaggataaagcgggaatcacagaagcagcgtcactagaacaagctcaacttgctatggatagatctcctgggtctgcaatgagtaatggtatcaccaagactgcaagagatgactctttggctgattttagctccctcaagaagcaagaggatgatcagagaaccgagagtagcgaggatttggatgcaccaaacaatgttgatcctgatactttgaacactgagaaggcagcagcagatacagaatcaaagctagagcagagcaataagaatgttgggggaaatactagtttgtctgcaaactctactccttctgaaagtcctcatgttttaaatgaaaaggaaagtgctgataatgagaagaaaatgcagatgatgagaagaaaacttcgaaaaatgaagagaaaagtgcggataatgagaagaaaagcgcagaaaattagaaggaaagttcagaaaatgaggagggaaatgcagacaatagaaagttcaaatatggtccttatatatttcatttcttcctgggttcttttgttgtttctgtgttccactaatatatttcatttttagtccaattacttttttgtaattggaagtattttcactgcttttggatgtttgacatcgataatttggagggtttgaagcactggaatgattaatatttaatggccgattattttactttcatggttatgaattttagttctaagaggtattgtgtgctggctcaagatcaagatacttatttgtaagaaatttgtcttttatttttatttgatagcaagggatttttgggcatgcttatagtcctgagagattaaatatcacctcttcagataatgattggttttcaatacatcaataaattgtttctgtaaggactctcagacaccatttatttctttattagtattatattgtacgttttaagtctaaattcttacagttttatttttgggtaccttctcaaaaggcctcattctaatggagatagtgttcatctttatttggctctgataccacttgtaaggaccgtcagacaccatctatttttctattagtatgatattgtcagctttgggcctaagcctttacagatttgtttttgagcacattcccaaaatacctcattccaatgaaaatactgctcatccttacatatccaagatctttcttatttttagccaatgtgagactttagttgtacacttaacagtttctttcatatttttcatgatatatttatatgaactattattttaatcacaaaaaattcaagaaaaacatattaaggttactaggttagctcaatttttctttttgtggctgagaaaaattaatatatacaaatcttcatatctctttatatagtaagaatctatccttattctctcatcaaaatatgtttctatagctaatttttgtttttcttattgtcagctttgggcctaagtccaaatatctaagttttggtagatgaatgtgggtgaccttcacaaggtttgggaaatcatagccttgaaaaaggccaaatagagactgggatttcttcccctttgatcaaattcttgataccatgcttcatgagctttgccacacaagcttcgggatgaacttagaaaggtatatatatttagtatacatctgtatatatagcttttgttatttttagtgcaactttgaattttctgtcctgtgtaccttttttttaaaagaaaagataaaaattattttattttatatatatatatatatattatatatgcacatgtaaattaatgttagaattttgctatgtgtatgtaatgtgttgagatattatcttgttcattatcaatatttatatttacactatgtttggtaggggaagagaaggaaggagaggggtggagggagagagataagaaagagagagaaaggaagattaaattcttctacatacacaaatttccatccctctaaagataagagaatctaaaaaaagacaaaaaaactaaaatgtctctttccctctttaaaaattaatatataataatattcgaaaaattaataataaacggaagatcaatttgtatataacata

SEQ ID NO: 25628 - DNA, 1122 bp, Cannabis sativa
aaaccaatctaattgaacttctttatataataatgtatttttaggaaattattctatatattattttttttttaaaaaattttggtttggggttactcaggcagatgctccaatattttctatgtggcttgttacgttaattttgattgtaattttagttcaattaattgttacgtgaatttctgtgtgaattatattttagtaaaaatgaaaaaaaaattattttaaagtatacaaatgaaaaaattcttatattttaaagtagcgatatttattgtaattataacatataatcagcacatttatgaaaagttccaaacaatcaattttcacgcatgtaaaaaaaatacaacaaattgtttgaaatcttatttgagtaaattaaatatgggaaatttcttacaaatttgtagatggtcttctatgactatgataacaattcacatatatgtacaattttgcataactaattatcttcgctccctatatatacatatgttttgataaattttgtgtgatttaaataatcgaaataattattatttattagaagcctgcctaaccaatctcaaaagtacattaaactcaaaatacctatactttaaacaaaacaaaaaaatagtacatgaacacatacatgcaagaaaattatttatttgtaattgtgtcatgccttttatttaaataaatcaataaataattaatatatgttcatgcaaatgaatgcatgcgtgccgaccttaaatatattatttttttttaagaaaataatcaactttattaattacaatcattcatgattacatgaagcaattcagtagaaacgtcattgcttgaaagagtacgatcagcaacaaaataggaagctctcgcaaaggagtgagcaacacccgtttaataaaatgaatagaaacatcaccgatttgttctaataacaatttgcaatcagatataacacttacaaaataagataatatattatttaattattatatataaataaatatatttatataaattataggaagatttaatccttttcttttaatcatatcaaacataatattcatttgatgcatttctttcttttttatctttgagttttccaaattatttgattac

SEQ ID NO: 25629 - DNA, 1467 bp, Cannabis sativa
ttataacaattaagcccctacaatcaaaaattctgggtccgtcacttattgaaatgagtgtcatttgtttcctataattaacagctacaacagcatctgtaattggggtactcatgattttcttggtcttatgctggagaaagctttcatgtttgagaaaggagaaaaatcctgctcagagaagtattgaggattttctaaggagctgtggaccacttcaagttagaagatacagttattctgaggttaagaaaatgaccaattccttcaaagaaaaattaggccaaggaggctttggtagtgtctacaaaggaaagatcttacaagatggttcacttgttgctgtgaaacttttacatgaattaaaaacaaatggagaagaattcatcaatgaagttgcaaccataagtagaacttcacatgtcaatattgtctctttgttgggtttttgttttgagggtactaagaaagctctcatctatgaattcatggccaatggatctcttgagaggtttgtctttgaagataataataaattggattgggatacaaattatcaaatctcacttgggattgctagaggattagagtacttacaccgcggttgcaacacaaggattttgcatttcgatattaagcctcacaacattcttctcgatgcagatttcgtgcccaaaatctctgatttcgggctagccaagatttgtaacagaaaagaaagtctaatctctgtgttgggtttaagagggactattggctatattgctcctgaagtgtttagtagagtgtttggtggggtgtcatataagtctgatgtttatagttatggaatgatggttcttgaaattgtgggagggagaaaaaatgttaatgttagagttgaaaatagtagtgaaatatattttcctcattgggtttataatagacttgagttagatgaagagtttagtttgaagagaataagcaatgaagaagatagagttaaagtgagaaaaatgatcatagtgagtttgtggtgcatacaaactgacccttcatgtaggccaacaatgagtaaagtgatagaaaatgttggaagggagtgttgattttttggaattaaccacctaagcctttcttgtcttcaccttcaaaatttacaccagctgatcaatcctcttcttctacatcaccactttctcattcctatacctcatttttgtagtggcaaagttgaaaaagaagtaataagttttcttttatttgtgtttatgaaacaagttgtaaatacttatgatactaaagcaagtttgtagtaacaacacaatgtttaatcttgaaagtatgtaaagtattcccaactggattcttgaaattgaaagagaattttagttagttctaatttgatgataatagcaatatattgacccctagtactttttgtagtggctaattagtaatttttccccaactttgacatgtactaaa

SEQ ID NO: 25630 - DNA, 2913 bp, Cannabis sativa
taattaattaagattaaccaaaacaaatgaaaataaaatactatgagattagaacagtacctcttctggtgggcttggtgacaaccttaacaagaggagttgttttcttctccgaattggggtcctcgttaggtgggaaaagaaccccatcaatgccctgaactgaaatccggccatcggtatagatatctgggtcgaaaaggtaagcctggctatcgccatggccgaatttcaccgaaccatcagcttcttgagccatgaccttatggggtagcctcaaggtatcgtaacgaaccttcccaaatcgcctaactgcattgtacatactctcttcggtttggtactctggtatgatgtggtagtacacaatctgttccggtgccccaggctcgctaagctggtccgtagtcagtttagccatggcctcgtcgttcggggctaaaaccgtaattacataaccttccgatacgagccgacccatctcggtggccagagacgttagattaactaaaatatcagccatttcgttgtacccaccgtaatgcacgagggtttggataaagtccttgacttgagccattccgtcgaagtggccacgcggcccacctggtcccggagccggagctggagctagagatggacctggagccaaagcgtcgtagattggaagaactgggggtgccccagccggaacaggggcaactggcttttttaacctgtgggttctgggatcaactaccggcgcaccttccggcaatactgcggagattgatcggagacttcttcttctgttgaaatcttcttgaactgaacgtgggattagaagactttcgattccgtggattacaccgtcgggtcttactacgtcgtcgggacggactatctcggccgagtcgataaccttttcgccggagtttttgctcgttaaatgaacgcggtcgttccaaagagttttgtgtctaaccggaacggaatcggaagcgggccactcgccggagccgatacgtttggggataatgtggaacattaagagtgtctggagagaccttacgttcccgggttcgagcaggaatcgcttgaattcagggtcgagttggcgttctagagcttcgtttctcggggcgaaaatggtgatgttgtgtttaccgacggcctcttctaaggtctgtagcaaaagggctttctcgactaactcggccaactcagtataatgcgagtcgagaagcgcaaccagaaccgagttagaattaatctgaccagaaccggaagaagtagaattacttttctgagatgggttgttgggcaatgcagcgaaagagttagtaaaggaacaaagaataaagaataataagaaggagacgccatagccatgagtatccatggcgctcacaaataatgaaatccctctgcaaatgaaatgaaatgaaataaagtttcgattttttcttctttgtttttagagtttggagattcttctctgttttgagagagaacaaaacgaagaaaagagctgagaagaagtgatggtattaaggtggaagaagagaaaaggaaagttagagagagaaagaagaagaagtagaagactttttctagagagggactactgtgttgtgagttttagtgttagctttggaagacagcctgtatatggggaccacacggcggcttcctttgcttcactcaactctaagcctaagccgtttatttggcttactttcactctacccttttctacttccatttcatttaaaaatatgtattttatttcactttaccaacttggaagatggcattgctacctattttatagtttgagtaaagaaaattaaaaagcaaaaatggttagaaaaggtatatgagtatatttctagaacattgaaaatgaaagggaacataaaaaatgactgaggtgggaaggaggatggagtagaaaaaaaaaactgaggtgggaaggaggatggagtagaaaaaaatgttctatgagtttcactttctcctttattaaaaaaaaaaaattatatatatggttttcttttttgggaaatgtaaaagtagttttgtgatattttcacattaatttttcttattgtgctctaatatataattataaatcttaatagaaaatttaataaaaaatgctaccgtcaatctcctgttacaaccctttagtcaacctctacacttgaaaacacacgtcggaatattttttttacaaatcttttttcacagcagtgttcgttatatttacaacatcatccttgtaaatttttgaaaattttcaaatagtttatagtgtcaaaaatatgattgaagttttttgaacacgcgtagtaaactaaaatattaggaactctatttttgataaactattcagaatttttcaaaatttacagggatgatactgtaactataatgaataccgctatgaaaaaaatattttgacatgtcatttcagacgtaaaggttgattaagagattgtaataggagattagcactcttcaaatttaatatgttatttaatgttcacttaatactttattaaaaaatgtaaaataataataataatacaaaattaaatgtaaaatttaataataatgtaagtcatttaatgcaaaggagtatgttagttaaaatttaataataaaatattaaaaatagcacaatgataaatataaaatcatattatttattgtgatacaaattttgcattatgctatattgtgattcaaattaaatttttttattatgtgagatttttacgaattaaatttacatttttgttgcagctgttactataaattttgctgtgttgatttggttaactaaaatgttgcatgccaatatattagcatctcaactcataatcataaaataaatgacaatagaagttaaaatattgagaaaaagaa

SEQ ID NO: 25631 - DNA, 2063 bp, Cannabis sativa
taaaatatttaaatatcattttaaaaaaagatattttgtgagtgaattaaaaagtttgaaataattttaattttaaaaataacttcttaaaagtacttttggaaaaaactataaattttaattttttttataaaggatttttttttaaaaaaaaaaaagactattatatcaatttgaaaataggaaccaatatcttcttccttcacgtctataggtacaaaatatgctagcaaaaaaaggcaatggctgcagtattcctgtggcaaagctcaataataaagagcaatactgtagttttaaatgtgaaccataagagggtgatcctagtgagtagtgaacctatatttttgtgtaaataggttaaagtaaatggagaatttttttcatatataagttttaagtggtgatatatatttttttttgctagagaatgtcaatatccataactttcattagaacggtaaatattaagtcgtaacgtgcaaatttattattgcatttctcttatcctattcctgtagtttattaggacatcaatgctgtacattcacgtatttaatacattttggaggactctttataatattacagtaagaatcatttaacctttagaaaagattccttgatattgaactctaataataagaacaaaaaaatatagtatataatttatattaatctttgtaactcaaaagttgaagcaagctttaccatgtatctaaatctttttctgcttcatgttgatcaatggagtttacaaaacttctaatttatttttcaagttattttcttcaccagcaagccattacttaaacttgctttttcggtttaaaagatgtataaatgataaatagggaaaagatgttaagtcgccattttatatatattttaaaattctaaattaattatagaaacaataaatgatgaatattgtgaattgttagtacataaatagtgtagcaattttaagcataatttagtttttaaaaaaaaaacttgtaatttttgttattccttggaatcatcattctatattattaaaaaaaaattaaatacaaattaataaattaaagggatatttgcagcataaataccatacgttctaagttttatacacataaataccacatattttaaataccttaagttacatttccgttattacttttctgttaaatcctattcaaacatagaggagtatttgcagcataaatacttgatgttttaaatttcatacacttatatatcacatgttttttcttttattatcaattcgttaaattctattaaaatagactaagttgatacatgtcaacatataagtggtccactaatatattcttaataaaaaattattaaataattttaaaattttttgaacggtaaataaaacaaaaaaaaatgtatttttttgctaagtattattcaataaaaaaagttattaaataattttaaattttaaaaaaataatcaaataatatttatttaattaataaaaattaaaaaaaaatcaattttatagtcatatctttccttgtttcttcgtatttgtgtaaataaatttgttgaagatatttttgtaagtaaaattgattttagatataatattgaaaaaatctcttataataggatttaagaaacttgtagtgatgaatgtaatgtaaatgtaactttaagtatttaatccgtcagaaaaaaaaaacatgtggtatataagtgtatgaaatttaaaacatcaagtatttatgctgcaaatactctatgtttgaataagatttaacagaaaagtagtgacggaagtaacggaaatgtaacttaaggtatttattctgtcgaaaaaaaacttatattatttaagtgtataaaaccaaaaacgtatagtatttatgccacaaatatccctaaattaaataaataacttgttgacctactataccaagttattaacttgatacatcatcacttttttaatacggtactatccattaagaattattccatacatatattatatatagggaaatttacatggtatactaatttttgtcatttttttacaaaaa

SEQ ID NO: 25632 - DNA, 2153 bp, Cannabis sativa
  modified_base (550)..(555): a, c, t, g, unknown or other
tgaggactttctctccaataaatttaagtaagaaaatatatatatatctacatatatctctatgtatttggtaattaagaggaaattttattgctgaacaaagaataatatgtaagtattagtttaggcttgctaacaagttaacaacccaaccaatcttcacctatttgactaattctctgaaggcatgcaaaacattgtaaattctggtatgcacatcatatctaattttacagccaaaatcttagtaaaaaatctaataagtttctcacctatatatatgtataatgtatgtggtcttcaaatagttcatttaaaaaaaatataaaatccttttttattgggtgatcatgatacttcccaaaaatcaaacaagttttctcaatgcaaaattcaaatttctctaacagtggtctttagtctttcatctacccatgatttgcaaacaaaagtataaatctgtatttaattgaaaatgctaatcttgttccaaatctcagaagtccaacgaaaactacgaaaactattttaagaatatatatatatatannnnnntatataaatatataaatattaattgagcaaaatattaggcattagtggtgcctagcacctcttaacatccctaaaaattatatattaaactttatgagatcggatatttaattgaacaaatacacataaaaaagtactaggcattggttgtacattttagctagcatttctcatatattaattatatatttaactactttttcttttagttataaaaaaaaaagacttgtacctaattacttaacttattttatggcatgcttatttaatgaacttaaagaaagccaacatcccaaggtacgcatacgtacccatgcattttttgtgacgaaaaaagaaagaagaaaccccactaataatacacatatattaatatttgttaatctagctatatttaattaatattaattattgatttaatgaatagtttctagtatttgcatgttcggattcccgagtctgtccttcccatatcttaaattttcaaccaggagaagcgttcatggctcgaaatattggcaatttgattccaacatttgataatgtacgtaattaatttactaatcattaattgcaattaagtaatcaaatttttaaatatcaattattaatttttgttattatttgattactctgtagttgaaagactctggagttggatcaattattgaatatgcagtcgaaaggcttaagatagaaaatattttagtgattggacacagtcgttgtggtggcgtgaaaagacttatgtctcatccagaagatggttcacctcctttgtaagaataagttataattttttttattataataaatttaataatattatgtgatgtaaattcttctcactcattaaattaatttaattaacatacattaaatctacagtaattttattgatgattggatgaacattgctcaaactgccaaaaataaagtgaaaactgagcacaaaaatttgtcatttgaggagcaatgtgaaatttgtgctgaggtaattaataaaattaaatcttgataataattaatcaatgtattatctatacaagtatatattattacattataaacattcttgattatatcagtctaatatatcattgttgaataaatatttgaatatacaggaagcagtgaatgtgtctctaaacaatctctattcttatccatttgttctaaagggagttgaagacaaaaagatagcacttagaggtggatactataatttcgtggttggaactttcaaactatgggatctttagttatcaattaataactaaggaactaattcaagcttcctacactctttcacaatatttgttgtctttttaagttacttaatttttatagtgaatgatataatataatataaaatatgttgtgtaattgtcataaaattataaattttagctctaaataaactacaacaaatgaaagtttacatttatttcatgtgttagaaagataaatgatgagatagatacgattgaaatttaagagttcattattttttatgcagtattatgtttgtgtaataaccaaccaacaagttattataaaaaagggtaatttgtggcataatctccttaagtggccag

SEQ ID NO: 25633 - DNA, 5074 bp, Cannabis sativa
actccaacttcagaagcacctggcataggggatgatttgtgagaactcttatggcatgggcttggaagtacggtctcagcttgcgcgatgcggttattaagcaaaaggtagcttctcaatcataggatatctggactctgcacccaacagtctttttctcacataatacaccggatactgaactttatcttcctctcgcacgaatgcggcactaatagcatgatcggacactgccaagtacaagaacaaatcttccccctccacaagctttgataaaataagagccttagttaaatgcccctttaacttttgaaaagcaacttgacactcttcagtccacacaaactttttgttgcctcgtaacacattgaaaaatagaatacatttctcagtagattttgaaatgaattgactaagagcagcaatatgcccagtgacgctctggacatctttatgctttttggaggagactatatagcctaggaattttttggaggagaccctgaaagtgcactttttgggatttagcttcatatcgtactttcttatcactaaaaaggcctctttcaggtctcgtccatgctcttcaaaggttttggactttaataacatgtcgtccacatatacctccatgttcctctccaactgtcctttaaacatcgattcaccatttgttgatacgtggcctccacattcttgagtctaaacgaaatcaccttgtagcaataaatacccttatcagtctggaaattggtatgttcctcatctgtagtatgcattttgatctgatcgatttgcgagagcgggaaatggtcttttaggcaggccttgtttaggtctataaattctacgagcatcatccacgtgcccttggatttttggaccaataccaaatttgcaagccaaattggatacaatgataccctgaggaaatcattagtggtcaacttattaacttctgccgatactgcgttgtctctaacagggtccagaggtcttctcttttgtcaaaatggggtctcatctttgcaaatattcacaacatgaaaaatggtatttcgatcaatcccgatcatgtcagaatagctccaggccagcacatcatgatctttcttgatcgtattaataacatcctctcttatgacaggaggtagattctttcccactctgatagtcatggtgggatcttcatcactgatattaacttcttctacctcctccattggttaaaaatttctttcaattccaagtcttggaactaactcatccacacactcttccaaaacatcttctgtgtccatcgggtcctctaccccagaagctacaggtatttctttccaaaccataaacataatctgagttgacacattatagtagttcctcgcactttcctgatcacctttgattgtcccgatgcatcaattgtcacatgagaacttcatacacaaatgctgaatggaagtcaccgcaacaaagtctactagggtcgaccagcctaatgtggcattataagcagttggatagcccaccactatgaaggttgagtgttcaaacacacttgcttcattgtccccgttaagggtgattggcagttggactttacccatgggaactagggcatcaccattgaaaccttacagttggatgggacatggagttagatccacctcagtgagtccaatcgcctggaatgcgagtttggacaaaatgttaatggaacttccattgtccaccaaaactctataaccccatttattagcgatctgtgcatcaatcagcaagggatcattgtgagggaagcgcacattcttggcatcatcttctatgaaaatgatcggtagattcatcattctaggacgctgcgtgggagattgtaccaacgcgtatacttctccttcttccacttcccttaggaatctcttttccgcattacgagtacttctggtgagatgcgatccacctaaaattgttgcaacatatccatacacaggtggtagagcgagcccatgaggatatggagttcctcgtcctagagcaagcaaagccaccccagctggagctggcgaagtaagaagagcaggtactgatattccaggagcttgagggcatcctaccacttacgaggaattttttgcgccctactgtcttggaagtatcatctgtccctggactactccccatactggatagataatcgggatgaagagccagtgccctagatttcttgctcggaccaacatttcattctcatcatttaaatactcacattcattagtgggatgacccttctgtccatggtattcacattgcttattctggtctcgcatgttcctcccgcaatgcaacatatgcgggggcttttaataatgtaccatgttgcgtgttgccttataaatattctcctgagtatctattagacttgtgtactcggtgtacttcgaatcgtacttctttctcgcctacgttactaaattgttacggctgtgattcttacccatatcttgccccgtgaatgccccacactagaattggggacctcggctttagattgttcgagagccacactacacttcgtctgtaccgccacgtactcgaagaaatgggtctacatagggatgagactggatgcagtaggcccatagacagtttgggtatactatggtcttgaaagggacatagatgaagcaggagtctgggatgcaaaactaggagcgactgtggtttgagttggtgcaagagggactccgaaggcctgaatataagcatcctcaaggttaattataccttgtgcttagccataaactcacttaacattttggcccttttcctttgcatttctccttagagtagggagcctacaacaagtccgaattggagggccatcaatttcaagtcgtcactaaatttagttttagtagctgcctccaccattctctaaatgaaaaggcttcagacttttgttaggttgtttcttgacattggtaagtgaaccaacttccatgtctttttctcgagcgttgatgaattgcttacacaaagcctattgtagatccttccaactatcaattaatcctgaagccaaccgcttccaccaatcctcaacggacttagttaggatcagagaaaagcacaaacacttggcatcatcgatgacgcgggaaacttgtatcatcttgttgtatttggacaagtgtgttcatggatcagatctcccttcatataattcgatgtggggtatcttaaaattttctaagagcggagtttccgtgatccttcgaatgcagagttctgattcctcatcttcttagtgtgatagtggtccactttatttcttgaccaacttggtcaatgtagcaattttttcttccaatctttttgtatcactttctggaatatcacgtccactcatcttgtcgctcaaatgattcctgaggtcacccccgcatggccttgccttctcacgtttgtacctctgtacttagcgtccaattgttgccgcaaatctgtagtgtgccaactgtctccaaagtgactgttaggagtcctcccgtcctggttaatggaatcactaggaggatttacccgtctcctaagcctaggggcctttgtatttggtcccttcgacacggtttttcctcgagggtcagaagggtgtcgatgctcaaaagcactgatggccttctgcgtcatcgagggttgtcaacctagggatgcacctttatgtggaggcttaggagtaggttttcgtgggggttcatcaaccttgcctttacccttgtctttgtgagggtttgaggtttcagcttcagtttgcttacgggttttcccatcactcatggcttccaccgatggttccccatccgtcctagctaagtcattgaactttctttgaagttgctccatcattcctttcatctgagcggtaagctcttgttgctctactaacgctacctatctagcttccaattctttagttacccgtaccagactaggttcatgttcatattagcaaccatctttgtaatacccatccttgtagtagtaatcatcatcgtcttctcttcttcttcatcttctggattttggctatcaccgaggtcttttgcaacattctcggtattccctccttggttcttagtaggagttgcaccttctctatcattttccacctcagtgtcggctccatgatagtcgacttcctcaataaccatatccaagaggactttcttgctagagccttttcgattatacaccatggttgaaacgcgatgaagattacgagaatttccttagttctcaatgaaaacaccaaaatatttatcgagatttttgaaaaccaattatatttagagtaagaaaataagagataataaacaataaacaaacaagttttttacgtggtttaggcattaatgatccttagtccatgagtcaatactattagcctatttgggcaagtgtttaggtattacaagtgtttacaataagagtttctctattcctcttgtttctctcgggcaaaagctctctaggaattttagcagagtgtttgtaagtgaaaactgttcaccctttgctcagaaaataagagtatttataagtacacatagggtaaagggcctaccctttacctatctagggtttcgtaccccacacgctgctaaggcccatactgctcaaggacgatctgactattggctggtgagaaccttctttatcatgtggcgtacagctgtagtgagggttttcgtacaaaccaggacacacgtcatggacaagtctctccaaactagatatcatgctctgattctataggctaagagcctctatctcagatatagtctagtctctcgctaggagggcaacctccaaggtcttcacctgctcttaaagagcacttgaggatccctgggagttatcacgagaaacgctcagcttcatcaagacctgaaagcaatacaaggtcaaatttagtatcaaagcactacacgggccagctaacccttccccgaagctgctatggctggctagctgctcaaagacacatcactggccggccaaccccatgcaacat

SEQ ID NO: 25634 - DNA, 1812 bp, Cannabis sativa
tagctagtgtgacgtctcgggaaatcggggcgttacactatggctaacctggccaagcatacccagtgtgttttattgttatcgaaactatatttcatgctctttggggttgtgagcgtctatacctaatttattttaggctccctttgtctttgagtttcctgggactaacttttatttctttatttatgagtgtattctctagcttaagaaggaggagtttaaagattttgttatccgcctttggcggatgttgtaaagtaggaatcattgggttcacgatcaatgcctcctcaataaggagatggtctttggatttctatcaaagatttactgatgctaatggtagtaaatccaaatacccctaatcatgtacttctattccaatggatccatcttttacagtcatggaattcgaacacaccttgggggtgcttcctctagttggttcataaaacataatgtcgatgcgagtatttctctttggatcgtcatgttggatgtagagccgtggttcgagatcatactggtgttgttattgcgtcaatgacatcgccttttaatgcttacttatttgctcttgtggcagaggcgatggctgttttccaaggacttctcttgtgttctcggctgggtcttgcaaatgttgagggggaatctgattgccaacgtgtgtgtttggctttgactaataagactccccttcgagaggaatttgggtctgttattcataataatatttatgtcatttcttttcagcgttattttacctccactaataccctagcacacaatcttgctcattttgctctttctttagattgtgctaaggtgagcctataagtagggtggatgccccacctgaaatatgacttggttctaagtaatttgggatttatgtctaaataactttttttgggcatttatacaaatactagtctagtcgaaaattattaaataatattgtttgatgtagtggtaaaatatttttgaagttaaagtaagttaaaagttcaaacctccatacatacactatttttttttttttttgtataattgtgaggatttaaattggaaattaataaaaaatgattatattaaaatttattttaacataattgtgtactattttatattttattatagctaattttataatttttattaaaatgtttgagtccatgtaatataaaaatgatcattattattaaactcaatgatgtttaatattactatttgaggtagtgtcctataaatagttattgattttttctatttattattaaaagtaaaataagtcgaatccaatattaaattacacgaatgatacttcattataaaagtgtcagacactctagtactctttagcattttattataaaaatagataattgtcttacttaaattttatttttggctttgttcttgctggttaattcttcctattattattatgagcattgctattaggtatcagtggtgtttagcgcattcttgacatgtcgcgttgtgattgactagcgatactccctaaaaactattgtattaaattatatggactcgatacttaattggaccaatagcgatattgacatataagaaggtgctaggcaccattggtgccctttaccatttctctattattattattattattattattattaggaagccgattctccctgattgtttttgagtttgtactctgttattggctattgccgttgaatgaaaaatttcatttcccttaaaaaaggattaaaaaaaaaggctaattaggatttttgctccttgaactttgacatgtaccaa

SEQ ID NO: 25635 - DNA, 2136 bp, Cannabis sativa
  modified_base (187)..(188): a, c, t, g, unknown or other
attgtttatgtactaaaccatgcttcccagactttgatatctaacaagtcatgtccctcgaactttgacatgtactaaattatgccgctaaactctcatccatattacacttttttactaaaattggaaaaaagtccttatatccaacaatctcaatagttcaggggcattttcaacgaccttaaannttcagggggcatgatttggtatacatcaaagttcaaggagcaaaaatctgaattagcctaaatataataatatagtaaagtatataattattaaaaaatacgtaattatgagtttataatgacaataaatttcaataaaagtcattaacgtacttgtgtatcaaaagttaatctatatttaaatattcaaacgacctataattaagtgaataaaaaatataaaaactataaaagtggaaagaattggaaaagaaaatgtatattaataaaattataaattgtaaataaaatttaaattaaataaaatattgtttatagatgtccaaatcacaccatattaattatcaccattaatgcttgattgtattttcctttatttcattaatttagtttctcattcctttagtgaatacttttgtataaatagaggttcatcccattaaaataaaaaactgagaaattatcattgactttctctttatctgttcatcttgtttttcttatatattttatattattttataatacgttatcagtacgagtctttgtccaagcttcaaggtaaatattttgttgaagttcttgagttgtttcaaggttatgatacactaaatatatatttatatatatacttatctgactgaaataatttaaagaacacttttttttctttttctttttttctttttatattacatattcatgtatatgtttttatgtgtttattattgaattcatatacatatacatatttgtatctcttatgatttatctatgatatgatagtgaaagtttatatcataattgcaaactagggtaatttttccttttgaggtcgacgatgcatgtcttgtgacgattgcggttcttatttacaaagagttcttcaaagctcatttgaatgctaacttctgactcgtcagggttgtaagcctcactgacgttaacgtgatgaagttacaggatgccttctcatagcgagacaggaatctctcttacttggtctcgagccgatccgactgttacacttagtttgtacattattcactaaggactttcacagttgatatgtgtcgctttcgtcttcctatgtgtactgtccttaatgcctcgctatttgcattcagtgacatatagtttctcgctaatatacaaagcaccagtttgtatattgattcctcgcctaagaccttacaatcagtaggttacaaatatactttgatgcttacgtaattaatgagttattccataaaaagcgattgcatcgatccatatttcctttatcttgacacgtgacctccactgagatggcagccgaatttcgggtataacaaaatcatatttataccttaattgacgttgagattcaacgtttttttgctaaaatcggtggtcggagttataccaccaccttttttgtaataggttgtgtttgatagatagagggataaaaccaaacttttttacagtataggtttaggtattgaaaataaaagattttaagacaaaaatggggcaaaatggtgaagaaatgagggagattaagactattttagtggttgttggcgaggtttttttttttttttttttttttgtggatttggggctactatgggtggctattcttcgtggtgaagaagatggtgaaataggaagacgaagcataagggttctaatacataaccctatggcgtcggttatttggtattaactgacgccataggtgccacatgtcgactaaagactgcacctatggcgtcgattaataccaaataaccgacgccatagggttaataaaaaacccttaattttaccccaacccccaaccgacggcatagatataattaaattttatacctacgatttttacaaaaaaaaaaaaaaaaaacgcctctaaatgtcaattccaaaccaggcggggatttttacaccttttacttttcttttt

SEQ ID NO: 25636 - DNA, 1303 bp, Cannabis sativa
tttttttttgtatatgtaactactataagaaatttccctagaaaaaataaaaaactataataattagaactatgttcacatttgaaaaataatataaaaagtgatcaatttgtttaagagtttaattagagggagggaatcttgcttaaacacactttttttatttaattttttattttgagagaattaacacaatattttttaggttagaaaaagtattagatttgagaatgaaaacatggcagagattgtctcctattgcaatgttttcttttatttattattatttatgttgtgcaaagtataaaatgagaaatattgatttttttttttctacaaaaagaaatatattattatatcataatgtattttctgtgtttttattttaatttaaattttcttaaataaatattgatgtgataaaagtagtttcttattaactatacaaaaatttcttgtaattattttttaatattttctcaaatattccttttggcttttcatgcaaaccaaaagtgcatatgagttttatattatataactaagaaatcattaaatattgataatgtttttttaatgaaaaatcagttgattttataattactctctctatagtacaaccgttcatcttaattttttttccttcttcatttcttattaatatttatttggtgaataaagcataaatatttaaaaggcttaattagtacactttgagcactattaagtaattacctttctttggattaataattatacattttctctataaattcaaataaataataaaagaaagtttggttcaaatgaaaaatgaaatctttagcaaaaagtttctttcttttatcaatattattactttaatagattgtaaaaaaaaaagtaatattttctttttgaacaaataataaaataaaagtgatattgtaagacaatctgtagctatgaagttaaaccatttaatttcaatttcaaatatgtgtaaccatcgcctctataataagtttttaaatttcgaatataagtacatgtatacggataactaattttgtattttataatatgatattaaattgtgttatatttttatttaatattatatttgatatatttataaattacatatgtatacctatatatacacataaaatatttcgatataaataaaaaaaaattaatattatataaaaatatgatacaacacaattaatatataggcttattagtaattttttcctgaattttgacatgtaccaaatcgtgcccctgaatttttttggctgttaaaaattctccccgaact

SEQ ID NO: 25637 - DNA, 3381 bp, Cannabis sativa
taaatctttttccatatatttatattttaataaaagaaaattgaaaaaccttgttacctttgctcttttgttttccgtttccttgtcaatcccaactacttgtctgctctaatttctatactaatttattctcatcttaaggtcaaccacaaccaaacaattcaataattttaatttatagtggtaaaacacgcgtacaaaatatccattcagacacataaaaatttaaaatttaatgggttgctttacattatttaattttttttactaattagtcttcctagtagtaccgaaattttcaatttttgtataagtaccttatattaaatgtattttttttttaatatgtatggtaagattgataaaattacatttcgaaatcaattgacaatagaaggaataattcataaattttatatataatattctgtttacacatattagcattgtacgactaattttaatagactatacttacgttgagcctaagaaatatgggtataatgaacaactttgaagagatcacaggttcgaaattgacatttaaaacagtcccacaagatgaaatcaagaaatttgtgggtgtacatgttgggaaattttagattttttaaaacaggccaaagacccctacctgaaatcgacacacattggtcgaaaggtcccaaatagagatgaaaggcagagaccgcaaaagtttttttttactctgacaccgtgttagatttaggattgtatggtaaggtgcatgttgttccatctcaaaaccaattgacaatgagaagaacagcccatgaatattatatatagtacttgtattataacaagtattaagcaccaaggtatttgtgcaaatagctatgatccctatgataacaaaattatcaaaataaagaattggcaattatacctcaaaatatataaaagaacttgttttttagttattcgtatgctataattggagattatcagcaacaaacattgaataagacagtatgggatggttcacaagtgtctaaatatgtaatacataagggcttattcgatgtaattgtaccatgtaattttttaaaagttgttgtatattatatgcatgttctgatccgcaaggaacatgattggaaattgtttgtttgtttttctccgaggaaaaggcaaaatataattaacttgaattcgacacaattattcaaaatcttagtgaaagactaaatttttgatagtctcaggttgatagtttctatggagcgtatgcctcccaatggtaacggaggcatccaaaggtttcctcgggacagactctttacacatattgataatgtggaactatttctaatacatatttctcactttctttaacatataatgtagctatataacctaaaaatattttttatgtttttctactattaacattacacttcaaatttaaacccattgcagatatctaaaaactatatttctattatcacttttcttaccctatctacatatctaagaaaaaatatctttatgtcattattttctttttaaacaataaatcaatattatattaaatatggctatataacatagaatatattttttaaaacattacaatttaaatttatactcactacacatatttctcttgtcttttatgttattttaaatatatctatataacaaaaagttttttattcctttttaatattgcaattcaaatttaaacccattgcacatatctaaatttattatcatttttttatccaatccatatatctagaaaatatttttcattgttgttttctttttaaacagtaaaatagaaaaggtatttatatttcttaaataattactattgtgatgtcgttaactattgtagttactaaaaaaatatttttgcttataaaattaaaaataatatggtcaaactaaaattataattaaccacactttgtgaatattattataatttctttttataagcaacatttaaattaaatatttattattaaaaaataatattgttaatttaataacatacaaaaaaaaaatatacaactaaaaatataggtaataaaaaaaaatattaagaatataactaagtataattgcacgtaatattacttttgtatatatagagtaatttgtgacataaatacttaagtttaactttcgattgcaaataaatatttaagtttaattttttgcggtaataatacctaaattataattcttaaattgaagaaggtaccaaactgttaagtgtcatgtaaattaccacctactaataatttctaattagtccaagtaattaaatttttatttcttatttaaaaaatcattttaatatactaagaattaactcatatactgttttttttaatttttttttttcaaatgtacggtttgggtttctaatctaatgatttctatgtaggttattatacgattttttgttgcgatttaggttgcagcgctagttgcaataggggtttctatttaaaatactgtaaaattataaaagaaaaatattttcaagtgttaaaatgaaaaaacctctaaaaaataccacatgtataataagatgatatttatcagtcaattacttataaaagttacataaatataatataaatattattaccattaaaaattaagtttatttatttaattatttgttattaaaaattaaactcacctcaaattaatctatatatataaatagaaacatgttcatttatttttctaactagatgaactagtgattggataattgaataattattatagagatctaattaaaagataaaaaatctcaagtcagaaccacatgcccgctactaattatagccaaaattaattaatataaaatctaaagctgaagaagatgtgatgtgatttattctttgtagtgattactagaaaaaagcttcgtgtgatttgcttacagtcataagtcagtagggttatatatataatattcaaccatttaaaataagtcaactgacataatttttggggtacaatatgaaaggcaatcaacttttagaagcaaattgaatggctcaaattgagaggttttgacttaggttacgttcaccaattggtttttgctaaggatcatgacgacaacattttcttttttctcctttaaaactcttgtaccaaataaactgaatattaattgttaattagaatcttttattataatatattttacttgatttttataattaaaatcacatacggtaataatatttttagaatttttttaataagagtatttgttatagctataatattatatctatataaatttttaaaaagttttaaataatttataatatcgaaaatagatttccagtatactatatgttatattttaccaggatctag

SEQ ID NO: 25638 - DNA, 4479 bp, Cannabis sativa
tcaagaatcaatagctggaggtatttcgatccttaagttttatagtgtatatatttgtttattccacatattatatacacatacatatgtttcagtttatacttataaatgtctaacaataacaagttttaaacactttgtttcttgacattttgatgttaataatcattatataatcaaccatttacaatgtcatttaaaagttatagcctaattagaaatttctccctccgaactttcacatgtaccaaatcatgcttcctgaattttttttgccgttaaaaattctccccaaactattgagattgttagatttaaggatttttgtctaatttcattcaattttattatttcaatgattgtttatgtactaaaccatgctcctcagactttgatatctatcaaatcatgttcctcaaactttgatacatactaaatcatgccccctgaactttcatccatgttagaatctttttactaaaatttgacaaaagtccttaaatcgaacaatcttaatagttcaagtggaatttttaacgaccaaaaaaattcagaaagcatgatttggtatatgtcaaaattcgagaaaaaaaattactaattagccaaagttatattaataataggaaaaaataataatgagggtccgaactacttcgaacacatgcacatggtaagatgaaaaccggtagcaaaagagaggggctagaagagtacacaagtacttgacccaacaaccaatacagaaacaattcaaactactacactacacaacatttaccaagaggtacccacaaaagttaatcattttgctcctgtgacgtggataataatagtaataataatagagaattctttagatgagaacattatttttgctcacttatgaaagtatttttttttttattttaattagttaaataataaaagtgcgcgcatgcaattaaaataagttagtgcacatataaacaaatataaaattagttatattagaattttaaaatttttattttttaatcaaaattatagaaatgagtaatgacttttgaaagtgtgtttggtaattgaattttattttccatttttctaattttaaattaaaattggaaatataattttgatgcttttaaaatttttaaaaacacatttttcctatcccttgctttatttttattttattttattttatttcacttttatttttacttttagtttttaagtggattgtacacttagttcgatgctttaggtgtttttagagcataatttagagttttgaatgtgatttggaggtttgaagtttttgctaaatttttgattgaattttgctatatcaaaattgggcatgaataaaagacttttgttgttgatttggagaagttcacctgttgtagtaattttctagtaaaattttagcataagtagtacaagttaaaggagcaatcaacaatatttttgctggatttttgcaaaaatattgctacaacatgcgtaagttaggattctttacgagctgtaaagaaatttttagaaaaaaaaaagtcaaaacataatttttcaaataatatcctggtggattgccgaatgttctgtgcttgcttccgaagctctccatgcgcttaacaagatcaaaggccgcaagggattcatggcgataaagactgatatgcataaggcctacgatagacttgaatgggaattcttgatgagagtgctcaaggctaacggattcaatgacaaattttgcaaaatgatcatccagtgtgtgtcgacggtttctttctcaattcttctgaacggagcacccctcaaaccgttttatccggggagaggcctaaggcagggggatcccctttcgccttacctcttcatattgtgcagtgaagtgctctcgaaattgatgattcgatctgaagccagaagacaactttcgggaatcaaaattggtaaagactctcaacctatatctcatttgttttatgctgacgatgtaatatttttctgtcgagcaaacatggaggagtctgaacatttgaaaacctgctttgaaacatacgagagatggtctggacaacagataaacagacggaaaagtgggattgtgttttctcccaaagttaaggaggatgagaaagaactggtgcatggaattctaaacattcagcagcttgataggaaagaaaaatatttggggaaccctttcttttactcagctaagaaaagggaagactttaatttcttgaaagagaagatcctggctcgtttagaaggttggaaagcaaagcaattatctacagcagggagacatactcttatcagttcggttttacaaagtattccttgctacactatgtctaccattaaaataccagtttctatttgctctgagttggatagcatattggctagattctggtggaaggggtcttctcagcagggggaacgttatcatgcttggaagagttgggcagattgctgtcaacccaaacgaaatggaggacttggctttcggaagttcaaagatgtaaacatggcgctcttggcaaaaatggcctggtacttactggaaggggagaatagcagtaaggcttgggtcaatattttgacaacaaaatattgtaaggttcaagatttctggagtgtagaagcaaatcaaaatgactccaaagtttggcgaggaattctgatgaatcgggacctgtgtgtaaagaacactgggtttttagtgggagatggcaagattgacatttggacaaaaccgtgggtgccaaggtatagcccggaggaggttcgacaggcattttcttacaatgttacacacgctttcacctcagttgcagaccttttcatcccgggcacacagagctggaatgtgcaactaataaggcagtgcttctcctccgaagttgcagaagccattctgaaaattcgacccatgtatggaagcagggatacaatgttttggcaaggaagtaccaacggaagattctcggtgaaaagtgcgtactggggtgctcaaaaccacagatttcaacctgaaaagaaagtttggaaagatctttggaaacttaaaatccatgctaggcagaaaatgcttctttggagaattttaaatggctgccttcctctaaagaacaggctgggttatgtccaggagagtgataaggctcgtgttttttgtgggcttcaaactgagaacgatgtacatctcttcagggactgccactttgcccgttgtttatggtttaccagtccgtggggggtgctcaatggcaatctgtgtacgctgaattttgaagaatggttcatgtggatgctggagtctaagatcgaagaactaattttgtttggtgcctgtgtcatagaacatatctggcaatgcaggaacaaccttatattcaagggatgcaatccgaacctggatcaatcaatcaaactgctaaaacaaaggttcaaggagttcagcctggtgttactacagcattcttactctgctgtgagcaacacctctaccttggactctcaggtttgttgggatgtgcggctgcgtgttgatgcttcagttcaggaaggcagagcagggctttgtgctgttcaaattcagaatgtgcaggaggagggtttcgtgatcctgcagcatattgctgttgacagtgtgctggaagctgagtttttggcaattgtggaggctctgaagtgggcagtcgatcagaaagccaacactgtgcaggtgaaatcggattctcaaatagcagtcaaagctctagagacaaaagctttgccgtttgcctggggttcgtatccagcttttgttgaatgttgtaacttggtcaagttatttgatgtttgtgttgtttcgtttatccctcaggttgacaactctgtagcggattctcttgctcgctattccagagtgtctagtgtaaactcgagatgtttgttaagggagatagccccctttgtggctattgaactttgagtttttctctttgtttcgaataaaaacttttacttatcaaaaaaaaaaaataataataatatcctaaccaaaacaatctcaaattccctaaatttctttttctcagaacaccctactttctcaccttcttccttttctgtcctaaccaccatagtcaccttgtctctacctttcccttgccagaaccacgaccaccctgaccaccatctacttctccacctctattcgctagaaactccattatcagacgccaaacacatttctcctctcttctttccccaccatcatcaacaaacccagaatatgacttgggcctaaaaaactctctgcccaccttcactctcatcttatcatcatcctcaacttctcttcacttgaaccatagcctcatcaccatcttcgcatgaacctagttgtaggggctgccaggataggctgcatgcaacagtcatgatttccaatcttctaaaattcatatcttcttcgtttttcatcagaat

SEQ ID NO: 25639 - DNA, 1197 bp, Cannabis sativa
aataataataaaagggtttgttcttggggaagagtggatttgtgaacagggagttgtcgacgagatcaaggtggaatagactgacttgtcgccgagaaatcagaggtcgactagcaaagctcagacagctttttcttttctatgacttattaatatttatgtcaaactctacaacccgacatcacatactctcttctcttttactttattatttatatatatattaatagtgaaatgattacaaagatgttaaatttgtgaaagtgattaagtatttgtttagtttaaacaaaaaatatttaagttttaattaattttacattattgagggatgtactatatagtatagtgtgttatgctgaacacagacaagattcccaccgcatttcttttgtttaatattattattattaataagtaaattattattttgtcaaattctatccaaatttacataagattcctctcaaattcgcatttcgcacagtgaaattgatggtgtcaactgtccaatgtccatcttacttgttcctcatttgttctcttttcattcgcctctcaacaataataaaaagtatttttattttggagtgtagtcttataaaaaaaaattattagatacaatgactatagagaactaacatcatgtttcttcttggtgtaattccgatataattagcattacaattttattattttgttttaattttacaaattaaaattataagatgttttgtatatttttacattttttttttgaaaccataataccattcttctattttattttatttttttgattaagaggcctagtaccagccaaaggaagcaaacaaagagcgcaacacacaaacagagaacaaagaagctacaaacaagcagcaaacagagagaaactaaaacgaacttgcctgcaggaacaagcagtaaaccaaactaacaactaaactagctaaactaaacttaaaaccaaattaaaatagataagtaaccgaatcagccatccaccaagggagaaggtgggaaaccgaaaaaattgggtgcctcaaaactcccaaatagttgagagtgcagggccctttgagccgcattgtgggctacacgattgtgatttctggggatccaactgatctcccacaggtcaaacttagtaaataactcattgaacttggaggcaatgtctttgatgttgtagtg

SEQ ID NO: 25640 - DNA, 4895 bp, Cannabis sativa
  modified_base (1816)..(1820): a, c, t, g, unknown or other
  modified_base (3842)..(3842): a, c, t, g, unknown or other
gtaaacaaatgaaaaggagtgattaccatacctatcactcccaatcctgattagtaaacatgccataagaggagtagtttattcatcttatatatatatgataatttattttcacacattagccatattgtacaactaattcaaatacaagctcaagtattcttttccaactgggccgagtccctctccaagccccttatttattcctggactacaaaattgagttgaattgggcctatcatttgggagtcactaacagtccaaatatatgagatttactatattcgcatatttgatatacatatatactgtatacatgttatctgtataatatatattggataattggcaaaccattggctcctgtcaagctacctatagtgttgacataggataggaaatgctaaagcaaggaatatacgtttataaacatgctgtatgtacttttgttatcgcaaagtgcaaactaaacaaccgaaaagattttccgtaaaaaataaaagcctttgaagtgcctttgttgcttttaaagagaacagtcaagccttccagtgaaaagaaaatcactgtaggcaatgatgatttcatattagtgataatgaaaagagtacgaatagagagtacacacttacttgatggtggtgggtataggcaaactcgtagcactagggatctaattttgtttgcctaaattaattaaattattagcacgaacaagaggtgtggttgttgcaagtgattctcaaaattaaaatccaatatgaacagagaaacataatttatgttttgactttattatttttttctctctattcgtatacataaaaatgaagaacactattataagttatcctctatctaaatatatatttttatattgccagtacagctttcaaatccatgtctctctaccttcttttctgcaagtttatgtgatccactagtttattaaaacagattttatatagtggtacctagttttatacacactaagatatatattcaggtgtcaaactctgggccaaataaatctttatattgaagcacgtaagtttgcataaagtgatttgtccccagcatatatacataaaaataaaatgcatgccccgccaccatgattgattttcaacaagagcacttcgttgtcgtttttctatcatttaattattatctttttttttgcttcttttctttttgtggaaacttgttagggtggcctttggaatatcgaatagatcagctgacgtttgcaaacgaaaataggttatctactctcatcaattcgttcaggtgtttctttcttctttacttttaagcttatttttctttttcctcttctcttctctgtttctcacacataccagaggaatttggcacttattttcttctaatattgttttttttttcttttgctattaatatgtagtaacaaaattaaaatgtccttaaaaagcccggccgaccccaactatggttatgagtgggtggagaggaagtgacctagcaagtagaattattattactaattaatataattagtttttgtttcctaaattgatgagtggtaaggtaagtggtaacccatttccttattctttcatcataatttaaattttctccgatcttgattgtaaaagtttgatctcgttttcattttaaaataataaaacaaagattttactttactagctcacatactacttttggcaaatgggcttctgacattattcgaatatctctaacttttagtttgatataacaaactgagaatttggcttgttcatttcgtaaataagaatatatataaatatatatnnnnntatatatatatataaataatgcatgctagctaggaagagcgcagtaattgaatcgaatgtgagaaccactcaacttttcggcgaaataaagttttgagtggctcaccgttgagaagattatatatgacgaaacaactttaaggttttattgaaattaattctagtacatgtgcaatttgacgaattagtaacactatagtgtgggctgaattagtttgacttttcgtcgatggaaagagaaaaactataacttaattaaggttcgctttgtaaacgtcgacaaagaaccaaggttacgtgtcaaaacaaatggtccaaatacggtgagttctggatcgatctcaccattttatggaaaagtattctttagtgatatatatatatatatttacgtgtatatatatatatataaatatatatatttgttagtttgttaggtcggatattgcgatgccaatcgatgaaccaagctttagagtactctcactcaaaggggttcctatatgtattatcaccacaactctatatccgaacattacatatataatatatttatgaaaggaaacactcaagactataatataagttaacaaaacagagttactaatcaaagtcttcaattaggtagaggaaaataattacccgagcaaagttaaagttggcattatttctttgtgtcacttcaacttccattgatgagaccccaaatccaaatatctttgccatgaacaacagcaaaaagtcttcaaaattcaatcaacctctctataaaacacaaacatgtcacggttggaaattgacctggcctggctggccctttctcaatacttatttaagaaagttactacccctgaaacagaaccggttacaaggttcaaataatatctttattctttgcatttttaacctttaaaaatgtaaagatacttttcttaatcattggactgctatacgtaatgtcatcaagagcgagagctagctaccacacaattttcataattgatttatatatatataaataatatatatatatatatatatgagaattgttgttgaacactagtagtgttatgattgataagtgatacactctctaaaaattattttcttatattatatagaactaaacatatacgtaaatatattagtagcagtatgacatcgagcaaagtactaaaactagtggtatatttctttatatatcaaattgcttagcaactactctatataattggttaatggtctttataatatttatcaaaatactaaattggactaattgcaacattacaatgcacaaaaagtgctagacacactttgagtgtactttaaacatttgtgttatctttggcttatattgagtaatggctaacttttttgaatgtttattggtcttactttagtattaaaacaggaccaacacatgaactcaagtgttttcttttccaaggagttagctagctagctagaatgtagacattccttctatgctaaatgtacgataacatcttttaggattaacatatttccaacatgttaataaacatatattggctataattataagaagttacggtcgtaataataaaagagtaaaaattcaataaaacatgtagtaaaataagaaagattgatatgatcgactttgtcattaacacgagagcaaaaaatgctatataattaattatatatgtagtgttaagactttattttatgatgtcaaataatctctattagatttctatcttactaaatatggatttattttatttgagagttgtcatttttttgtattgagattttcttttattagtttttaatattatcgtgagaaattaatccacttctctttatcttttttgctttgtagatattttgtggaacattttgatatgttaatgagttggcgtgtagctttcactgttacaagtagaccagctttctggtgtgctgtttgatgacgttataatatatagctttcatgtctaaattttcaagggcagtttgtctcatgttgctcgnttacattagcagttcatggtttgataagcatgactttcggttaaacgatgagctatcctggttcgaggaggttcctgtgcagtttgcggatatctaaatcgtaaattcatgtgtgattcttaatcatcactacgtcaaaaaaaaaatataaatttacgacaacaaattcattcaagatgattagtgggaaaattttctctttaataattgttttgttaaaactattacaaaagctccattttatggccatcaaagttgaatatgaaaatttttccttggctattttttatgtctagcattgttagacatgaaaaatatgtagacgtgtccaaaaaaattaacttcgctggatgtaaatctttttttttttttgataaataataaattttcattgatttttcaactttatcatattcctcattacaatcataccagagcttctaagaaaaatagaataaaactcaaatagaaacataggcaaaaactcaaattttagacacaaagacccctgaaccaacttttgtttatgttattctattttttgttcacttgacgtggtatgcttacgtgaacaatatcgacaccacgtggagtttagctcaccaaggaggacaagtcaatacaacaggggtaccagcactcaaacgggacagcaagtgacagaccagtcacctcaagggtgctggccgaccctacactactagaaaaatccgtaagtccatacattgtactagataaatttttcaaagtccttttgtgttggacataatagcctgggacataaaaagagtatttttatagtccaacattgttagactagaaaaatatatctagtccaataatgttggactaaaaaaatatttctattccaacattgttgaactataaaaatatttctagatattggacttaaaaagcggttccacaacatgaaacttaattgttggactaaaaaaatatttttagtccaacaatgctagacttgaaaaacgatcccaagctaggaacccctttctagtcttggtaagttggacttggaacaagatttttttt

SEQ ID NO: 25641 - DNA, 2309 bp, Cannabis sativa
atatttttgtgattagaaaatttagaaacaaaaattttacccaatcgcctcaaaatattcatatgaatagaaatatagagcttagtaatgggctatatacatgggagattctcatatattattgtaggtttggaaaattttgggttggattggatcctctgcgatcaggtatggactgtgaattgaatactgcaacccaccagctgtcagtgagggtaagacaacatatgaaacatagaatgggccaacgtttctgccagttttacctgaaatatttttaatattaaccattatagcccccactctctgactatttgccttggaaaatatgtacggtgaattagtaattactatgtgtatataatgcgaaatattccacaagaccatgccctactttctagtcaaaaaaaagaaggggatggtaaataacaatcaatgtcatgtggtgtgtggtataattataatagtagtgtagtggtcatcatgatcatctgatgctccacacgagtgcccaggaattttgggtatggagaaaatgactgaaccaaaaggcaaaatacatgttcatatatatatatataccctttactgcattgcatgcatcattttctgtatcttttgtcaactataacatacacacgactgactgaccctactcgagattccaaaaagtattgactagtattaactgtaaatttctcacaagtcgttgctctgcggagggctatctactaaactaattgaattatgacaaataatcttccatttatttatcaaattttagtaataagataaattaaggggacacaataaattaatattttcataaagaatgttatttgataaagcaaaggaattagattttctaattagtattaagaataattatataaaatattattgagtaatttacggcaaaaatacttaagttttatcccgagtagtagataaatactcaagtcatattttggcggtaagaatacattccatcacacttctagaacttccgtaggtacctctctattttcttccaggtaagtgtctacgtgtcatctttttattagtccacatcattaatttttatttttcattttaaaattcattaaaacctatttaataatcatttaaaaataaaaaaatatatatttaaaatgtataaaaaaaataaaaataaaaataaattctgaaacctaaaaaattattctaaacctaaataattattttttttctcatttttttaaatggatttttcttttacttcttgttccactcttttctctttgaattaaaaaggaattccaacaactattcattgcctggtttcttgttcgaatctcctctacttgttccagatgcaataggagtgttgaaacaactattcattgcctggtttcttgttcgttcgttgcagcttgttggagatcagttggtttgtatggaggcagccctggtgatatatcttttgggagttggctacaagatcgttttaacaacttggatttgagggagaggcagatgggggctatgctttgctgggctatttggcaagataggaacaacaaggtgtggaatgggaaaaccaagtcggtcaaaaatgttattacttttgtaaatggtgatcttgaacaatggagttttgctcaagggaaaactttcactccctcttctttcttgattcatagtggagaaggggatgagcattggggtgggccagaggttaataaactcaagatcaatgtggatgcgacaacatttgcgggtcgaaataaatttgggtacggttgggtttgtcgcgattctgggggccacgtcttgcaagcgagaacggggtcttgggatggttgtgttaatccggctcttgctgaggctcttggtgtgaaagaggtactaagctggataaaggagtcaaagctttctcatgtcactgtggaatcggatagcctcataacagttcaagctttccggagctcggtgaatactaattctcctttcggttgttgcattgcagaatgcaagagaataatttcagatttgaatcatgtttgtttacgttttgttaaacgttctgctaaccgtgtggctcatggtcttgcccgagtctcatgtttatatgctgagcgtagttattctgtggacactgttccgaataacattagtgatgtaattgcgcaagaattgttttaaataaagttatcagcttttattaaaaaaaaaaatgaattccaacataaattaaattcagattttgaaacaaaactaaaatcaaaagtctgaagcaaacttaaattttgaacaaacaaaataaaaaa

SEQ ID NO: 25642 - DNA, 1710 bp, Cannabis sativa
ttgttaaatgacaattcaaaccttttttttaaaaaaataatacaaaataaactttgaactcaattttttgttaattttttttaatataaccaacttgaaattagtttttagtacaagcatatgtaaaaaatgtaacaattcttgtcataatactttcaagtcaggttattattaagttctaattttcgtattaagctgagaatctattttgtaccatttaaaaaaatacaggttctgaattgttatttaacaaaacaaaaggtctaatcaataattttagcaaaacacagagtttgcaattgtatttattcatttatttaatctatttgtattcttgtgttgtgtttcctaaaaagaaaaggaaatggtctatcaacagaaaagaagagaagaacaaaccaagtaaaggagtgtgtcattcttatctttatgatttttttcatgttattttagggatggaaaatttcatgcaaatgctgcaaatgggaaaggactagttgggggaaagttccatcttgattatccaagtgttggagcaaccgaaactcttttaatggcggcgtgtttagccgatggagtcaccgtactttcaaatgctgcaaaggtagtaaactactaacataacatgttctgattctgattctgattctgattctgattcataacatgtttaaactaaattatgaaaacacaaaagtaactcgagtttcaccacaggaacccgaagtggttgctcttgctcgttttctaagcaatgccggggcttgtatcgaaggagctggaactaacaagattgttatcaaaggaaaatcttgcttacatggttctgaatacaaaatctcccctgatcgtattgaaacaggctcgtttatgctcgctgctgctataactcgctcgcgaatctctctttcccctgtcattccttccgatctgtcatgtttgatcgaaaaattacggggtgctggctgtacaatcagacaattgtcacatgatagtttggaagtatgtttaagttttttctagtgaaaatgtttgctctcattttggtaaccggtaaccagttttcttcttggttcaggtttcggctttgtctacagatggtaccaacttgagagggtttgacattaagacaggtccatttcctgcatttcctactgatcttcaacctcaaacaatggcattgctcactacttgtgatggatttagtcttgtagaggaatgtgttttcgaaaatcgaatgagtcatggtattagtactataaagttcttcactcataacaagttttttatttgaaaaaaaaaaattcttgaatgtactttcaagtgtcttaaacaaagtctttgatttgtgctagcaaatgagctggtcaagcttggagcaaggattcaagtttgtggaagcactgctttggtttctggaaaagataaaaggtaaccaatatatggttgtatattgtttcgattgttgttataagacaccttaaggtatccaacactacatgttgaatacataaaatattactttatgtttagggtcggccctgaattttaataataatttagatctttaaaaggtaaatttttttacacccgacattaagttcgaccacactgatgttggacactttaaggtgtcttgtagcattaatcgttttcattgagattgagtaagacatttaggggtcgtttggtgtatggggtagagtatta

SEQ ID NO: 25643 - DNA, 5428 bp, Cannabis sativa
agctgtagcatctactagctggtccatcctaggaagcaggaagcagtcatttggacatgctttattcaggtcggtgaaatctatgtacaccctccacttgttgtttggtttgggtaccaacacgggattggatacttaaagtggatagaatggttcagtgatgaagtccttggcgctcaacctcttgacttcatctttcaaagcttgggcacgctcattatccaacaacctccttttttgttgtacaggttggaagttttgatctatgtttagtgcatgggtcatcacggaagggtctttccccaccatgtctccatgtgaccgtgaaaagaggttaaggtttgcccttagaaattttatcaaaattgattttatttctggcgctaaacctttcccaatctttaattttctagtaggaagagtgggatcaacatccaattctttcagttcttccacaggtccaaagctgtttgcaagatccccaaagcgaggatctatgtctgcttccctgctttgggctggacttaattgccctttgtcggactctttgtcagagctcttagcgggcgttttctctcttttttggctttagacaaagccaggttgtagtagtgttgggcacactgttggtatcccttaacacatcctatcccatgccttattgggaactttaggcataggtggtaggtagatgttaccgcctttaggtcgtatagggcctgttgacctatcatcgcattgaaggtcgatggcacgtcgattactacaaattgtgccatcaatgttcttgttgtggggttctctccgattgtcaagggcagcttgatgtatcccatgcgtgcaatgccttagccaaagaagtcgtacattacttgggtgcaaggtgctaggtctattagttagagccccatctttacataggttgatctaaaaagaatgttagaggaggctccgttatccaccatgcacctggaaagtgtcatgttcttgatctgtgctgtaatgactaggggatcattgtgtggaaagttgacctgagtaacatctccctctataaagaagatggctaactctctaagcttgagctgcttagtgcctctttctttgatgactaggatgttgcttttaggctcgtgacggagagtccgagcatagcgcgccctagccttgcttgtctccctagtaatatgggctctgccaattatgatccccaagtgacccgccattgctggtggcatagggtctccattatgggaagctggtgcctgagcttggccgttctgcacataacaacacaagttgggattgtttttccttatgaggaattcaatctccctcttaagattttaacactccttggtgtcgtggccaaaatcagtgaaataagtagaactttgacatgtccctcttgctcatctcctttttgataggaggaggcttcttatatggcaaagtagcctgagtggccatgtaaatggactcaagtttctcagttaggagggtgaagcacttgtacttctcctctttctccttttggtttcgtggtgtaggggaagtgttgtacttcttttttggccactcatctggccataactattgttgttgtgcttaccttcagcattcttgctactagagagctggctggcactgcttgtactggtatgcatgtttggcagatcttagggttatacaacaccttgagactgcctgttactgacttgccctcctgtttgggcttgtttgacgacttcctccagttttatgaagttgtctgctcgtttgaggaactctttcatgttgttggttgagatcctcaagatatctttctagatgtcattcaatggaaggatgccccccagtatggccatatagcagcctttctcggttaggcctttgaccttggtggtctcggtcataaacctttgaatataatcctttaaaggttctccttatctttgtttcaccttgacaaggtcttccaactgtgatggtatctaccttgaggacgagaattgtgtgtagaattcttaggaaaattcattccaagaattgaatcttcctggagctagcttaaagtaccattgttgggctgtttctgacaaagtcgcctaaaagatctggcaccgcacatcacccgtgactttttggagatccatctgcatctcccagtacttgatgtgtgcggagggatcttctattctgatatacatctttcataccgacatcttgaacttaagcaaggagaaggcattaatgtatatcgagaatgcatggagagccccttgacctatctagttaaaggtttgatggttttgggccggctaacccttgatcatgtctcttatttgtcacgtgcttgcatagaaggatctgatgaagtagaacctggttgagtggcccttcttagttgggctagagccctaggttggccaaactctggccatccacaccctgggagagggtatgtccatgctcggttagccccaggttagaaatctggctttagccggccaaccctaggttaggcagctggccatggccagcctgccctaccctgggaaatttctcatggtcggccacctctatgcttggcagtgtctggccatttgctcttccttgattggtcggtacgacctgtgtgttgacagggggttgatcacactgatttcttgggtttggtggatccaactgtctgaagtgattgttcaatggtggaacaaaataactttgattctaactccttgagttaatgttgtcttgggtgtttccacccattcccggacctatccagttaaagataggccttagaatgacttgctcccaaatttttcggagaggaattttgcactgtaggccggccaaaggttggcccagtgggggtgttaatgagccagagatacctggccaaccccccatgccaccaggtgtcggagtctgcctattcccgccactaaatctatttggcaggatttgttcgtctttgagtaggggaagtccatctcattcccaaagaacttggttggactgtttacctgtagaccctacacgatttgtcgataagtcttccttagagaggatctctaatcagatcttatcttctcctatcagttctctcattgaatcgccttatcaggtcactagcttcccttttacggcagtctagctcttcctgatgagctcagaggatgtactcctggtcatccatccatatcaggaatttggatctttgttgggcaaacacattgccaccaacaatgcgtggttcttcagtttggccaacttggcatacaacctctctaagtatggctaattcaaagtcttctcttaggtccacatgaggctcaccaactgctggtttgtcgattcctggccctatttccctagcataatatcggggaacaaagttagtcgtggtgcataagggttgctctacattgagaaaaccttctagtcaaggtgccaatggtagatctaccctaggcagcagagactgttcattaggttcagccaggttagtagggtcgaccagacttgttgtattggtcgagtttgttgggcctgccgggttggcaggattggctatatctgatgggttcgtggaaactctagttgtggctagaacacgaacattaggatcaacatcatggggtcttgaggaagacccgatgaagtagaagttgtagccaaagttctccttgtcacatccatggtgattgatcaaattcataagcaacgctctgaatgaaagtaccaaaatgttgacctcaaatttggtcaaccaacagtaaagccttatttacaattatcatcacaacccgtgaacaattagaataagtaaataaatagacacaacaattttatagaggttcaaccccttggttagagagtaataatgacctactctccttttagttgtattgatatgagaaataataccactcagataataagttttgtgagttctagagtggctcttaatgaattacaatagtgagaatgtaaggcatatctcaagtaggcgagatgagaaagggtagtctctcattcactacgagtggcgtataggaggaagaggctagggtttcgagtgcttgagctcaagagcttaggaatgagaacttagaacttaggtttagcctagtcctctttataaaggagagaacttacaaaagatctaagctagccaaagtaggttgatatccttataattagatatcacctttttttacacattaaatatataagaaaataactcattaattattccttaaaaataggtaaatatctgaagttgaacccctactttcgtaggttgttggagtgaattcgtacctgagagtgatgtttgcctaggttgaaaattgcagagacactaattgtgtgtgccagaagggaagctggttggcctaccatttgttggaggctggttggcctatgcttcactatggcaggccaatggtggtccgaccagacccccttggttggccatatgttgtctctttgccctgcttgatcatttgaattcttcatcaactggtacgttgtgcatggtgacttgatcctctccgtaacaggctgtactctacgtggcatcaatcttgcatgtgtagacatgccacgtcatgtgggtaaaaattgagataatcgacctcattgtttaaaaaatggacgaattattctttaccagacttaactagttaaaactttactggaatacattcccaaattattctgaactcaaaagaatagatgaaagagagagagaataacaatattgaaggaaattatgtaattaaacttacagaattttttatttggttagattaatcaggggtaaagaactctgaattataaaataaatttgttgttgagctaatttctaacatcaatacataatgaattggactaataacgacatataatattaccttatgatatttgccaccttaaattatcgttgttctcataaataaaatatttgtcaataggttccttatgcagataaaatagactcatctgtgaattctctttgagaagtgttatcttcatttcccattatttcccttcagcatctgtctagacaagggaacacaacattacataatttggcacaaatggcaattgggttagatagcacttagttttaaaatggcaatgacccctacccgtacccgttgttgggttgtttccactcaaaacaaataaaattgtcaataggtgaactgtgaagaagaaaaataaattaaaaaaaaactaaaataatatatcaacaatatatctctttgtttattatttattataaaaaggaagaaattaaatgtcctatattagtttatgggtgactattcaatggttacatttttattgtaaccatcatgattacatttttattttaactataatagcaggttactaatatataaaactt

SEQ ID NO: 25644 - DNA, 2150 bp, Cannabis sativa
tttgcgttgattcaactcgttcacgtaccatttttgtgcattctgagtgcttttagcaatatgtggtttacctgaaatagttgctacatgaccatcgaagactggaaatgcagctttagagggtacaaatttctaggaccgagggctgcatctactgtcgttgctaaagcattgtgtgccccctaaagggcttgtgattttggagcttgtattatgggaagttatggatgacctactccttgaggaggatttatagctccatgttttctcgaaattaaaagctccccgtgtgcaactgcccatcataggtagattactaggatccttacctaattggtcaagtgtctgttccgtaccaatccctcaatttcatcttttgaatagtcacattcatttgtggtgtgaccaatatcaccatgacattcaaactttttgtttggatctcttctttcttttctacctttgtacataggcgaaggcttcatgtagtgcaccatgttacaggttgccttgtacacattttcctaagtacctatgagacttgtgtactcagtgtatcttgattcttgggtttttacttttttgctgactcactctaatttggacccttcaaactctttttactctgcgagtgggttatattggacactagcttcacaaaagtacttggtccatataccgtgggagtcgtaaaacttgttggcaaggataaatggatggagttgtcatctaccagggttgggcatttattatttcagtggaaggagctgggagtactccatatgcttgagcataagcatcttttagatttataaatccttgagctcttgctaagaactcactcaatgtatctgccctttttcattgaagatctccccaaaacaatgaacccgttgtaagtcctgatgttagggtcaccattttaatgtcatcagtgaccttggttttagcagccacattcatcatgcgttggataaacttcttcaagttttctccatgttgttgcttgacgctagtcagagagctggcttccaaatcatagtccttggctgctataagctgctttttgaacattacttgtaggtctctctggagacaacattttccaccagtccttcgcggacttgcttagtcttaattaaaaaaatataaattttgtatcatcactggccttagtgagttgcataatgcgattgtatatagacaaatggtcttggggtccgtacgcccttcatatagctccatttgtggcattctaaaattatccgacagtggtggatcaatgattctcatcacacaaggctcgatatcttctttctcagagttagatatgacaccactttattttctagaaatcttttttgtgactttcatcaattcctcaatcttaaattcatggcgttgagtcttatcacttgaagattctcttctacaaacacaatcgttgatgtggtttctcaaatcattattgtgtggtcttgctttttttctttggctctttctctcttagcattcaatcttctttgaagatcatttgtggaaaggcttccactactgtcatctgtcactgaatgtacttcgtcaacatcctcattgtggttactaaaatcactgggaggaggcattcccctttgagactctggcttctagattctggcatgagtcttatttttctacgtaactctgcctcaacaatttttcttgtcaccgtgccctgaggcgtggtttcctttcctcttctgttgaggttgtccagtagcttttagactttttaggctgcttgttggaaggattcttgtttagttcttcaacaacgattcctttgcctttgtctttgggaacccctaacgttccaggatcttttggatctgctttcttagaggcatcagttgttggaggagcttgtatgtcgagagctatcttagttaggccagccattccaacctccattctggtcatcttattgagtaataactcgttaaattgatcttgttgagtgagcctgcttttggcctgttgaagttgtctatcaaagatgaccacatgatctgactcatcatgtaggcttttctctcaaatgtcgtcactaacaaccttttcctgagggtcttcctcctgcttatccattggtatgtcctaagtgttaactt

SEQ ID NO: 25645 - DNA, 2048 bp, Cannabis sativa
cgataagctccttagtgacatagtctactccttcgaccaggacatcgctgtccgtgtctagtggctctctagcctcgttgtattccacaaaatttggaggtgcggcctcctcctcttcctctgcctcagaaggactgccaggaaagacatcgccatgttcctctatttcatggactttagcaaccccttcatgatccgcctcctcctagacgagtggattttgttcggcgcttgctaagatagcatgttgggccacgtgagggtcaaatgcattgactttacgcattgtctgtttacttcgagccatcatcctatggctagacgggaagattgagttgaaacgttcgtcgcttgaagagggcggactggaaaaaggacgagggtaatctccatagtgaagttgaagcaaatccttgtcaactcggtgttcgcttccctaaaactcagtatggtttatctacaaaagaaaacacgtgagatgagtgtttggtcgggatatcgaacaacaaataggcaaatatgccgacctggaggtttcaacagattaaagaatagaaatattcgacgataagtcaaaacccagaagtttgaaattttcaagatttagggaaaatttttcaagaagctttcaataagaaagatgaaagacaaacattgtgcagtggaaaggcaagtatcatgaattgtgttgtcgcataaatcattggaaagcaaaatcccaaagtttcttgacctaggcatttcaacctatcttctacagtaaggttaagaacgcattagaaattaaatgtgcaaagtaaaaggagagagaatcgagaacttattaattgatcgacatatagatttagtctacgcgaagctgttcggatggttcttgtgaaaatttcacggcagactcgaagcgaaaacctctctttttactctgaacttgcttaatggagaagtttgtaaaaatgggtttgggaacaatgctcagtcatatttatagacgaaaaaacaaaaagggctaatcatttcaaacgcctcagacgcctcggttcccctcaaaagcaaatattggaaatgaaacataatcaagtgtaactggcaaacgtggtgagaaagaatcaaatttggaagcattaattgcgttagagcttttattagccgaaaaccaaagagacgcctaatcagcctcacatcaaatcgtgaacagatgcacctaacacgtgtcacccatccaaacgcaaagacaactcggatgaagtctacacgcaaagtcaaaagtcccgtacagacttagggggaaaacattatcctaatttttgcactttgacgtggcatcacacgatggtgacacgtgaaatcaactctatgtacctgcttcaaagaaatatgccgaacagggcaccacattcattcgctcggccgaagtcctctgagccgggcagcgagcaatctgcgcatcacgccaacacttagcaaattcaacttttgcttcgtgagacatcaaagaaatcccgataactttgggattagattgcagagatatggcaagctgtccaaatcccacgattagtgtaaatagtatttactacgtaagctttccacttatatcaatggtaaccagaagggaaatacttccctcccaagcttatagccctataaatagtgattcatactcactaggcaaagggtcaaaaaatttatctaagaattcatgttcggagatattcttgtaagagctctaagaaaaggaactattcaccttgttcttaagtcaatacaattaacgaggattaggctattaccgaactgctcaggcctgaaccttaataaaattcttgtgtctttatttgctttattatattacactcgtattatactacttgtcgcttacaaattagactcattctcgttgactaaaagtgaggtcaacattttggtgctttcattgagaggtgaactcaatgatcgttatttatctcaaatcgaatcgcaaatacaatggtggtacagactcgcaaaggtgtcgtttttctagcaaatctacaggcagtggatcctgc

SEQ ID NO: 25646 - DNA, 2769 bp, Cannabis sativa
agaaccaactcatggagcagttagtcaaatttgaatggctgccaatttcatgtgctacctccagcttattaggtcacaatatcagttcctgtgctaaagagaaagggtatgtgtggatcaagaaaaacaaactagaccaagttaagaaaaatttgtagaaaagaaaaatgatgaacaacatgatcaagcaactactgatgtggttgctgatgaagctttggtgaatcagatttttcctgaggagaaaggggagacatttagttatgtggatactgctagaaccaatctggaaatgcaagctcatgttcaagatgaccaatggattatacctcgcaggaatagcatgaaaccacaacctgatatacctaataaggatattttacagcctttgttaatgcctttgaggctcttcttgagccattgaatctgactactcctcccccttgactgatggagtggtgtaacatcctttgttgcaacgttagaggcatgaataaagtcaataagcaagtttctattttagatatttgccggttgaataaaatcaggatagctttgcttttagaaactaaggttcgtagtgataaaattgaaaagatgataaataataatttccttgactggagttattacactagtattattgttgagggtaggctgcttgttctctggcaaaagcagttcatccatgtggaagttttggaagatgatgagtcatttgttcattgtaaaataaaggtagtgggcttgaattctatatttattcttactgctgtgtatggtttgaatatttttggtgaaaggagatcattatgggactctctaagtgggtttaggcatttaaagatttcttggttgatcttgggaaattttaatgctatgttcaatatggaggacagagttggggtaaagcagtggctcattcagaagttgtggatgctcaaaattggctctcttgggaacaggttgatgccttaaaatgcactggctccaattttacttggtctaacaaacatgacagggtgataggaatttttctaaacttgatagagtcttcaagaatgaaagttggttcaatctcttccccaacttcgagggagtttatagttgggacacttgctcagaccacaactattatgttatcaagaagttggaaataagcaaaatgggttgtaaattgttgcaacttttggatggattaccctagcttcaaagatactgtgatggccaactagagtaaaagaatgatgggcaaagaccttagcaaaatcatgggcaaactcagcagtctgaaacactgtcttaagggctttagcatggaggaatttggcgatattacccagatctatcaattagccaaagatgattacaatactgcctagatgcatcttgctagtaatcctacagatatcaccttgcatgttgagaacaatcctctaaggagcaatttgaaacagtccataaaagatatgccaaccatatgcaacaacttagtaaaatcaattggctttgttatggtgatgacaactccaagttctttcatgctagtttaaagaaaagaaaggattttaatagcataaccacctatatggctgatggtgtggttatcgatgactatgatagtgtcattaaccactattttgaacattttaggaatttcatgggggctgaaagttcggcttcaagtaggcttaatgaagaatgtttagatcatggacacaagttgtctttatagcaacaaatccaaatcactagacccttttcaaaaaaaaaagaagtagaggatgccatgctcaacattaaccaacttaaaagtcttggaccagacgattttggtgctagctttttcaaggggctttggtttgaaatatgagatgaaatttttgatgcaatcctttccttttttgagacaaggttgattctaaaggatctaaacagaaccaccatatctttgattcccaaatcaaacaacctacttcagcggtgtactacaggcttattgcttgttgcaacactgtctataaatgcatttccaagctgttgtgttatagattgagtgaggtcttacctctcttgtccacaacaatcaaggagcgtttattaagaaaagattgcttgctcataatattcttattttttaggatttgttcaaaggctacaccaggaaaaatttatcgtcttgttacttgatgatgattgatcttagcaaggcttatgatatggttgattggaaattcatctcagacttacttaatggcttgtgtttcccaaccaagttcattaagtggatcttggtttgcctttgtggtacctcatatactcagatgatgaatggaagattgcatggttcatttcaaggaaaaaaaggtcttcgtcaaggagatcccatacccccctcctttttgtgcctgttatggaatacctcaccgattattatctcttacttcaagatctaatggcttcaagtatcacccaatgtgtaagcaattgaaactcatcaatctctgttttgctgatgatatggttattttttacaagggtaatgtcttctcttaccataattaatgaaacttttgcgaaattctgtaatgccacggctactaacaaatgaaaatcctccatttattttgggggaatttcgactgaaatcaaaaggtctgctggacattgttgatatggaagaggaatctttccgtttgaagtatctcgggattaaactacgtccaaccaaatggaactatgctaattgtgctggcataattgaaaaag

SEQ ID NO: 25647 - DNA, 2257 bp, Cannabis sativa
  modified_base (1040)..(1059): a, c, t, g, unknown or other
tttattaatattatttttatttttgtttcattataatgatttttttttttgacaaattctttaatgaattttattattttggttttaatagtgatatgtattattttattatttgtcctcgtacaaattattttattatgctgaatttgaaagatattgtctatatgtatatattgtaagttgttaattaaacaactattaaatagtacactaaaattaggtgtatacattataataataattagagctcacattttcatttaaaaaactagccaataaaattgttgtagataacaaaaatatatataaaaattaaaatagaatagttatgatcacaatatggttgcggatattctaatcaaagccaaattcataaacaaaagtgatctttttttgaaagaaaagaagaaaaaaaaaatattgattatgcttctattataaaataataaatccagctgcaaaaaatagctttccaaataatgataattaaaaaaaaaatatataaataggtaatatatattaaaagcaatcttaccatttaatcatttataacaaaccatttaaggggaaaggtttcgtaaaaaataataaaacaaaattaagtaaaccctcctaattattgtttgcataaatttaaacatagtttatgctatggtttgcaaaaatttcactttaaccagaaattagaaaagttagtttatgtgttatatatagttcatactagaatatttggtgatataaaaatagtatcacattatactttacatttggatatttgatcaaaactgtataattatttaaattaataccaaacactatatgtaactattgaaatttttcatgagtttttttaatatactaattttgtaaaacagaagaataaattttttttattaattagaatacaaaatgtaatcagatatttgaatcaaaaagtagtatattatattcaaattattataaaataaaaagacatagcaaagtttttatttgatcttacatgtttgaggatcaagaaatttaataataataataataannnnnnnnnnnnnnnnnnnnataataataataataatttttcaaaaaattatgatgttgagtaatgatgttgttttaagtcattgcattgttatggcgggccaaaaggaataaacacaataattaatatttgatctataaagcttctatgttattaactaattaattaaataattaatacttattattaattctttaaatatcttttggtactggggtcaatatataagatgttacttagctctcaaatttatatagctgtctacggaaagtacatattaaatgttttttgggatttaaaataattattattatttttttaaaaagaaattactttcatatttcattaaattcaattaatggtacatagagcaattaagcaaacataaaggtaaagtcattattgttaaacattagtttgtatggtaataacaacaattaataatattttaatttaattttgacattattgttaagcaatttgtcaaaaaaaaaaaaagacttgcttttatataaaaatgattattgacatacttgtcttacctatttggtaaactacaattaataagtaattaatcgagttttataacttcaattagtattttattattacaaacaatatagtaattatttttataactaattaaagcaagatttataccaaatttataaaaatgatgttgtaaataatgaatgttatcattacatgaaaatcatggggtacactacaactacacctactcccgatccataatgttttcaaaataataataataaattatttaatatattttttattaccatttttttttagatatttgcacaaattccgcataaatataattttatgatattagagaactacaaaatagaatttaaaaaatgatattttttatatttaaaaaaatgatagattttttttttctaaaagaaataaaaataaatacgagaaagagaaagaaaaattatgaggttgtttggctatgttttcagtttttagtttttagaattgtgtttttaaaattgagaataaaaaacagtttttatcattttaaaaatttaatggtatttggcttagattttttaaaactatttttatatttatttactaaaaaaataatattctacaccatactatgacacgaatctattcaacctcgaatccgaacccgaacacggtcccagaccccaaacctcgacacaaatacagactttaact

SEQ ID NO: 25648 - DNA, 4298 bp, Cannabis sativa
  modified_base (4258)..(4273): a, c, t, g, unknown or other
caacctaggttctgagacctggtgccaggtcctaattatgactcccagatggctctgtttatttctcgaaagcatccatatatagattgttgatgaaaacagagaatatgcttagaagactttgtctaaactacagttggaagtgacccattgtcaaccttggcgttgggacctagcaccaggtcaacttgggtcctgggtcctaattttggccttgaagttaatctatttctttttcgaaagcatttgattccttattttggatggagacaaagaaaattctcgaggtaaatcttcaaaattgtggttgaaagtatcgcaggttgacaacatgtcaacctgggcgctgggtacacaccaagtggcccgggcacttggtgcttggtgctccaaacgggaagtgttctgattttgattttggtgcctctaatatgtccgtgataggcattattcatgtctaactacaaagtttgagctatttttacttagacggacccgaaaacggaaaccctagttaagaatgttaacctgggcactgggtgaaatccctaagagcccgggttgacttccaggatgttgtttcatctcttttcaatttccaagcctcagacatggattcttcttctcttcttggttcagaatactgaaggatggtgagttataaacattaggcgggatccaaacacccatttcatagttcccagagtcaacttaagagtagggctagggacccatcctaggtcgattgctatgacatgggactactcaacttcgtaaatagttttcttcttggcacatgtcaaacattgatttccacatcaccaagatcagattttgggtaaacatttacccccgagtgaattttacattgtgtgaagttgacttgatgacatgaactaagctcatttcatatgaaactaccagatgggtatcagttttgacaatcttagcatttgttttctgtttttcaatgattcctagttggaataggaattttgaaaattactattccatgttggattgggaatttcaaaatttaaaagaaaaaagaaaagaaaagataattgatatttttctctcttatcattctttttaaattttaaatttaaaataactccttattggcttaggagtagaggagtctaatttctataaatagagaactcatctcgactctttcttattccattccacaagcctgaagagaggaaaaaagagcctaagtcttttgctttctagagttctcaagtgttcttcatccccatcaggtattttcaaaattttttatttatttttttttcttcctccctcttgtagagcctagtttaaggattcttgatctagttggaaatctttaaactccatttataagacctccaaaatcgaaaatacaattttcatgtgagtcttaatctaagacctaacttttattgcaaggtgcagtccagctagttttgtcttaacacatctttaagtgagctgaaaagggcaattttgaggtgaattgagttgaagtgagctaatattcaccttatccaagttgatcagacttaagtagggaacgagcatgccttgtatgaagataactagaagaagactcaatgaatatgacccacacgtggcaaacgtggaggaaaattcatggcaaccgagttacttaccgctaccattgaaagtgaagatgcaagagatcgcgactttgagttaagaccccttgtatttaacattatcactgagcaccaagtagagttgattagggatgagtactctttaccaaaaattattgttagaaaacccagaattgagtgacccaatggttctcgaaatccttgttgtagtgctttgtcaagatttcacatgaacgcgggtgcattcttgcccttacacccgtgctttgtgtcgattgctgattatttcggagtctatccttatcaggtgaatccgaacagttattgaatttttttgacatttttcatcatctatcgtttgcaaaactggcctgttccaactctcaacgagatcaattttttatgtgaccttaaaatgagtgtcactcataaagaaaaaagcttttatcattgttgacctcatatttggccaactgacaacggagtcgtatttatgattaatatcaccatgtgtacataataagaataagcaaatcaaagagacacaacatttttatagaggtttgaccccattagttagcaggtaatgaccgtatccccttttggttgtattgatattagagataataccactcggatcacaagtgttatgaattctgaagtggctctcttaagattataatagtgagaatcaagaagcaaatctcaagtaggagagatgaaagacttagtctcttctacactgcttggggcatgtagaggagagagagagctagggttttagaacttagagctttggatttagaacttagactttagacctctatcacttggagagattaggtttagcttagtgctctttatataggagagcttacaagagatgataggttgatatcccttaaaatgaggagatatcacttattaattacacattaaaataataaataaataatatgtttattagtccctaggaataggtaaataatgaagtttatctcctattttcatgggctgttgaagcttaattcatgattaaaagtgttgtccaggatgtaagctgtagaggcacaacaagtgtttgccatgatggaggttggccgacccttcctttactggaggctggctggcctatgctggtaatagggccgtccaagggggtccagccaaaccccttaacatggtcagtttgttgtctctttatcccgcttaagtattcgaacttcctatcaactgatatgttgtgtatgatgacttagccttgttgttaacaaattgtactccacgtggcatcagtctggcccatgtggataaaaatttggataatatttggcccccaagtccctatgtggacgtctgtatagatagggactttccagcttcaattttgactgttagagccttaatcgagcaggttttatataataactttagttgtaaaatattttctcttgtttggctactcacattctgcatggttgttttttgcaggttgcatggttatttgctgcatgttaaatgagaggggcccaccagaaactatataaggttatttggtgaaacacctttcattccacactttacattctctctctttaaaaaaggaaacaagaggagctcttcattccgcctttgaggccaacacacccaagtcctctaaaactcgagattctcgctttgttttgatgatccaagcttcccaccgtcttacttgaaggttctactagtggttaaactttcaaatcacgttctctaattttcttggatttaccattgttgtgttcaagcttttccatgctttatacattcttgattctcacgttagattgtagtctttttggtatttttatctgcatgatagttttaggatgcataatgtgtgatttcctaatgaaaaagattcaattttgatctttgttgtgattcttgactctttgagtaacgaagaacacgctttagttttgaaaaaacacacactttgatccaaaacatactatggccacccctaggttcttatttaagacatggctggctttagggttggctagttttagggttttaccctaggaagctggccggttcatgcctgggtcttgtgaacctggccagtcttgcatgggtcatgtgaacctggccagttcttgcatgggtcatgggaccctagccgaccttctcaatgttttgggaccttggccagcctaggccttggtcccaagtgggtggctagtttttagtcttcttttgaccttggcaagaattctgtcatggtcttatgaacatatacaacctttgtctcatacatggttcccttagaaactttgtatgacactttatggtgagtctaatatagtcgaatactcaacttaagactcaacatttgtctaagttgttacacttgaaattgtactttgttgatacccatccgtgtacgatgcaattatctggcaagtacccttgggtacgttgaaccagagtcttgtctaaaccttgtcactttgtcaggttgctcacctccccctgtcttttgtgtgcagatgatcccaagtgactattggggaggtgactattatatcgacgaagatttacttggtcttctctgttgggttatgtgccctaaataaaacccattnnnnnnnnnnnnnnnntcaatctaagaaatttgaagtgatt

SEQ ID NO: 25649 - DNA, 2775 bp, Cannabis sativa
tttttttttttttttttaatggggccctttgtatgatctacagatacaatgtagaattttgaggctgcttatgcttttgtaatttttttttagttgttctatataaatatgaaagaaataattatgaaaaatggtaatcatcatcaaaaataaaataaaaaataatgacatgtaaatatttattatcttctatttttgttatgcagcttgttatattttttcagtcacttgttggttggttatagaattataagaattaatgctagtatgcaaatgtccttaaaatggtgtatcttttaactattgaaattattgcattttgaattttcatcagtctcattttactaatgtaacacctaatttggatgaaagttctgtaagtacatgttaaagttgtgggtatgatttagacaattgttatggggtattagttttacaattagttggcgatattcatttaaattgatattctctaaaatttattttattaatttatataggactggatacttaattacactaataacgatatgatactaaaaaaagtgttaattatcattaatctcttttagcatttttctatattggacgatcgaacttcaaaagtttagaaatatggagaacaaaattgaaaaaggattataggtgtagattggggataggattacttgcctgcaagggatatggctctgaactttcatttcaaaattaattgatgatgagtagagtagtttatattcttatatatatagtttaatattttatcatttatttcagtgggataatgtttataatagtgtatgtatgtaagtttgtttgagaaaaatgaattagaagtttaatatgtaaaataaaatatgtattttgatgaaggtggtgtgtcacactaagcaaaaagttggttggatgatatggggaagtggttaaaaagcaattgaaaatgaatgaggaaaatggaccagaaaagtttctgagttttagcacttacattggttttgatagatgaattgaccaaaatcattccattgaagaaaaagaaagaaaatgaatagtacaattattaggagctacctagctaggtctttgatatataaatgtacctttgagtaaaaaaaattaaatatttaatatttaggcacgaatttatatagtatttctttcatattttaaatatttaggagctacgtctcattatgatttggaagaaaaatattacaagacaactttaattacgactcactctccttgtcaccaatttgtcaaattcagctttttaatatatatattttttttagaataaatataatttttcatatgagttttgcttatttatatacacctaactactaaataatacaatattattttttagatatataaccgccattaaggtatttatttaatttattggaataaagcttcatatatcagatatacatattttgtactaaaaaacgatacatatttttttatatgtataaaataaaaaataaatattattttggactttgtgttttgtaaaagttattaattggactctgtactgttttgttaaataataaaacagaccttctgtgttgttagatggtaaaaataggaccttgagctcaatttttaataattttattatttaatataatcaactttaagataatttctaacacgaacagatacaaaatatttaactagttttgtcataatatctctagatcggattattattaaattttattttgacaaaaaatcagctcagggttcctatttgtacaattttagaaaatacagggtttattttgtaatttaacaaaacagagagtccaattgataatttttacaaaacacaaggttcaaaatggtatataccctaaaataaaataaagtaagtttatatagtaagttgtttagatatactctttatttatttttgcatttaagatgatcacgtacattgcacttatataagtcacttgtaaattttttaaaaagttttgaataatatacaatgctaaaaataaaattcaaataatttgttacactcgtggctattttttcttatatacataataaataattatttgaactttatttttgatattgtaaagtattcataattttttgaaaatttatgtgatcctaaatgggtactacgtatacgatcataaaaaaaacaaactaaaaaaaatttctatatgctaaaatagataggaggtctaccagaaaactccttaattaagagggtatactaaagaaatttcctatataatattcatatgtattttaggggagttctattttcaccccataaaatgatagtacaccttattattaaaaaaaaaaaattactcaaaaatatttttctaaatttttttcctcacattattttatattaaattcaatatttatttcgattttattttcatacttttttttttctaaatgatttatatatttttttttattttttttaagaaactttcatataaatttttatttattttttctgtcataatattgaaaatataatttattttatttgatagatatattttttaagaatataaatttaaagaaaaaagcagttaaaaaaattaatatataattaaagatataacttttatataaaataaaaattattaaaataaagtatttttaaaagtttttagatttaaaataaaatttacttattttattatattattggtattttactatattattttatattttattatttgtctttagagattaaacttcatgaaagaaaaaagaaacaat

SEQ ID NO: 25650 - DNA, 4265 bp, Cannabis sativa
  modified_base (4088)..(4089): a, c, t, g, unknown or other
tatataattaaatcttatggggtacaaacaaagtaaattagttatataaatatatatataaaaaaaaaagtgtgttgggatacagtatttgattttattcttgtgtgcttatctgttatgctaacaacaatttagatctacccaaaccccccaaaaaaagattaaataaataaaagataaaagtaacaagtaacattaagtcttggatcttttggtcttaatttgagaaattgagaagttcttcaaaaccccttgtctagaaggagatgaagaaaagaaatgatggtaattgtgcttaacaaaaagtgcacatagaatgcactttttctttaggaggagagagagagatgtagttgagtagtagtaaaatttgtttagtcacataataaatagtgtaaaacaatagtagtcaaagtagtcaacattaatgtggggttttacataaacgaatctcgatgccttagtctgacatttattatttatttattatttttaaaaaatatgggttgttttgatggagaagaagaatgtggtgtgtgccatctcgatattgttaaaattattgagatgatcgcaagcaagtaatgatgaaaactgtccttatattataaagattggaaggaaaaggtgctaatatatataatcaatattatctttcctggtaagacttcaaattatatttgtaatctattattttgatcatccatgagatcatcaggatatacatatacatataatatatatttatagggataagactctcaatgatcaaacgtgctaacataactaaagatggtgagactaaataaaaggggtagcttataaatatgaggagagctaattacaatggtcagagaatttaaaatcacattattaactctaattttttatttttattagtattaataataccagatagagtagtccataacacgaatgatatcgatactcaaatcagatcatgggcacactgaataaattaagttgattattgtttataattattttttaagtattttgacttctcatgttttaacatttaagcaaaaacaattatatatataatagtactgtaggaaggtgaagggaactagagtttccatgtttttggttgacgaggtactttcagtttagtttgaattttcagttagttaaacatatacaatgtaatatatatatatatatatatatatatataattgtaagaataaattcttttattaagctcaagtattacaccgaaataagttacaaaccctgtctgaaagcttcagattacatctcaacagaaataaaatcatatccactcaaactaaaatagttacaactacttattccagctcagcaacctttcacacgaacaaactttacaatatttatataaactagatcacggccaaaaatttcatagtactatagctagaagaaaccaatcatccagagtaagagagagactagggtgcgagagttaagctccattcgtgtttgttttgaggaaaaacgaaagaaaagttaggggaaatctttgtaagagaaacagagagaaactcaaagcttgaatctttgattatcaatcaaatcaatgtgacttgaaatcaaaaaaaaaatgtaaacatacttgatttgatagtgaaatatcgagtatctcagtggcgagctcgaaaaggacattgcccatttttttaggggtgaatcttaagaaaaatccttgtgttcttcttatgtgtttgaatatctaaaccctaatatctctactttcgatttcgtgtaaatttcttgtttgaattgtgtgtgaatctctaaccctagcgggtgcgaagtctcctagggtttcttgaagtggttcgaaccttagtatctaagagtgactgatttttttagggttgttattggatcaagggttgttagaccggtatttgagttattaaaacttatggcactacaaaaaaaaattatcattaggggcgaacttattaccgacagaatagatctgcccctaagtataagggttattaccagtagagtatactttctgctggtaatagtcaaaaaatgtaattttttagttaaaaatcagttttctttagtaatagcggcgggaaacaaagtattacttgcaacgcctgactattgaaaacttgctaattcaaaattaatcatattatattataattatataatattatagatcgggatcccgagttttaaaacacaactgaaactacaattactatttaaaaagtttaataacattttttttataaacgacagggcaactacaaaatataattcaaaaagttgaaagactggaacccttcaggctgcaccgtcgcaatatgtacaatccttgccaagctctaactcactactcctccagtttagctttacctttaccatacaaggtagcaagctgatgagtcgacagactcactaagttgtgcataaacatatatatagatgtcgtagaccgactttatgtttaagccatcctgagctctaatactgagctcaccaagtggttaaaaacgttctcaacggaagtacgaccactttaccatatgcactaaagtaccgactcctactcgtgttggtagggtcattattgtacttctgagagttactaagtgttgtaccacatgcacaacgcacccccttgtactcgtgttgataacactataactatcctaaaacgctacactctactaacacccttaaaactatcacactttcagtgttaatagtgtatatgaataatagcaagcattcagacatatgtatatactttatgctatcttacctcgtttccaagtttaagtgtgccggtcaacctgagtggaactgtagctcgacgctttacagggccctaaaccacaatatccaaaattttgatgagagaaacgctaaaacacttatcggggacttaaaatcaaaactaagaataaccctatcgatgaataacatggaaataccccaaataacacaaaaacggagaaaactagggttctggaaaatggtccaactggcagaccagttcccaaccggaagtctagttccctggggaccaacgagtcgactagttgctacaagtccccgtaaaccggttgaccagttcagtgctgggaacctcaaaaatgtcccacacaccacaaaataaccctaaactcactcaaaagctctagatcgcctatatacactataatatacccaattcaagcaaaagaactcaacaattcacacaaaatctcatttcacctttaaagggctaggcttgagttcttaaactcaaaccttagccaaacctccaaacaatcaatgaaacccactcaaatccacgtaaacaacctcaaataaagctcagaacttaaacccaaacaacaattatcaccacagtaccataaatcaaatattcatgcacttacttctaacttaagcttcaaaaaaaaaaaaaaaaagaagctaggaggtactaccttgaatcgaagctcttcaatactgctggaaataacagaattaagcaaataaaatctaaccctaagttgggttcttgatgcttcgaaggagagagaaagaatgggtgagataaataaattttctaatttctcaaaaaccacctccttttactaatattaacttaatataaaacctaaaaaatttgataattgaaaccataaaagacaaaataggagtttctagggtaatgactattttacccttagcaaaaagaaaaaaccttacttacacaaaagggcaatttggtcatttccaaatcccgacacttcccgatatttttaaagtctaataaggatgccccactataaacattctaaaccatataacacgtgactctctaatggtccaacatcgcgttccaccgctcccgaacacaaatatagaaaacggagaaattcatataaatagcataattagtacatattgagcttaaataaatctccacaatatatacaaatcataaataataaatcaattctataattaaatcctaattattaaataatctgatatattaaacttagagggtctttacaattatccccccgttaaaaagatttcgtcctcgaaatctaacnngaatagctctggatgctgagtccttatatcaaactccaactctcaagtggcctctttaccttgctattcctccagagtaccttaaccaatgctatagttttgtttcaaaggattttctcctttttatccaagatttgcaatggctgctcatcataagactgttggaattattttac

SEQ ID NO: 25651 - DNA, 1809 bp, Cannabis sativa
tatactctaaacttattatttttattgttttgatttaaacacatctggagatttattgggatatggtacaatgataatcagataatatgaaacccttccactgcgtacccaatttagtaccataaaattatcagtacgtatttaccctttccttctaatggggagtttacagataatacatagatttgggtttatttggtgaagcccaactcatggggctatgcatgtacactgacgtggaggtttgatcacagtaatagttgttcatattgtatcctatgattgtgggtaagcaatgtgatgttaattacatgatcttcaatttatacagcttccctttgtaggcaggataattttatatgtccaagattgtaggaagtattccttattctaagatttgaggaagtatttcttattctgttcgaaacagtaaatgggaaactgagactcgcttctggatgcacgatgagaacctcttccaaatacatggagttgacactctttcgtatcctgactaggcttgacagaacctcgtctggaaagacggcaattgttctctcgagagaccagataacaatcaggcttggcctagcttatgttgtttgggcccactgatgggctttaagtctttatttagagtccacgcatttgtagccagaaacacagataacaaaaataataattgtctttacatgcttttaggacacactcttaacataatgtatgttgggttaagaagataatggattgtgtcacatctattagcttctcatttctgattaatggagaagttcaagatttttccacaatgggggtcgcgacagggagacctttgtctccattcttactttcgttttgtgcagaggccttttctagcttgatccaacgggtggagggagatggtaggcttgtattttgggaatagagatttgcatgtttcataattattttttgcgaatcatagccattttttctttgaggctactcaataggagtgtagatgtttaaaggagacattggagaagtatatggctgcctctggtcagttggttaatttttataagtccaaggtgtgttttggcaagaaggttgctatgaatgttggaagatggtggcctttttgatggttgttaaggtagtagagaactatgggaggtatttgggactttcctcttttgtggggcataccaaaaaaagaattgtttgatgtgattaaaaatagagtgtggcaaaaggtgaaaacttggaaaacgtcgacgttttagtggctaggaaaggtgttaataacaactattcttcaagctattctagcttaccatatgagttgctttcgactgccaaaaaacactattaatggtcttcattgtatggaagcaaggtgtaggtgatcttacatgtgtaagtaaaaaggagaaaggtggtttaggattctgggatcttggaatacataaccaagctatatgttgactaaacaaatctgatgttgcattcaatttctaaattcactctgtagtagggttttaaaggaaggttataattatctagatggtgaggttttacaagcaaaatgtggttctaaggcatctcttgtatggtgtattggggtggagaaaaaagattattcaacaagaatatagataaagggtgggtactagaaactttagtgagaattgtggaggatccctggctaagccttacgtacctctctatttaataattataaggataaaatagtaattttataatttaataattatctatccttcaatcactccatccttcctaccaaacaatataaaaggattatta

SEQ ID NO: 25652 - DNA, 2596 bp, Cannabis sativa
  modified_base (2481)..(2490): a, c, t, g, unknown or other
tttttttttttgaaggaacaaacgttcattaactagcaattaaaagtgggaaccacaagggggtctccctccccttgacaaaaactggcatctaggctagaaattctagcacttcttgccaaaacatccactgcggttaaaagttcacgcttaataaaataaaaattacaagagctaaagtctttaacaatgtctaaaattgcataagagaggtgagtggtacgccaatctgggatacagactttttttgcaaggcctgaaattgccacttgacaatccgaaaacaggacaatgtcttcccatttcagttttgatgcccacgataaaccatagagaatggcttggacctcagcatcaagaggcgatggggatgtcacactctgagaagaatagaaccatgtattctcttcatgattaactagaatagccgctatccctgccttaccattacaccaagaggcatcggtgaacactgagaatcttgaacatattaggctagagcaggggattgactttgtggatgaagggactctggtacaaggcttaattacatcagaatattctttgaacatagccctcacacgagaagaagacaacatcccatcaggactaatatgatttatccttaaattattcctttgcctccaaatttcccaggagacacatcccaaatacaacagagtaacatgaggcttatgaataggcagattagacactaaattctcactaaattgaataatagtgttacctggaatcgcctcagctcgtattggaaattcccccaggagccaaacagtcttggcaaacggacaatctctgaataagtggagagatgtctcttcgtttcctccacagagacaacacattttatccgagatgaaagagagtctatttttaagcgggagagcctcattcagaactctccataaccaggtagcaatgcgaggatgtatactggggtgccaaatccatttccacattctacatacaggttgaaatcggtgtaaatgatcaactatgtacgcatttttgacagagaatttaccgttttgagtgttcttccaaattatctggtcttcatgctcctgtggtagcctaggaattgagagtattttctttcccatctcttcaccgaatatctgcagaaccacttgctgattccactcccttccttcagatacatctgccactgtttttgcagtataacccctgcctttgaggctccccattagatctttgaactcattataatttaaccagggaatccagggaaggttccagaaatccacagaacgcccagtacccagaattgtggaaactcctttaaagattgtatttcttccttggactatacttttccaaatggctgaatcataatcctttaattgaactgtccagaagctttgagaagagcaatatttctttgtgagacattccacccaaagtttattttcctgggttgcaataccccacgaaagcttggacagaagggcaatgttgatatcttcaaatcgcctcaggccaagccccccactctcctttggttgacaaatttgatcccatgacttaagtgccaaaaaccgatttttctccttattcccacaccaccaaaactttctgaccatcgaatccatttctcggcatgttgtcacagggaccgtggatgtcgacattgagtaaacagggattgaagcagcaatggatttaatcaaaaccaatctacccgagtaagagaggaattttgttttccatccttctaaccttcgcatgagacattctttcaatcttaaatagtcatcttttcttcttcttttaaaaataaaggggttacccaaatatctttcatccccagtagcttggttgatgtctaagcaactaaggatggcttgtttcttgagactgtctaagttcttggagaacagaacattagattttggcttgctgcaaacttggccagaccaagcttcgtatctagccaggcagtttaacatttcctttgcctctcctttcatttgctcgacagaagaagaatagtgtcgtcagcgaacatcaaatgagttatcgggggggcggtcctagagatcttgatcccatgaatttttcctctactttcctccttaaggagaatctttgaaagaacttcttgacatagaaggaaaataaatggggacaaaggatcgccttgtcgaagcccccgttgaggatagaattttttagtcgggcttccattgagaagaacagagtaagaaactccacatatgcaactcatgattaatctgcagcaattttcatcaaagccatttgccacaagtactctctttatgaaagaccattccatcttgccataagaatttgttgttggtgtggtgttgttgcatgcggtttaaaatattttgtatgtgttagatctagtattgtatcttatcatgatgacactataaaatactgttatttttagtgataattttttaatcacaacannnnnnnnnngtgactaaatgtgatttttagttacaacaaaatgttatttatgactgaaatatagtctttagtcataagttgtcactaatttagttttagtcacaacaagtattgt

SEQ ID NO: 25653 - DNA, 4557 bp, Cannabis sativa
gatccgcactaagtgcaaattttaatccaatccaatctattatggaaaattcggaatgaagtctttaggtttcgatgatgaactccttggtgtataggattaaacaagatatgaaatataagatttcaattattttgcctaaagaaatgaagcaattagacatagattggtttagcaataaaatatagctttgtataaaatttgatattaggcattttttgggtgttgttaggatgtaaatgtgggagttgaaataattagctttattattagccatatttatgtgggtgtttattgaactacattcaatatttttaggcttattcagagttgatcttattatatattgaatattagattttaccatttatctaattcatttcagtcatctaatcgattcaattcattctattggatgtatttcatgtatatctattagattaattccaatttatctaatattttaaacatagtattttttggatcagattattaaatgtgcacccctacttgtaatggattatctcttcttagtcagagatgtgattggctgaaaaatattgtgagtttgtattttgtgtgcccatatcattacttacactgtaatgtgtaatatttctatattagatatagtataagaatatttgatgtctctatctctatattagttttaagttaaccaagtttggcacttacaagtccttgaagagaacccatgaccccaacaacagtcacaagaaagcaaacaaagctaattatcctaagaacaatccattgtcttgtccaagcttcaattttgttttttacaaagtacatttcaactgggaaatgtataatcattggccaaaatcccatggcacctaacactcccaaaacttggttgaaataaggaaacaacattgcgattcctgtggtcgacactacataagctgttcggaaacatagtctcattggatttagttgaacgagcggcagtaatggcagtttcaaagtgtagaaattcttcacaaattcattgttcgagtagttcttgctgagccatttttcgctaactgcaaatattggttgactgaacatctgaaagcgaaaaaaataacacccgaattactttagagaataggaatgtttgccaaactatatttaagatcagaaactataataattaccatgtaagtacctaagagggattataatccaaatcccaaaagttacaattgaaaaagaatctgtttttgcagttgggtaggtaattctgttatgaacctttactcagaaaggtaactacagtaattactatgtaaaagtattgagtcatatataaaaacatgagttgcttcactcataccaatcgattttgaaataaaactttataattcttgtcagtgaataagaaataggtaaacaacatacaatatttcgggaccagaaaactacaacattactatataagactacttgtattatttcttttaaaccaagctctacctttaaccttataatatttcaactcacaattgccatgtaggtacccttttggactcaaacctcacaccttatggaagggtgaagatcaatccttttgtcaattagatacaaaagaagaattttgttacctgatatcctcccactaagtgaagaacaatgcaagcattagcgaaacctatgagccaataaggctcaaaaaactcgaatcctgataagaggttccccggcgtgtcatttccaaacgctgcatatccaaagcaaccacaacatagatagaacaaggtcgtcaagaagaccgaaatcatcgtagccttcttcatggtctggttttctgctggaggtgacttcaatgtatccttcatattcattcattacaaaaccatattcaaaaatttagcggtatgtttggttgggcagaatgaaaatacaagaataagaatggaatgaaaaaaaattattaaatttttgtcattttgcattggaatggtctttcttttcattttaaattggaataatcattccactgaattagtagaaaagtcattcactctaatactttaaaatgcaaccaaataaaagaatggaatcaaaattaattcctttcttttccatttgattacttccaaccgaacgcaaccttagaaagatttctaagacccttttgtttatctttttatgctttagattaagattaaacatcaaacctgaatctcaagaagaataaccgagtatggataggcgaaagcgatatccccaagtgcttggaagactgaccataatttgttagcgatatttgaggctggaactcctgttatgctcccttgaattgtaccattctctgcaattaccaattaagtcaccgaacaacaagtttcgaattcttgaagttcatgcaactagcttaaaaactactcattggcttacctatgactttagcgaaaccaagtccgaatccaatgaagctgtagatgaaagacataactgcagccataacagaaagccatgtcatgttatgaaaatctggtatctgagacattacaatctgaatagctccaaatacaagcatgtgctgaacatctccatatgaacatgtagcttcatgccccttttcgtggtagcagtttgatctctggatcgctctgcattagaacggagcaaatgttgaaaatcaaagacaataacatttgtataaaagccattcaggcttggtttaacaagtttgttgtaagaatccaataacttattaaagttcaaaaatttgtttattgctgatataacaataaacacaaagccattcaagcatgaattgctgatgtgatttcttaagtatccattcaaataataactaattaaactgagtgacatgattgtgtattgtgttgaaatgtggtccaatcacttgaacacattaccattataatatcaagcttgaataataagataagtactagtcatcaatggcatttttaagttctaaacttctaatactacaatttctgctgcaacacattcttgtattatcttgttaagactagttcttgttggtgatagaccacacactagaaaagtttttggtaatgtgtaaatagagtaatctgcggcctaaatatctaagtttaactctcggttgcagataaaaatctaagtttaatttttgagagtatatttctgaaacttacgtaagtacctgaccgttaagtgtcgagtcattatccctgtggtcattaacttggcacttaacgattaggtacctattaattatttgcaatcaggaattaaatttagttatttatgccacaaattactagtataaatatgactcttctttgtaaataacatattaacatgtatttggggtctagtctggtctgggctggtctcattgttccataaccaatctcatatacaatagcatccatacaaacctgatgctggtggcagctgtaatggtataagcaatcccacatccatacaagccttggtgcaaaaacactccacacacatattgggatttttcccctaaaaaaattcaatgaaactaagtgaaacccatatcataaaatcaaatgacaatgagtaaaaattcaaactttaattcaaaacaagtggtaatctcactcacctaagtataacctaacagcttctatatatgaagaacaacgatattggtcaaaacccaaatgaggatttgagtatctgtaacaatcagataaaagatttgctgaaacaatggtgattagagcaaagattaagattaagaaaggccctgcaatccaacccaattgagctatactccatgagagtgataatactccagctccaataacccctgttatgatatgagccacagcagtccatgtagtcccttattcacaataaaaatcaaaactttagaagaattagatgacaagaataaaaatgagatttttatgttaccatttctgattgtagggtggtttgattcagattcagatacagattcattgtcaaatgaagaaaatgtttttacaaatggtgatagctcttcttcttcttcttcttcaacacccatttctctctctttcttgtttttaatagaaattcattacagagaagagagatctgtatgaagttttaagtatgaagttgttgacctttgactcttctgaggttttttcatatgtttctaacgacaaaaacgtatttttttgtttcatattctttcttgtagttttaaactgtcgtttatgattttattgtcgttttctatatattaatgtcgttttcagtagctttttcgttttttatgtattgctggtgttttgaaattgtcgttttttattatattatttcaatggaagtaaggttttaatcccgtctcttctgcatcagatttcaaagcagtggtcgggttactgtgactcaatgagagcatccgagagttcagaggtggttcctttgaggatcaaaggcaatcagtcgactgctaacattgtattaatgacagatgcttcgtggaaggaaggtgtagcaggtcttgctgtggtgatggttaatgtttcgactggtatgtgggcttacaaggtaacaaag

SEQ ID NO: 25654 - DNA, 4034 bp, Cannabis sativa
caaaaggacatcccagaagcttcgatataagcacccaacacctaggttgtcaaatagtctaatgcgctgggttctgcttataagattttgataccatctcgactgtttgtctagtttttcacaataactaagaataatgaagtcaaaacagtcaaattcacaacttcatattttcacttttctgacaaggtgatttactcaaaaaacaggtagttttgattctcccattttcgtagaatagcaacatcttcgagaactggtgaccagcttcgccagaatacagaaatagactaagtgatatcaaaatatcattaggcattaaaaaatacacccccaacatgttttctcacttacttaacgtctaagttgacatcacatgtcaacctgggcgctgggcccataacagcgttcaataaaatggtcataactcactctatattaatccaattgatgcgattcaacttggattttaaagctatttcaatcctctatcaattcatgtatcatacttaaatttcaattctgaaaatattgacccaaaaattaccctcaggagagttacgaatttaagctacaacttatgcggagctagtcccacagtcgcgactcgaactctaaaaattgatgatcaacctcagaagttaatttttaccgttagatcagcatatatggtcaaaaaaattccacttgaaggtgtacccaagatggggacgacattgacctccattttggggaaatcgagtcaggagttggtctgactgaggagctcaaaaaaattcccctccacacaatggacctgaccaagattgtcaagatcaaaacaaacctaacagaggttttaagcgagatgctcttagcttacctcaagagaagtcaagacacttttgtctagttacatgaggacatgattgggattgatccccagatcatgtatcatgccctcaacatagacaaagtaaacttctgtgctgcacagcagaaacacacactccttgaaaaggagcattccaaagctctcaaggaagaagttgaaagactacgggagaaaaacttcattagggaagctttctacccagtttggtatccaaccctattttggtgcctaaaccgaatggcaagtggagaacttgcatcgacttcactgaactaaacaaagcatgccctaaggattgttttcctttaccacaaatcgatcaactggtggatacaacagccaaccataaactcctcaaattcatggacgcctatttaggcgacaaccaaatcagcatgcacacaccaaatgaagagcatacttgtttttgaactaacattaggctttattgctatagagtaatgcccttcagactcaagaatgcaagtgatacatatcaaagactagtcaaccgtatgttccacaacttaattgagaacaatatggaagtctacgtcgacgacatgctgatcaagtcaaagaaatccaaagaccacatcaaagacttaggggaatgcttcaacatcttgcaggaatatcgaatgaagctcaatcctctaaagtacctttagtgtccaatcaggaaaattacttggattcattgtcaactcaaaagggattgaagcgaatccagaaaagatcaaggccttgtaagacatgaagttatcgtcacgaattaaagacgtgcaaagcctaactggacgaattattgcactgagcatgtttgtttcaaagtcaaccaacaagtgtgttccattctttaattcactaaaagaaagcaataagaggtttgaatggactgatgaatgcgagcaagccttccaagctctcaaacatcacctagctaggcctcacatcctacccatacaaatagatggtgaagcattgttcatctatttggctatcatcgatcatgcaatcagtgctactctagtacgtgaggaagaagggatacaacatccggtatactacatcaggaagtgtctcattgtggctgagtcaaggtttccccctattgagaagctagtttaatacttggtagtggattatagaaaactaaggccataattccaagctcacatagtcaaggtgttaactgaccaaccacttaggcaagttttgatgaagccagaagcattagggcacctactcaagtaggcagttgaactaggtcagtttgagatcacctaccagcctcgcacaatagtcaaaggacagacattagcaagcttcattgttgaatgcattggtctcgaagaaaaggatcccatggcttgtgaagaccaggtccacacgcctaagactgtagctcagggggacactggaccttcctagaagctttatgtagatggatcctccaatgagcacggttcttgtataggactcatcttagtaactcatgagggattttgaactcataatgctttgcggtttgagttcaccacaacaaacaacgaagcaaagtatgaggcactcctaacaagactacgattaacactagcaatcaaagccgagtcactcgaaatctatagtgattcacatatagttgttaatcagattctcggcgagtatcaagctcgagggtcaaacatgatagcatacccgagcaaagctaaagacttagtagcctaacttatatactactccatccaagaagtaccacgtgaacagaacgcaaacgcagactcactagctaaactgacttgtacaacaaattttgatactctcagtgtagttcctgtcaaatacctagctaaatgaagcataataaagacacggagcctatctttatgatcaatagcccatcatcgatgacccagattgcacaataattagaacaaggtattcttccaattgaccggaacgaagttaggagattaattagaaaagtagctcgcttcctcatcatggacggagtaatgtacaacagaggctattcaatggaacttctaaggtgtgtgacaaaagaagaagccaagctcctcatggtctaggtacatgaaggcctttgtggcaaccatgctaggggaaaaacctctcaaagaagatacttagacaagggtatttttggcctacaatgactgaagactcgatggactatgtaagaaagtgtgacaaataccaaagattctcaaaaatacctagagatgccccaaatgaactcaagagtatgcaatctccctgggcatttgctgtctgggaaatcgacctcataggttcactatctaaggggaaaggtagagttcaataagcagtagtggcgatagattacttcaccaaatgggcagaagcatagcccttagccactatcacatcaaagaaggttcttgattttgtggccaataatatcatttaccgcttttgactcccacaaaagatagtgtcagataatggaacacaatttgatagtgatctatttactgatttttgtagcagacatggaatcatcaagagtttttcaacgatcacttatccacaagaaaatggacaagtggaagcaatcaaccaaactcttaaggatacgttaaagaaacgcctagagtaagccaaagggaattggcctaaagaataacccgaagtgttgtggccttattgcactatagaaaagaaaacaacaagtcatactctctttactctaacctatgtatatgaagccatgatacccgtagtgctcacaccaccatcacatcagagattaacatatgaccaacaaaccaaccatcaaatgttagtcgagtctttagatggaattgaagaaataagagaaaggtttgagctatgaaagggggcgtattagtaaagggtcgcaaaacactacaactccaaggttaaagataggaaatataagcctggggatatgatgctacgacgagtattcctaaacacaaaagatgcattagtaggattactctggcctaattgggaaggatcatatgttgtcaatgaagcattataacctagaacataaaatgtaacaccctaactagcctaggcgtgttacgtgattattaaacgtattgtgcaactcgttgctaatcaatgaggtttatggaaatcgtga

SEQ ID NO: 25655 - DNA, 1711 bp, Cannabis sativa
  modified_base (1112)..(1122): a, c, t, g, unknown or other
  modified_base (1479)..(1480): a, c, t, g, unknown or other
atgcaacataaaatgtgatttctgatctttattaattagtaaatctgattatatttcaataggttttagttagggcacaaaacccaacataaccttaatcccggttctcattttatcacaaatataatatcaaacatgaattccaccgcgcttaactctacgtaccaactattgtcttacatgatgtcctaagtacgtagagattccaaatccccgagtgctcctgaacaagtcccggtaatcctagtcacaattttgggatttacaaatagggttaatccctatatctactttcacataatcatacaattggaatttcaatactcataaacatatagagctcggaacgagctttccaacgatataaagaacatctcaaacggagttcgaattaaaacattatgagcaaaacaagtttgattatgtaaatagcccaagacatccctaggcgggccgcgacacttatagagcatgtcgcggcgcctgggtttgaaatccagaagataccatttaattcattctaatttcaagccaaaaacaccccaaacttaagccaaagcatgctcaaactcaaataaatattccaataattccaactaacataaagagagctaaaagcattaaaataagttctaacaacatcaattcatgcatttgaatcaagctcctcaagaatcaatacaaatcacaatctttacacttattcaaagcttgaaaactcaagcattaaaacccaattgtgaacccaaaatttcagaataaaaatcacacaaattaagtttcaataccagaatttcaaactacacttctaatcttaaaaacacacaaaatgatctaggagcataactcacaattctattcacaaaatcatgcataaaacagcacaaatcatccaatatctcatacacttgcatccaacaatttaaacaacaacaagaacatgatttttaagcttcacctaacaataaattaaacttagcaaaggatcaaacctttaatattaggatcaggaagttttgataagtccattgaatagacttatttttaaaatttcttttcttatccttgtaatagaaaatctttggttactccatatgaatagttttaaccannnnnnnnnnngctttacttcttagttccttattctgactatcaattacctttttaaactaacaatggattttatcacaagtgtcttccaagtcataacaggttgagttccttgaaatcctcccactacgataaggtaccgtgactatctgtctaagaacaaaagtgctattgtcctcatcgattgtgtcaagacaacagaggcagtgagaccatcttatatagaataagatgatataacactttggaattcaataaaatgtctcatctactttgctactttctttcagatttagacacattcttagaaaagtagcatttgttgaaaaaaacacttccttatctaaatgaccataggatggtccaccnntaatcactttagaatagctatcaacattgcaaactttagttaaatgttctagcttttcttaattcatgatcaggacatccttgaatctagtaatggtttacactaagtatataaccatttcatcattgtgaaattttactatcactaaggtatttccttagaaggactcaggcaactactaataactaatcatagaccttatactatcatcaatatgcaatccaaatttct

SEQ ID NO: 25656 - DNA, 1856 bp, Cannabis sativa
gtgttcgaaaaatgtctggggccagcttcccatggttttcccaagggagtaaagtcgtccaaatatatgtgtttatcccaagtcactgattcccccgagacccatcttcatttagtgatgcccaccaatttattctctcaaacttgtttgggcatctttttgtgctcaactatcattaattttgtgttcgtgatattcgccttattattccacagaggacttcattgcccctgagaggcatggaccctttggtggtaatatgttttcgattagagaggcacacaaaaaattaaaatttaaaatatatattactaacattattaaattattttaaaaatatagtatatttttaaatttcttacgagaagaacttatttaattttagttcaactaagggttccttcaataaaatttattcttaaagtttttaaatatagaaattaaaatacatttttttttattttattaaataaataaaaatatatttagtaataaaaatgtttttggtagtttctacttttattttttttatttaagtgagaaaagaaaaagtaaaatgaaaagagagacatagagaaaatgaagttaatagtaattaatgattcaaaaaaaaaagttaatagtaagtaaaaaggtacaaaattaactatacatcaatacttacaaataagacaagtcaaaatatagccaagttaaatagtatacaaaactacaaaataaaataaaacaagtggaaagcacacaaaatataggccttttttttttctcccctttaatttatgtattttgatggggtttaattttaagtttctctctttatttagttttttttttttcctttaaaagttaataatttaggaatattttcccataaatttataagaaaatataactatgtcatatttttaataatagttatagttttgtttttaatgaaactcatctggctaatcttgacttgtctaccttaaatcattgtccaatttttttagaaccgtaaactcaaatcactttttggtgtacgaaacaatttaaatttgaaaattcatgattacgagagcccatgcgtgaacagttggtgaggggtgtttaggagagtagtttgggagcaaatctttttgagaaattttctaggtgtggagtgattgttaccgattgttttaaggagatgttgttgcagtgcaagagacggttgagacaatttcgtcaaaaaactgatgttgtttcataaaagttgtataaggaaaagcaaagttttatgagattttgacgcaaaaagaagtattttggaagcaaagggcgaagcagttttggttaaaagagggtgataaaaatagttattattttcatgcggtgacgagtgctcgtaaaaggacaaataatatttctaagttacaagatgagagtggcgcttagtttatatgggatgatgggcttcctcagttagtacaagagtatttccaggatcttttcactgtcttggatgccgagtggggtaattaacctaattgataatattcaaccttcgatttcagcttcttaaaatgacaatttgatgcgacctgttttggaagaggaagttcgtagggccttgtttcaaatgcatctggagaaggctttaggtcctgacggtagggttgtacataaacttttgcaaactgcccaaatcaaactgagataacccgacaaaaaatacaaactgaaaaattcgacgaaaatataactcgcccaatttttatattgggccggttgaaaataatacgaacccgcccaactaacacgaactaacctgaccaacccgattaagatgatttttttatatatatttataattttttattatatatatttatata

SEQ ID NO: 25657 - DNA, 2820 bp, Cannabis sativa
tcctatatcttcaatcatcaacaattttttttttttggtacaattttaagttgtttactttattatttgaacaataatttttagtttattttttatttagattatcaaaatttcttaaataacaatatattgtatttagtatttacttttaatatataacacaattatttatattaattgaatattgtaaaaataatctcaaataataattaataatatatattttattcaattatttattgtatcaattttaaataaattaaaaaacatctagcataaaattaaatataaatccctcgcacttaattttcttctaatctattatatgcaagttatgtatatttacacttcaatattcatacttaaaaatcaatgaaataaataaataaataataaaatggtgcaaaaaattattttattcagaatttttataatcccattataaactatgatcattctattattatcgatgccaaaattcccctaaagaagctactccatgtggcattataaaacatgcatataacattattaattaacccaatacttaattgcatttctcaggtattaattgtgcctttatttaacgttttctaattagtttttgtggtgtgttacaggcctttaccgctatcgcgttggagatatactaagagtatcgggattcaaaaacaaggcaccgcaattcaacttcgtacgaagaaagaatgtcgttttgagcattgattctgataaaacggacgaagtagaactccaaaacgcggtgaagaaggccaccaccaagcatcttaactcatatggtgcctctcttgttgaatacacaagttttgctgacacgtcagccatcccagggcactatgtcctatactgggagattacccaaaatgagaagactccaattcctaagtcggttttggaggattgttgccttacagttgaagagtcccttaacagcgtgtaccgccaaggccgagtttcggacaagtctattggagcacttgagattaagatagttgaaaatggaacatttgataagctgatggactatgcaattagccagggtgcctccataaaccagtacaaggccccacggtgcgtgaaaaacgcctccattgttgagcttctcgattccaaggtggtttctaattacttcagtccaaaatgccccaattgggatcctggttataagcaagggggcactacggccactactactcatgatgcttgaaaagattattttaaatctcttcttttctctcactctcaaccaataatatatatatatatacatatattattgtgcaggactacatgaagctctatatggaagtgtgaactagaatttgtattaacctgttttggtgtttccttgtgatatttaattaacttgtgttatttgtttaatattttgcttacccgaaagcattagtactatctcaagaaaattgactgtttttttttctgtgaaatttgtcagtatatgtgttaaaagagagtaataattatttgtatacaaatatatatgctatagctacgcagacattatcccccaaataaataatagttagcgtttatattttattaacaaataagaagacaattaattaataatagggtgtttataagtcctttgactggttttggcaagtgcctactgaaatttatcattcatttaaaaaaaacaaaaaaaaaataatatatatagataaaagagaacatcaaatcactacatatttgtgattagtactacttaaacactaattaattaatctgttttaaagttgcaatattcccttaatcaatgtaaacatgcacgaaattctcatattaattaaattattgttatatatcaagtagatttttttaaaattttttatttttggaatatgtaaaattgtttgcaaaatcaacagtagttgcattattgaaagtacacatttgaagtcaaccaacactttccacaggatgtgttggggacttatatatgtaattatgcttttactggagtgaaaaagtaaatctataaataatgttgatttatagatatgtttatgtatggtgatgatagatgactgatgagaacgtaaagttcttaacagtaaacaggatggggacggggtcatttgtcgggggacacaaagcaggaaacatttaaattcaatgtgttatacaataacaatgtatcctgccattttcaaaaaaaaaaaaaaaacaatattgtgtcggtttgtactatactacttaatgtaagggatttttttgcattaaagtttatttttatataacataaataattaatataaaaaaaagtatatataagattaaaaaataattaaagtttacatattgaaaaaaaataataaataaatttaataaaatttgtaattaaattttgtcagaaaaatcaccggaaaaattatggtaccgaaaaagttattgttttcggaaaagtcaccatcgctggaaaaatcattgaaaaaaattactaaaaatagatgtttcaaatataaccgattctataacataataaataaaaacaaataactcaaatcggttatattaacatataactagttttgtaacataatgaatgaaaacaaataacacaaaataattcaaaccagttataattaaaatagaattggttctataacagtgttataataataaataatacgaaattataattcaatccggttatagctaaaatataatcggatacataacataatgaatacaaacaagtaacacgcaataactcaaaccgattacaattaaaaataaagaggaaataaatttctaaaacactgaaacataaat

SEQ ID NO: 25658 - DNA, 3489 bp, Cannabis sativa
tttcttatttattatttaaacattcttatagaatattagtagtgttgaacattttttataagtaacattttacgattaattaacaatattatttaaaaattattttattaagatataaaatctaatacttaattatactaataaaaatattacaataaaaaaatgtaagacaccaataatattttttaataattctttttttatttatatgaagagaaattaatattgggtaaattaaaattactcgtatgacattcaacttgcgaaatctcacttaatctttgaaataattgattccatacaatgacggggccataaggggttatgtaggggcacatgaccccacttaagttttaaaaaattatatttttatatagaaatttttaaataactttaagtttgcctacataaaattaaatttttagtagttttaccttttaaaatttatattttttaaaatttttatttctaataattttatgtttattcttgtaaaatgtatattttttttctttttattcctataaaaaaaattccccaacaaaattatatttttttttattaatatattattgccttcgtcactgattccatgtgatcgcaaagttctcttattctttcattatttatttatttatatacagatttgcttttcttttttctttaaaaaattattacatgttaacttgaatagtagaatttaattgatgttatgttactaaaatactgtccatttgcgtccgcaaaaaaaagacacaatagccatttgtgtcactttaataaaaccaacgtatatttttaggagacctatttgctcgaacatttgtgtcgacacaattgagtgtgtttgtgttacgcgaaattggcctgccctaacttcatttgtattggtctattattacgaaattaacaagagtattgatcgacgagaaaagcgatatttgcattactgtgtacgcacaaaacatgtaaatgatcttcaatccaacaaaagcacaccaaaaattatggaaaaaaaattagcctcttcacgatgaatggtgtccataagagaccaacaataacatctaagaacttcgagtagttcaaactcaatactcctacgttgaaaagcataagaactatctaatttaatctaaggagtaatgttaaaagataccaaaagtgcttttaaaatctacacaaaatgtgagtttacgataaaaaatacttctttttttgtatccattaattaaaaatatttttatattatattttactaaaatatactaatttttcttgagtggattgtctaatatactttcactctctacttaagtctagcatataatttacttcaacctagaaatttaataggaacatcatctataaaagtgaatatatcttaaaggatataaaaataaaagtaaaaattaaaacaaataaagtaaagtgaatatacaatctaatttctccccaaatgtgatatttttaaactatttgtataaggttatacctagtaatagtgtatgatataatatatattggactttttttttatttgatgtgacaaaatctgacccaaccaacaaaccccacctgatcgaatccaaacccatgttcctttactgtttattgcttaattattaaataaatgaagtgaattaaatattaattgctatggaaatactttgcttttaataataataattattattatagtgtctatgtgagttgaacagtttgatgttaggagatgtatttatgacttattatgaggattgttgaagtcttcgttaacacgtaagctaatgctcattaaaaaatacttataaatattatcttaaaatattatataaaaaaaaatactttttaatcaatatttatctaaaaataaactaattattaaaaatattaaaatataccactttaaaatattaattcaattaataatttagtctttctttttgaaaaaaaaagtataataatttaatctttaactatgagtgaagctgtgtgaaggcattagtcttattataaattacgcttaagtacttaaatttaattatttatcataccaaatatatttaaaattaacttttagtgtacatatggttaattaagtttgtcattaaacatcgatgtggtagagtaatttaaatatcaagagaatggaagaattcatctcatgagcgtgcattggattattatttatggcttcaagttagcttatgtacactaataagtttgttaagtcattccctctaaatactatttgttaatttggaaattttttttggtggcgtgaatatcaatatttgacacgtggcaaaaaatatatcgttacacagttgaatagactcgaatcatagcagtcgacctaagaggagacactagccctgggcctaagttaacttcgggagctccaaaatggaagtttagacttcaataacttgaattcaattaaatatccattaatattctgtaccatgaagacatagaacaatcaaatacaggccccgagagttaaaattacacgaagttgcaatttggaagccaacttgggcacctagggtttcacctaacgcctaagttgacatttccaactaggattttaattttcgagaccgtcttagtacaaatggggcaaaaattttattgggacatcaactaaacataccacagacatgtttgaggtatcgaaatcagattcgaagtaagttcattttttagcacccgaacccggtgcccaggcacccaccgcccaagttgacaatttgtcaatctgggcgcctttcgagtatcagatcgacgatatgactttttcatcttctttgtcttcatcaaaaataggaaaatatgtactttcggggaagaaacaacacttcttgggtaccaaaagtaaggtccagcgcccaagttgcattttgtcaacaggccaattttgatgatgttttctgagaaatcttccaaattaaaaatcaactatttctagggaccaaacgaaactttcgaaaggccataactgggacccagtgcccagattgacacctggcattggcccatcgcccaagttgacatattgccaatttggattgtttctaatcaagttctcaaaaaagcattccgagcattttttctatcatcagagataatgaagatttaagcaaatttggggagaaaaccacaaacttgagcccctagaaatagggcccagcacccgagttgacttagtgcattggtttcgatcactcaaatgtcaagttcgattcagccaatgaatccggaatggtcaaaacgggttaggagacctcgttctcaagttcaagaaccttagaagtatcaaaacgagatcctgggagctaagaatgagtacccaacgcccaagttgacaaatggcctagtgcgctgggatctgcttatcctagggctgtacatcggtcggtttgggcggtttatcctatatattttctaacccaatctaaagttcgggttgctaaaatttaagtg

SEQ ID NO: 25659 - DNA, 3161 bp, Cannabis sativa
  modified_base (2605)..(2614): a, c, t, g, unknown or other
ttttttttttttttttataaaatggccttttggccaagacaatggtttgcccctggcggcactttttggtaaagacacatttgcacagttggatggccaacttttctttttaatgtcccatagttttaagtttaaactttaatatgtggatgtttgcttgcgtttcaatcacaatttaaacactcacacgcataaattttattaagggtttccattgctcgtattttcctcttaccccaagtaattgattacctactttacgcgcgagtagcttatctgcgtggccctcaatctacgagccatccttgattctgcctcacgatcatcagaaatgatcttattttaagcaaactcaaatatatttttaatgaacttgtcatcttgtatatgtttttattgcttacatgaatagttgaatcttctaccccacgtgttaggtttaggcattttttcaagacactttgatgtctcgtttaatacttttcccttagcgcgagccgttagtattcaactttatgcgctagtcgtagctttgattttcctttcttgtcagataggttttaaacaaaaaattacagttttttgatcagtttctcgtcagaatggtttgatcaaagcgttataacgattcgaccagtctctcgtcaaaaaggtttggtgagggagttataacagttcaacccctctttcgtcaaaaaggtttggtggaggaccttttttttgaagtaatgggtttgcattgtactatgtatttccatattaatttcggttggtcatacatatatgccccttaagtttttaaagggtttacgctttacaattacttgttgagagaaatgattattttattcaaaactgaagttcaaaatattacattagcaatgtgatttacaatcattaatcttataagaacttccctagttcaattatttattttaccaatcttccaggagcatctagttttgataaaacagaatctgatgtttagggtcaatccctaatatattcccacaattgtttcaatatccagggtcaatccttgacatatcacggggttccaggtgaactaatcctggttttagttgtttgtctttgactgctactggttggcggccagcttttcacgtggcagcttgatatggcaaccatagtgggccgacatctactcgtgtcacaattcttttacaaaattgctttaacgaattaactgccccttgtcttcttgagacgcgctccctctcgagataaccaaggtgtcccctcctcctgcagaggagggttataatccctggtctctcaagttaatgggcagattgagctaattatgggcattgccctgcccctttatatattgttgaaagtgtccttgttctatgagaccttctatctcatccttcaactgacgacactcttccgtggtatgaccaatatccccatgatattcacaccttttagttgggtgcgttttacatctcgcatgtttcataggctttggctcgctaaaagcgacttcctatatatgtgcgagatagatatctttcggagtttcattgagctcggcatatttgttgtgtttcttttgtttcttatccttgggaagccttttggaatcatctttcctttttgatcttgaggcttctgactcgaactcttcaatagaatcataccccagttgtattccgagttccctgacttgatgttatctgaacttgttctccaacttgtccattcgcaaatggagtaaatcccgttgttttggaccgagtcgttgacgaggatcaggttttctcaagttcaaatgttctcgtaggtcacattggtcatgaatgacatcggaccttccccgtcctacatgttgtattatgcctttttgattattactgtgacgagtgttctcttctcctcgcacgggtcgattatgagatactgtatgcctcgtggtacccctcacctcttcttgttctgctcttcctcttaaggtctgattcacctttttccctattggggtttgtgtgagttcctttcttatgaacttgaagagagggttggcgatttccatccgatgttccgcatatcgcaggctgcgtctctagattttcctcagtttcctcaagttgcatctcctaagagttctgagtatatctctgggatgtctcctgccccttggtttgagaattgcgaggtttgccttgtgaatctcttcttccaaggtcaggttcatttcaggaactattctcctgcactgctcttattgcagctatttcacgttcaaattcagcattacatcagtttgcttcctccaatcgacgcctaagatggcgattttctaattccacaattggtatgtacctggttgggtcctaggtgccatcttcatcaacctggttaggaatcaaccggtcgttgtttacccaaggtccgtcaagccaagaaccccaatacttggttttcctggagcttccagtctgttcatctgatgactcaatagatccttgaggactcaatggctcttttctagggcgatgactaattccttcagaggattattttcctcatcatcattcattacttttatgtcaggaggctttttctgagctttttcacnnnnnnnnnnaatgaaagcaccaaactattaatgcaaatttttgttaaccaaatttgagactcacagtaacgatttcacacagaaaaaataaaagctataaaaataaaagtatgaacacacaaggttttttacgtggttttgcatttaaaattctgcatagtccacgagtaaatcttattcagatttctgattgtttttcagggcctcttttgtatgagttttttttcgtccattttttgatcttgtttgccactatttataattacatagtgggcagttaattacaaagtttactgtaatctttttacaacgattatcccctagattcatgggatttgattataaatcacgctaagtaaatacagtttttatttagaattcacagagctgtgattatctcgcttttattgggccgagatgaatgcatattaaagatatacgacaagccttatctcatggggatgcctcactgggaagggagccgagttaactttgaagacgagctggagctcgtcatataacttcctgaagctgatattgcttcaattttgataac

SEQ ID NO: 25660 - DNA, 2489 bp, Cannabis sativa
  modified_base (1597)..(1608): a, c, t, g, unknown or other
  modified_base (2142)..(2153): a, c, t, g, unknown or other
aaaatagaacaattaaaataacagtggaacaactaaaaacaaccgtggaacaacagtgaaaatttaacacagtacataatattttttaaaaaaatttgccttgtaaaaatctctctttattagtgaattcaaagagaattacccaatagtgggattagagaaaattacactctataccctttttatattatcctcttttatttttacccttttttttaaagtctatcatttttacctatttttttaaacattgtaccaattttgcccttgtcgcttcaagatactctctatgtgactctcttatacaatacatataaaaataggtatttttcaaataaatataaaattaaaggtaaatttgattaattgattaataaaagaggcatttttcaacttaccccgagggattatcaagtacttgagtacaaataattatcaaaaagctacattttcctaaaatgactattaaaaaaagttgttgttcgaaatgcctcaatcaataataggagaataaaaaagaggtctataaataatctgttacaataataatgatggccatgccaaatcactttgagggtcaaatcaatgacattatttgtatgcagttttataaagttgtggttgtggaccagtagaccaaaccaatgtataccaacttgtaaacactaataataaaacaaaattggtaactagtactaatgtatgaattctaagatagaacaaaacaaacccataagtgctaatagttgactaatttaatcttgtaatatcatgaaaatgagaaagtaatagaaggatgagttattaatgctttagatccaaagaacatgcaaattcaaacaccactgcatgtgctcaacaaggacagcagtctctttcaatatatattacgtacacacacaagtgtgccagctggtgcttgcctaacaacactgtgtttggtaggatatatggaccaagaataaaaagggttaagaaatatttatgccgcgtttagaaagtcacggtataattagatttatatgtggttgaaagtaattatataatttgatatatttgattcactatctaattacactgtaatattatgttattggagataattgaggggtaatactctctccaattctcatgatctcctatgagaattgagtgtaattactctgtaattactaaatactttccattttaaacattaaatactaaaatatattattttttcgtgtaattactagatagtataattacactctctaattcttatagttttaactctttttaattctcatgccccctttgagaattaagtgtaattatattgtgtaaaaaatttttatttaaaacattaattactaaaaaatattattttcttgtgcaattactcaattactagttttttttatcaaacaagatattaataattataattcatatataattaccaatttacatccaaccttagatcttaaaatatagtataattaccaccttattaataattacactacctaataaccaagaccggccctgagttaaaatgggttataggcaaaaaaaaattttgaacgcttactataaagataaatgatatttttannnnnnnnnnnnaaaatatgtatattttttaaaagatattttttatttgagcccctaaaatgaatgggtcctaaacatgagcctagcccgcctatgtgcagagccggccctgctaataactacacaattatttcaaaatacaccttaaataagagatggaaaatatgaaagaaaagatataaatatgtatatatgtgatgagtagtaataataattctatttgattttttttctttcttagagtaatcttgaattgttagatggttgggaggtatattattatcatatttttttaccaaaatattatattataattttgaatattttgatatatattatattatatttgtggtttttaaacaaatcaaaatatcctccaagcttgttcaacaaaaaaaatatatcctccaagctagccatcctctctgaacttctctctcctcccaaacatagtctaaaataataaatcaaaattctgcaaagggaccaactcttttctgtttaaaatttttgatatatagtttttattattttaattaaaaaaannnnnnnnnnnntatatatatatatatatctgtcttatgacaaaattcttactttcttaattagaagtgtgtacatgcaactttgctattttaaaaacgagtggtctaatcaattagtattttaataattcgaatattaatatgtgacaaaatcaaaaggctaccttattagaaaataactctctcctcatctaatcagaataaaaaattatacaagagcataataatattaatataggctgttatatgaagatattttagtgtttttaacttgaaataagatgatatgtacatccaaatcgaataatattatgatcaaaaactatggtaagaataagttgactcatt

SEQ ID NO: 25661 - DNA, 3846 bp, Cannabis sativa
  modified_base (3682)..(3692): a, c, t, g, unknown or other
tgagaggtgggatcgtttcaaattgcatgagtctaatgattataaaacacaccattccagaagcttttaggggcacagaatttgaaagggttactatggccaaaaatttccttaaacaaattgaggaacgttctgttaaaaacgatatggttgaaatgacaacacttcttggttctttaatgaacatgaagtataagagtcaaggaaatgttgggattatggaaatgtatcatattgtctcaagattgattaatttaagttttatttaatttatattatttaaaaaatatatttttattagtttcttttaagtgttttattttaaataaaaaaataattacacatgtggcgctaatgtaacaataacatatctttcaccaaagattcacgtcaacattctgttagccacatattacagaacctaacagaagtcccactttacaacactgaatagtttaacgactacttttaacgaggtgaaaaaatcagggagcacactaatcatgcatgtgtcatactttgggggcaaaaatcctaaatagtcaaaagaaaatgtatgtatctatagaagcacacgaattataaatgataaactaaatacaatcttgttgtgcgatattttaccgtgataagcagccttagatcgtttagactatgctttcaagatttgacttataggtcagcctaaatcgctctttgaggtagtcgccacttagaattgggggaaatctgtaagcaatttcacaatcaaatgaatctttcaatgagaatacttcttaaaaatgggtaaaattgtgcttctgtgagttaaacaagcatgagaagttatggaggaacatttagcaaatcaagactaggactagcagagttttttaagaggtccagctaattatattcaaaacaatttaatgacaagaaatactaaacaacaaggaggaatgtttatacctagaaatctttcacttaattagttcaactacaacagtcatatttgaggaattatgccatataattggaagggactatctgtagaacagtataagaaagttttctataccttgcaggagaggactcgctacagcaactttctaggcattccaccagacaatcatgtttaggatctaagaagaaagctgcctgaaagttccaatttcgataactagaattatcaaacaaaaactccctcgagctatacttttagacacattataatgttacttaatcaaagaaacttttatgggagatagatgcttacagaaaaacgctcttgccctactggcatcactcgatgcagtgtcgacctatagagatgtgacaatgtcagcagaaaaacagttaaaacatagtttatagtacagttttagtttcgagtgtacaaaaagaacttacctgaacatacagttagtccacctctccatcatgtccccaatattaattatcaatgctctgcattgtaaagttagatcatttaagaacattgcaacagttaaattatttattaatgcacttggcaaactagaaattgcaaatcttcacataaaaaaggcacacacaaaaaaaaaggactggtttcaatatggaaatttttcgaataagaaaaccagcattctcaaaaggcatgaacatcataatctacattagttctacaaattgcatggccattcagatcaaactcatccgactgcccgatttgtgcactttaaaatgttacagcatgcagaatactgaatcaataacaaaacagccatttacaataaattttatagtcattgacttacccttccaaatgaagaacatcttcccagacctgtggttgcttgaatttttccctgcagatctgttaagcaataaacctagcacatatcaatgcaagggacgaaaattgctgatgggaaaagttaatcaattagaattatacctgaagtccttgaacaccatcagttgcaagaagagttatcatcccgtaatctgaatgagctgaagcaccacatacattttcatcggcggatccaacttcacctgcacagtgcgagtatttgccatgatgtgccaaaacagatataatatggttacaaaaattgaatactaataattttatacactggttcttagaaaaactctgcttgattcaatgacttgactcttcttcaagtcattaagcacaatttcaatggtttaatagttttatgaaacgtagatatcaataaatgcacaattagttttaagatcaatatgccacaagtacataagataaatagcttaatagtgatgttaaacctggatagcgcaaaaggcgaagataagctgttggtttatccaaacctcccattctctcaaagaaagactcctccaatttcagtgccaaggcaatcaaacgaagcaacttattcccagcacacctaaaacgaatcaaatatacacacccaatccaatccaatacataacacactctaaaacaagcataaatcaaccaacatttgcacatagtttaaatgctcaaatgcaataaagaacattttcaggttactaggtccgttgttcttgtcccatcaaacatcaaaattatgaaagttgaaacgaacttgcaagtttcttaactttctttaatatgagtggcacatatatagattggacaggagagaattcgaattgggcataaaaacattgatgacaacaatgaaaaactcacgcaagttttctgtagaaagtctccattgtaggtctccaagaaggtagagtttctgcattttcgaaataacaaattccccatatgattaactctccaacacatagaaattacatcatgtactgtatgtattggtaccttgagaaggccactgattcaatttaactggagcagaatcttcttccaaaggaccaatataatagctctctttggggtcccctgatttagtcaaaacaaaattgagtaaagccataagaacaatcactaaaatacactaaaaacagttactcgattacctttgggggccaaatcagggtcaagactctcagcgaaaagtggggtatagcctcgatgatccttgcgacccaacttcatcttctcctccaaggggagtgagaaaagcttcttgctctcgttaaaaaccttctggaaaagctcctcctccactccatgattcaccagataaaagaacccgtgatccgtacaagcctaccagaagtgacgattccgcgatatctatcaatttatttatttatctattttgtttgaataaatattaactaaatattgttatctaatagcggacctgtaggattgtagcggccgtagataagcggtcaggggaggataagtcgacgatgggaagtttcagaagctccgtcgtcaaagtcatatctttctactttgtaagagctcagaacacttggtttgattgatcacggttccgccattgatgattatacatttctgcttcaccacgctgcattaattatatttttttaatatgtatttaccagtaatttgcggttcaactattccaactctcattcagtttatatttaatctttaaactcaaattttagagcgaaaaccatttagggtgtcgttccataatctatattaatttagggaaatttaaaaaaatatgcattaaataccttaatattttatctctaaactaatacagtagaagctctatttaagaatactctattnnnnnnnnnnntctaatttgttataaaaaaatcaagtcccaatttgggcagttataaataagaataacctctaaattgtaattaattagtctcgtattaacaaagtatacctctatataagtataattacatcttaataaaatatatacatgtattttgtaaatt

SEQ ID NO: 25662 - DNA, 2019 bp, Cannabis sativa
gtattcctgcagcctttagcctacgaataataagagtcatatatccttattaaatgacatcgactaaaattaataagcaagcacgctcagaaaaagagacttaggttgccattaatttcccaatctacaggttggttgaagacaaaattgacaattaataaaaaatctcctttgaaatggggtatcactaacaaaattagaataaaatctccatgcacaagtgcctctagtagcccactattcacttgaattatacctcaattaaagaatcaacaatttttctatggtactagaagttctgtgtgaacattcatttaactattgcttacctaacaagacactgaatactgttacactgttttataaatataaatacagaggttctctgtagctgaaattattgcttacctaataagatttctcatctctttctcagcccaagtcttgaccattttcctaggattgtgcctgcagtatccatgtctgaagcgatagtccccttgtacatatctatctctgtccctgaaattgaaaaggagagaacaagataaatacaatatcaggcttaaacaaagaaaaattctctggataaaagaattggcatgctgctttaacttagaaagtgaactatagtctattgaaagaaactgaacatttatcacaaagtccgcgaaaattctctagaacaagtagtcattctcataataaaagaaacatagatatatttttcttttgcagttaccacattaaagaatttacacagattcaaatacttacttaaataccaaaacagatgttttgtaaactttaatggcgagttcctggccttctgatttggttgcgtgataaacgtttgcctgcaaaaataaacagacaaaagtttaaacaaaacctaaaactgacttcggcaatactctcattagttacggaaagcttaacacatattcttcaaactacagaaggcaagaatagtgaaagcttacttctttaccagtcgaaatgcagccattaatatcatgaaatacaccacggttcagcattttaaataaaaccatccgagttcttgggtcaattgcctagaaacaatcatatttggtcatattctatataaggagataatcaaacgtgtgaaaaattccattgaaataactaaacacaccgagataaatagtgatcaacaacattagcaagcaaagcacattgataaaaggcaagaattttcgctcacctgctcaacagtggcacgatcagctttctcagtagtttttgttctaccaattgccatatccctaaagcttcctcgaattgcagttgttacagaattcgacatgccaacattgattctcccttcccactcctgtaatccaaaccaaaaccctattgaatttcatccaattcaaacaaattaatgaaatttacgtctcaaaacgaatttaactacacaccatacctccaaaggcgaagctcggatatgattagagaacttctggttacgattattgagaggttgaagagtggaagaattaggtcgtgaatgaagccctccatgagcattaggccgcctagaattaagcgtaaaacccccttctactccatcgtaatcgtccttggaatccaagtagtccaaagcttctccgatttcagagtctgaagaccaagaaagctcaccttcatcatcttcaacctcttcttcaacaactttcacagctccattcactactatcggctcaccagtctctattttttcctccaccatagccatttagctctcaacgaagctgaaccacgacagcgcagatgattatggccgaacgaattcggaagaaaacgccgtcgtaagagccgagctcaggcgaactgaggccgagagagagagagagaacagtgtccgttgtgttgtttggcggctgagtctgttaatggaaaagaggaggagggtttttatagttggtccttttatttaatgttttagcaattaagtccctaagtttctataatatccttttactttggggtgct

SEQ ID NO: 25663 - DNA, 2079 bp, Cannabis sativa
ccataggaacccctctccctcccagccactccactgcactcacggagaccaggtaaggtctctcaatcttttgtgttttatatttttaatttattatcgttttattttatctaatttatggttgagagacctacatttgtacagttattttctcttcatgcaacaatgtatacgctagggtgtgttcaaagttctatatatgagtattgttatgttccattttattcatattaattcaatttcaaatagtaaatgatgatattttcttagagtaattgttatttttgtgaacgccaacacattctcattgtctagagattttggttagcaaattatgtatattttgtgtttatgattcttctttttcattttgcttatgtattattattaagttttgatattatgttacttttaatgagtaggaaaagatttttctaatttcaagagatggagtttttcagcttaacatatttgtttttatattacgccaggttaagttttatttatggtaagctctctatctcaagttaattcattttgtttaatgcgttaattatctatcttatatattttcttttacataatgtcttgcaacttgatgatatggatgtcatgatttaactaatcatttcattggtacaactacgtacatgtgattcttcttatatatgaccagaatgcaaaagaaacttaggtggcaaaagaaataatttttattctatccatttgtttgattgtattttaaagtattgaaatgtcattctaactattttattttgaaatgaaaggaaggaccattccaatacaagatatatgtgcattttaaatttgattcaattcctatttctattctcatttttattcctacatttttatttcctccaaccaaatgacagaaaagtttattccttattatacagtatctaaacatatttttgttaagtatggtgagtaccctttaacaagtttttgtactttatatattgaaatttgatttgaagtggtgattttctatctttttaaagttatgaacttaatattttcattcacaaatggagttaattggaatggtcctacacactccaatactaggttcccaaatcttagtgaaacaaatcctgttgaattcgttaatgaggtaattcttaaactttctcacgttgcttagtagtatatgttctcttattcctattattttagtgatactgatttttatataataagagaaaattattgatatatattctaattctctagcaatttgtaatagtatatttgtctattattttttcttttctctattcaagtaatttttatgagaagattataaaaatttaatttagaattcagaactaatttcagagttggaccatgagatgagacatttagatatttgtaacttttttttttttttttgttaatatttccataatttttaatatctcccacaaaattatcatcataatacatattttaaaaataacaaaaaatacttctaatttgaaactttttattttatttataatactcaacgaaatgttatattttagattatattactcattcaatgatacaaatttatatactagatattagtttgcatgcttagacttgcatcatttttattatctaattattaattaaaatattaaatctaatgcaattaattctatatcatatttcttaaatataaaaaatttaattcaaatttgaatttagacttgtattgaaaaatatctagctaatttatcaacacttttatataattagataagttacattttaataaataataaaatttaaaatttaaaaataaatattttataaagaatgataaatgaattagttgaagaaagtaattaattagttgatttaacatttaatgtaaactttatttaagatttatataaaaaatatctatttaattttatatatattttaaataattagataagttatattttcataaacaataaaataattaaatctattttttttttttaagaaagaattaacttttttatgaaaaaaataactaaaaattgatttaactgttaattttaacggaaaaataataaa

SEQ ID NO: 25664 - DNA, 1705 bp, Cannabis sativa
ttagtctttctattgaagcacctataaatttccaacagttgcttatgggaatgagatagctgtatttaatagtgctcatcaggtttttcatttcctcattctctttgttgttttcctatgtctatatggtttttactgaatttggtttcctttgtaaactatatagatgtgtttggttagaggtaatagaatagaaaagaatcaatttttattctattccttagtttggttgcaatttaaagtattagaaagacttttttatcatttcaatggaatgttctatcattttagtagaataactattctattttgaaatggaagtaaagattattccaatgcaagaatgttttttattgtttttgtttatgcattttaaattttacttcattcatattctcatttcctattcgtgtattttcattcatttcaaccaaacgtatcctatatatttagctgctctgcccctcctccaagtgctatactttgttacttgaagatgaataaattttttattttatttaacagatatcaacctggagtatgcatctagcaaagatcaattctttgatattgtttggagaccacattctaagtattaatattttcatatgggaatttaaggaaattgattagaatcctacaccagttggacatatcgttctatatgataattttactcctagctgtatgatgcaccctgatacttacttaaataaggtactctttctgttcatatagaaattttggttcaattcagcaagtatgggaatcatttttttttttttgagggcaatagtttgtttatctctttcatgaaaaaaaaatcataatacaatcctttaaacatattcttattgggagtcaagaaggttctctacagctttggaacatcagtacgaaaaaaaattattcgagtttaagggatggaattctgcaatcacaagttgtgtttcatctcctgctttagatgtagttgctattggttgtgctgatggaactattcatgtttacaatattcgttaagatgaggaatcagttatgtttactcattctacccgaggtgctatgaccacattatcttttagcagaggtaaaaaaaattgctaatattggggcacaataaattaacatgaaaaatcaagtctgcttgaaattttatgtgttgtaggtggagaagttcatgtgatgatttgcttttccaccagttatcttagtacttaattatgtagggatgatgaaataaagtagttgttgatttctgttttgtttcatttctgatatttagatggacagcctcttctggcatccggtggttcatctggtgtcatatctgtatggaatcttgagaaaagaaggcttcaagcaattataagagatgttcatgatagttcaattctttcactccacttctttgccaatgagcttgtattaacgagttcatccactgacaattccatcaaagtaagatttttattaataattcagtgtacttagtcaattcttttacaagtctatttatggaacttctttttcactttataagactccaagttataagcaaaatagtgagatatctactgggcacttagcccattatgattaaacaaaagattttccaattacattggcacaaaaggattgagctaatttgtttccaaaagtttgaattattacgactaatcaccaacaatctgaaattagaggt

SEQ ID NO: 25665 - DNA, 3959 bp, Cannabis sativa
ccttagaaactaaatttgagagattttcaactgctcacccaaataaggccagccctttagtttttactattcattaccttatttttttccttattcaatttcaaagtgttaatagagtctgaataataatttatcctaatccgtgctgaaactttcacaagttaaaatataaaattatacctctaagtatataaaatataaatattgtatatcgtttataagtatataagcttctccttatcctctttgtaatttgaatttcacaatacatattacacaatagaagactttcatgttatgttcacatggaacaatttacacttcacaatcgaaattaaagtttaataaattaattttgtcttattatttttttgcagcattcttcaacactccagtggagacagatgaagctggattaagggcttttcttattttgatgatattccaagcagtattacccaaatgaccaacagttgctagagcatctgcagtattttcccctgcctcatctccgtacctgagttttcaattatcaaactttttattagttattgcaatgcaataaagctcttcactttactcactcgtaattaacttcatttctctactgacctcttcttcacctctcttgaagcagcagtggaagtggccaaaagagcttgcttttctgctacttcaaccgcatctaacaccttatctgttgattatttttcagtatatgatgcaatatgcaccactcttttagtatgcaaattaagtatgtaagacagttatagttatagaccaattggtctaatatgtattgaagaagaaaacttactaactgcatcaagtgaagccaataggacctgtcccggagcagtggcaatgaatttttccccagctttagatttgaacatgggtgccataactgatccagtggctataccaactccatccagcattgttttgcttaatgcctctgtcatctttgacatctttttcactctgttaacaacaatgcattcagtaccaaatttcacctcaaaggctcaaactaaaagtatttcaacccactatgacatgtaatgtaatatttgtttgatgataagacaatatttgattgaacttacgtaccgtttcaaggcaccaccattgttgatgttctcattttctttctttctaacaccacttttcacctcaactccattattattattgttattattattagcttgaatcatttcccctcccttcagtacctgtttatttattccccttcacttatttcagatagactatccaaaattatgggaagaaaatgttttgataaataatcaaaaataaataaatttattataataagaaaaaaaaaattaatatttttatgtataattttttatatatataaaaatacggattatattatattatttacacattatttacttgttttatatttatatattttttaagctaactaaaaatgtagttataaaaaataagaaaataaaagcaaataaaataaaatttgcaaaaatattaaaaaaaaattataaaataaataatggcgagacctttttatattttaatttttataaattaacttcttttattttgttatcttttcgtggcaaaatcttttaagcttaatgtcctttgtaaatttgaagcgtgactcaaatattattgttaaatattaattgaataactactttgtatacaagtgtacacgtaaaagtaaacttttgaaattaatacaataataatctaattggtattaaaccataaattattttgacaaaaaaataaatgaaaagattaagtgtaaaatttcaaaacatgaatttcacagcaaataagccaatatatatatatacaatttatatatatatatatatttatatatattattttagacctttgtaaattaaaaagaaaaagtatactatatagaagtggaagaagtttgtatagaaaagttgtataggtgaaaagagagtgagggtgtgtgacctgattggcataagcatcggtcaacataaaaatgcctttgacaatatgaccagtccctccagcaattgccttagccaaaaagttattgtagttttcaactctcggagcaaactccttccaatcaacctcacctttactttgagcagtggtcgagtctgaaaagcacgaattattcttcaataaagagtcgagagtggccagatacccccggtggtgctcacaaaacgagaccccgtagcttagaggaggttcatcttcagtcatgggcaaggagaagagatagttgagagaatccagcttcagaacgggctcatctttggtcaatggccaagtaaggttgtttcccacacttactatgatggccagacagaggtcttggtctgagattctggtgagcttgaagtctccattggccagctccagagcttcccctgcttccaccaaatgaactctgcatactggaatttgaagcaggacttcgtgtctaatgtttttgggtatttctgggttgttgtaataaccgttttgatcagtacgaggtcctttcatggcggatgatgatggggttttggagctgcgaaaactgaagcatcccattcttttctgttgtcgtttttcttttccttgcagattatgttattgtgaaggaaagaaagagagagagagagagagagagagagagagatgagattggataagaactgattctgttgtttaaaaagagttaatattattattcgattcgtattggtattggtattggtaaggaagaatctataaataaaggaaagtggaattatgtgactttgagtggaagaaagaaaggaagagaaaacttatgagggagtatttatgaattgtattgtattatatattataggtcggttgaaattaaatggaggagtttgggtgattgcaaatgtatgtgttcttcatctcataggctttttcagccagaattttatctttcatcttcaaagaatacaggaatgtttcctattactttattttcaaaataatatatatgtttcttcattaatcattctttaaactgtattttcattttacaataattttttaatgccgaaaattctgtatgagactagtgcaaaaagagctgaaatttttgttacaaaattatatgtaattgattataagtgattatgaatttcaatataaattttgtaatactgagaacctacacgagtacaaaagacattaaactagaatatttttttaataaatcatgcaacacagcaatcaattaaaataataccatataatttaattgagacatctctaatgaacaccataagaattataattagtttaatgaattaaataattggtacacttaattttcaaattttgacaaaaaactaaaaataaaatcaaaagaaaaaaaattacagcattacagataaactaaaaagcacttatattcagttttatctaccgctcagaagacacaacagtaaaaaatattgcggcatgttcattcaacatcgtagcttgagcaccaaattattgtacaaagtacgtaactacactattaataatccattcaataacagaaaacttgttattttcaactactaatagcaatttgatgacaacaacaaaaaaaaaaaaaaaaactaacaacaaaactatgtcacacaaatacgactaaaacactcaaaattatgtcacagagacaacaccaaaacatctaaaatcatgtcacagagacaagactaatcacaataatataaattgaatcgcaatagtaaaacacaaccccaaccaagtcgtatttatgtccaaagaacatcagctggcctgtcaaaaaagacaatctccttctataaatataaatttatacattacaacgtttaatatttagggtagaataagttagaatatttttaagagaaattaccccatatactatatttttaactttttttcaaatttacggtttg

SEQ ID NO: 25666 - DNA, 2350 bp, Cannabis sativa
  modified_base (1983)..(1983): a, c, t, g, unknown or other
tttttctggatgccgaaataagttaagggtgcaccaatatattccttttaagggggtgcattgtagaatcacccaaaaatatataaaaaattcaataagatcataattttgcgggaaactaatcgaatttattcaaagttgtatcaataacgtatattttttcacataatgtgtcaataacgtatttaagtgtcattaatataataatgtcatgtgagagagacacgtgtcatgttattaatggtgaagggatggaaggattaatacacgtgatggcaccgaaataagcggtgtcgtttagccaaataacaaaggaataacaaataaatattaaagcagctcaatctcattctcaacgccatgtccattgtccacctcttaataaatttaattttttcaaaaatatttaaatatatttattatttaaaaagaagaagattatataacaatgtactacatcttcattacattatattcttttgtttattagattggctcatttcatcacccattggctcccacaccactccaaaacaagtcctacaatccaaagacacaagctcacttgggaacactaaaaaaatctattgcatatacatataaatatttaaataatgattatatatcgggcgggttattcggattttgggtgtacgagttttgggtttatgggttttggactaaaaaaaaaacacctatacctaactgcccgtgagataactaggttggtcgggtttacgggtggacgggtggacgtgagaacactgggttgtccttataataaattgtttatattataaggtaaatattattttggatcctgtattttttgcaaaagttactaattgaattctctattttgttaaatgacaaaatagaccttctgttttgttaaatggtaaaaatatataggaccatgagctcaattttcaacaatttaattttttaatatataatcaactttaagacaatttctaacacgaacaaatatagaaaatgtaactagctagttttgtcataacattttttagatcagattataattagttttattttgacaaaaaatttgttcatgatcctatttgtacaattttaagaaatacaaaatttattttgtcatttaacaaaagaaaaagtttaattaataacttttaaaaaaaaatctaaaataatatatatttatcaaatataatatcctcaatatataatagtgtgaaattgtctaagatatatacaataacatatattttaataaatcaaatctatggaatccaactatttacgtacggtttggtatatgggtccaaagacaacccacgtaaccatgtgtgtgtgctattttgagtaaccatgtgtgtgtatattttgagtgtatcgtaatacaaatattttgagtattaatgtaatgtaatttggacacttatcatgaatcattatcaattcattatatatgctttttttttctaattcatagaagtggggacatcatatagtacatagaccacatttcaatattacttatatattattgtcaacaatttttgactatatatcagtaatatatattttaatatataattaatgctttcatgcacattctttcaataattgatattcccaccaaatatttatactattattaatgagaatatctctaactgtttatatatagtgatcaaaccttctttgagatcaactggtgaagtgatcaagtgcatgcaaataacaattatatgtgatcgaggtacatgtaagagtcctcaaaatttttaagatttttattttatttgtaaaataatccctaatttcttcaaaaattatgtaattgattcccttaattaattatatttatttgtaaccctttaggataagctatattgcctatttatatgaaaatattacacacttagtgctggtgtggtgtagtacaccgtaatatattgtattgtattatgttcgattatattgtattgtattagtatnatttaatacaatattatatttgatattgacttgtactaataagttgtataaaattataaattctttacaataataaacttgaccccaaccctgaccacgacctggactcagacttagactcggacccgaatttaaactccagacacggaacatgtcacgaaccccagacccgaaccgggacctcaaccccgaacctagaccccaaacctcggaccctgacctcggacccggaccccagaccacagactcaaacccggtccaggtaccagtttgggttcgggctccaagtttgggtctggagttcatgtctaggtctgggtccgggttctaggtttgggactctggtccgagtctgagttcgagtcca

SEQ ID NO: 25667 - DNA, 1742 bp, Cannabis sativa
ttttttttttttaatatagttgaataaatgggttatgttcatgtggaaagtgtttgttttaatgtctgaatgaagataaagccataatagaaccccacatgggctggggttttgaggggagtgagaccgtatttgtttgtgattccatggctacccttgtcccatacatggccataggggatgtcactacttcctgtcttactcgcactctcattatatccctttcggtttgtcggctactacacctcaagctgactccgatatgacctcatatttctcccattccatttttttctttttctttctttatttatttatttaattttttcttttagaaaaattggtgcctttctctctactcttcttattcatataataaattgtgttgtgctaaaagaataatatttaatggacttactttatgtattatttttttaattttttttttcaaatttatggtttaggtttctaaattgttttctccggtagtttctatatgggttgctatacgattttttgttacgatttaggttgcaacgctagttgcaataagaatttttatgtagaatttcgtgtaaataccaaaaaaaaaaatgttttagagtgtaaaaataaaaaagttcctaatatcgattattattgcatgtatataattaattatttaatgtatcatatttttgttttccttgactgttagtaatatattttaactttttacttttttaatcacaaaaataaaaataaaatttttatttttgtgattttacttttagaaaataaaaatgtgtcatataactagttttgtttttaaatttaaaaacaatatatgaaagtgtattatgtaactacttttgtttgtattcaagtgaggaaaaagaaattgaggttagagaaactaagtctaggttcgagtccagaattgggatagggtctaggtctagggtccggggttcgggtttggatccaggtccgcgatagagacgaggtccaagtctaggttctgggaccatgtccgcggtgcagggtacgggtccaggtctggattcggagtttgcattctgtggtctgggtctgggtctgggttcaggagttgggtcgagttcgagctcgggtttgagtctgggtttgagtcagggttcgggtcttggatcaagatttaggatctagtttttggatccgagtgtgggtccaggtctaatttctggttcatgtccgagtttagggttcgggttgagaatgaagtccgattctaaaatattaatgataaaaaatacaaatagagtataatagtaaaaaaaattatttaaataaattttcaaagtgattttttttgtttttaaaattttaattttttttttatttttaaaattaaaaagtgaaaacatttttacataacatattttttcaaaatatttccaattttctaattaaaaaaaaataataaactaatgaaaacaatgttacaaaatgcacccatagtttctcatatattgtgagtggaagataatgaatttctaaattattcattagtatagatatatagaagggtataaaagatcgtatattataaatatcagctcacattttctcatacatacattcattgtaaagattgtgtaccaacctatttcgatctaccctttgatgatgaaccagaaataagaagccggatattatatatttatctgcctcaccttctattccattgccaaatattagatagaaaacaaagtacatctaag

SEQ ID NO: 25668 - DNA, 2006 bp, Cannabis sativa
attccaagttctatggtggatgttattactactacaagtttaccttttagtgacactatttagtgacatgcacttttgtacgtgtcactaaaaagataggaatgatttttagtgacatgcataactagactcttattgtttggtgttagtcacctagaatgtgtgtcactaaaaatatgaagggtcactaaagagtaaaaccaaaatttttctattttttattaaatgaaaaatgttgacttatagagacataccacgcgtgactagataaacgtgtggctacttgcctggtgtgtctacacgcttttcgagtccctccttgtgtgactctgtatgctaatacaatttataaaatttaaataatatttatcttatttatttatattaaatataagatatgagatacataaatatatatatataaggtatcagatttctttattaaataaataatataataaatatataaattatacataagaaaataaatcctagagctaaccgtacatctttttttttttcacagcccctcttgcgcctcctatctctctctttgaaatctcaacatttcatttgcttcacactcaaagactcagccttaggaagagatgatctgaactacattggccatgatcggcgtttctcgatgccagtagccaaacaaaggcctagaacaacctctccgctactcaaagcattgctcgccgccgttgacccaaatggaccactatcagccgctattggcccaaccagagacccatttgactatggtgaaggtgctatttttgacgactagatctgagatttttgtcactgaaacatttaggtactgccctcatattcgtcttcttctttttttttttttcattctatcatatttttttcctaccattttctttttcctttctttgtgtatagatctctattatagtgtcctctctccctcttttgtttgactagtttctctacagatttgggttttggtttggctcccaaaaaattattgtgtttcttggttttgatttgggatttaataatgcttaaagatttagcaattaattaacttgaaaaataatattgaaccaaattatgtatggattttgacggattgatttactatttacatatacattatgtatgtatagatgtaaaagttaaatatatataccggtacttgtattaataattgtaatgagtgtataaaatgtgctaattgaatattccaggtaaacaaaactagtaatgctactgagttattcgagaaggtttcacagaatgtgaaagtgaagcattatagtgaggctcttgttgacattaatgctacaattgatgtagaccaatctctttcagaagccttttcatcgggcatcaattcttcgacagctatgaagcttgttggatctaattttgttttaagttttctttttgttttatttaggcctaataaattttaatagtatttgttgaagcacttgttgaattagtgagccatgtacatagcattaagattgagattttttttcttctaatatttgaatcattgccccctaatgtgtatttttttatgagtgattcagttaaaaaaaagtttatagtttattgttttgattaaattatttatatatatttatattacttaaacaaaatctaaatgtatttatataatttgtaatttaaattgataattatactcattcaaattcttaatacaaagttgtattaaattaaattaaatattattttttttagaaaattatttaatatagtgacactttttatgtgtcactatatctctaaaaatattaataaaaaaagaaaaaaataggatatagtgacactttgtgtgtgtggctgttaactttttagtctgacaaaatccgactctatacgcttatagtgacacgcacaaattgaatgcaaaaggttttagtgacacgtgtgaagtgtcactaaaaattatctttccagtcacccttattagtgacgcgcgttgaagtgtcactata

SEQ ID NO: 25669 - DNA, 1493 bp, Cannabis sativa
aataaaataataagagtacaacataaaaataacatgaaatgatgaaatcatcaaaagacggtattatgtaaataaaatcttaaaaatatttaaaattctgtataactgtattttgtaattttttttttattttgttgttaaaatctcacattgctaacgtgtagaaatataacatcatatataagataaatgaactattattctcattgtcaattaattttgagataaagctgtatgtaccttatccactttcattctaaattctaaccgtgttgttatgtgggtttctatataaaaaaattgttttgaagtgtaaaaatataaaaatctctattatttatatatatttttttttaaaaaaaaaaaagccaatcattttcacgtgtgaaatacacgtgtcgatttctgagtagatggcagtccaaagccattatttcaccgacagctggacagtgggcacacaatctatagttttattaaacacgtgcttaattaccggactaaccagtcattcttaccggacctatcggtagctttacgcacctgctcataataaccatttttttattattttttattatcaaatgtggagaaaaacaaaataaataaataacggtcaatatcttataaataactactctctcttctctacagagaaaaaatctctctctgcttttttgtgttgttgtaagctttttccttcaatcaaaagtttttgtgggttttgtggccaagagggtttgatttagtttagtaggcagtgaagtaattaaaatttttctttttaattttttggcttaatttgagctgagtttcacttgggattttgcttaattttttttttctgggtagatggagatggagagagatttcatgggattgagctcaaaagattcaatttttatggcgaaggaggaagttgccaatgatgggtccaaagactcaggttttttttttttctttaaattatatttttttaaataattattaatgttatttcatagctctgtcatttcaatactatctattccatgctttgaattatggtaaaattttgcttcttttttgtgttctaagtattgggtttgaaagagagaaaagaaaagggggaaatggatttgtaattaaaaaagaaaactttgttctgttaaaagcttttagcatatagatatagttattaattcatattatctataacatgattgggttttgtttatttatggttacttaagtgtacatccaactgagagtacttgttggttttgttttaatgttattttaaggttatttcaagggtttaggtgctcaatggcctttttcaaacaaggtttctgctctgcctcatttgatgtcttttaaggttggtcaagatgataaggttagaaaaactatggcagactccatgtcttctggatttggtactctcccaacaacaatagatgcatttgaccaaaaccagagaagaactatgcttgaatttcaggtttctattt

SEQ ID NO: 25670 - DNA, 2866 bp, Cannabis sativa
tttacattaatattatctagacaacctaatttaaaatttaaactatgatatttattaataatattttatatattttattacatgtgtgtttgttacatgtttgtttgttttatttttaattgaattaatttattagtaaaatctaaattaactatgattaacttgttaatagatgcaagaatctaaattaaccataattaacttgttaataatttttacaaattaaattaataaattttgataaaacctattatttgattgatttaaatggctatgattaaattgttaatggatcgcatgatctaaattaatcatagttaattgttaataaattaattaaataatttgtaacaaaggtatagttttcacatttattttactatattataaaattagtaacatgataaggcctgtccaaatcaacttgttatgtaagactatatattttctttcggcttggatgcatatagtgacccatgtattttggatattgaaattcccaagcagtattttttacttttttttactgtaggatgaggaatttgatattcattggcattgatcacagagacaggtgtagtgttgggagaagatgatgctgaaaataaagtcttatagggaatttcagcttcattaaatgtgacacttctagccacatatattcttccactagggtgaagacatctatacccttttgggacatactatactctatgaacaaacacttagatgatctaaatgacactttatgagtttgataggatcttagtagggggaaacaagcacacccaaatttttttaagaggttgtaatcaagggcacttttaaacagcttttcatagggtgagaagttgttgtgaataggggtgggagtctatttatgagatatgaggctgagacaaaagcttcccaccaaaattgtagtggcatctcagcttgggctaagagaattaaactgacatctacaacatgtctatgtttcctttctacccttccttgttgttggtgtgtatggggacaggagtttttaagtactataccagtagtgagaaggtggtttttgaggggtgaaaactctttgcctaggttagtttgtatgcttttgattttagtattaaaatgtctctctaccaaggcattgaattgattaaaaatcaagggtgcttcagctttagttttcataggaaatatccacacaaatttgctaaaatcatcaacaagacttatataatacttgtaaccatccatggaagtacaaaatgatggtccccaaacattaatgtgaaccaattgaaaggaagttttggttttattttcagtagtcttaaaactgaactgatgcagttttcctacttgacaagcaccacaaaaatagacattattacatttaacagaaggacaaacatgtgtaagaactttggctaaaactagcttggatggatgtccaagcctacaatgctaagcaaacagacatttagatttatctaacacagggttgctggtagtagtacaattgaaggctactggtgtactacttttattttgttgtcttgatctgaattgagtttgaggtagggagggtggctttgagggctgcacttgaagcttgcaaaggccattactaagagtaccctttagaagtacttgtctcgttttcttgtccttgataagacaacacacatcattaaactcaagaatgacattattatctttggtgaattgagaaatgcttaagagatttttggtgacatttgggacatgtaatatatcttttaaaatgagacaatgattagcaatattggaacttatagaatgagaaccaattcgaagataggcatagaattaccattaccaacaacaactttggcttttcctttatagtccactgagttctgcaaattttggaaatttgttgtcatgtgatgggtgactcttatgtcaagaaaccaggcccctgatatatcactggtaatgggagttttagcaagattgacttgaggattacttgtgtcactattggagttttttgaggaagcaggcccagtgaaggatatatcgaatctgtgatagcacttatgtgcactgtggcatgcttttccacataattgacagacaggtctgtttcctcttcctccccaattactcaagtatcctcttcctcctctattgttggatctttgatctctgccattataacctcctctgtagctgttattctgagagaaattagctaggttggcttgaacatttgagagagtatctatggtgtgttggttgattcttaattcatgactgtggagcatgaattggacttcttgaagacttagaggattttcacgagcaatgagattaactatgatagctttgtattcttgtcccaagcctcccaagatatacaagatcaaatcctcatcagagatttgttgtccaacaacagcaagagcatcgacataacttttcatcttcaagaattattcctctatagatgatgaacctttcttggtggcctgaagtaatcctcgaatctgcagaactctgaccctagatcttgaggcaaaaagttgagcgaaaatgctccatatctcggaggaggattgacagttaatgatgtggccaaacatttgttcagagacagagttcatcagccaatgcatgaggaattgttttaatctttgccattgaaggaaagcagggttggggaaattaccttcaagattctgtggtggaggagaaatttttcctagaatgtatccttcaagattataggctctggtggcagcaagaaccaaagatctccaaaaggtgtaattagatctatcaggacacagatttagtggaagaaggttgttgttggggagtgcagcct

SEQ ID NO: 25671 - DNA, 2155 bp, Cannabis sativa
ttttgttatttttgtgcatttgtgaaattaatccaataattattctattttaaaatagaaaaaagactattccaatacaaaataagaaaaaaaaacaattttttattaatttttttacatgttattcttatgttttaattacacaaatttagatgactttttagaaaatatagattgattttccgccacattgccataccaaatttaatagttttttttttttttcaaaaaaaagaaaaatgaaccaaattttattgcaatttacttaattagtaattcatcttgcaaataataaatcatctaagactactatttggaaatatggtctaatgcacaatatagcattaaaatacaaaatatatttatataattaataaataatacaaattaataaattaataattgaaaatatactaatattgtttataattaattaaatattatttacaacattatgataaaaaaaataataaaatgtatattatattgtgtgataaatttattacaacccaacaaagaaaaacctaaaattaatgattatcattaattaataaagaagccaacacatatgtacactcccacacgtgcacacatcaacgcgaagattcatgtgtaaacagatatgtatattatattattatatacgtatatataggcaaatacacatacgtaactgtacatataataatataaacatttagcaaagagtattatgtataaaatgtcatgtcccctcctatatgtagtacaacttgcctatatagaatctacatttatacatatattaatgcttacacgtacacttcctcaatttaagattatcattactttctctctcgcacgttagtatggctcaagtattttcttccaattatctgcctaaaatatattaaagtagaaacaataatcctaagagaatcggcaagaaatataatggggcaactaaactatataataattaaattgaaatttggctggattttataatttgatatttgatagattaattcaattatttcataatctgatacacgtgcaatggcgtcgagatattcaaaaatactatgtacatgtacatgattaggtgtaacgtgcgcgcgagctaagatagtacgatacaaactaggtgatattcacaaactggccaaagcggtgacgcatgttggtatgcatgctggtagcatattgatgcttaattagtttgtacaacagtgatattttcgtaaatatcttcaatattattcggatcgggaagagacttgatattcgctatttatttagatccatgaatataatggtgcaatcagatttgagaaactctgtgatttggtacatggtgatgaaaacatatgtctacagagcaaaaatcatatatattcttggtagaagattaaaagctttattatgattcaaccatagttgaaggatataagctattgtgctcggttcagccaaaacaaagatggagtgaacaggtttggggtagattcaacactcccaaacatagctttattatgtggatagctgtacaggggagactgaggacaaaagataggctgcataagtttggtatttgtgaaaataccatttgtgtgctgtgcaaaatgcaggaagaaacacatgaccacttattctttcactgcagtaaagtagcaggttgctttggtgaaattgcaacctggatgggatggaaaccaactgatgccacccttacccaaatcataagaatgatacaaagagcaaaggaaggaaaattcaagaagaaaactatggctgcttaccttgctagcctagtttacaacatatggaaaatcagaaatgaagttttatggcaagataaagagcctaattggcatacaatagtgaattgcataaaggaaaatgtaaagcaaagagttgtattagtgtggcctaaggaagttagtaaaaaacaggaagattagtttcattttttatgaattgtatagacaaattaagggccatggcttggttgtcatggtgcttttaggttgtataaattagtttatatgcaataacactcactgattcatcaaaaaaaaaaaaagataagcttagaatgctccttcaggggaaagtacctagtgtcacctctgttgggttttatgccctaaataaaactttgtttcaatgtaat

SEQ ID NO: 25672 - DNA, 1995 bp, Cannabis sativa
catgtcaaaatttattatttttgcactcataattaatatactcaatctttgattaactttatgggcctctcacccccacacttccactataaagtagattcaccatatcacttttcaaataaaatcttttttatttttacatgcacaccatataataaaaataaactaattattcaaaaataaaataaaaaagaacaaaagaacaaaaccactttgttagtttatttttgctttatttgtttaaatttttttttgaaaactatcaattttttaagaagtgttgcatatatatttataattcaagtagaaccaattatcaactccactcgtactagcccaaaatcgagtcaacccccacaaaaaaaaaaaaaaagcagcccattatcattatggaaggtccaaacccgattgtctcactagtacgcgcccaaaacctaatcaaccctacccaatcaacctgtacccgaacctaatcaaacttgattcatatatgggcgggttcaatattaatttttcaatacccaaaagatgaaaaatgtccccaaaacataatactcgctcaaatgtgcagccctaataaaattttaatggcctatatttatatttcctcattatttaaaataaaataaacatacataatcataaaatatatatatacatatttacgaggttataactaaatagagttacacaagaaaaaaaaaattaaaatatttatttatacagaacttaaaaaatatataattattataatttaaaaattattcttgaaatgtatattcttaaatagaaattctaataattattttcattttcattcatatttacttaaatataataaatatacataacttaaaaatgaatacatatgatcccaaaaaaatcagtacaaataataataaaaaaaaatcaataaatatgtacactcctagttctagcaaaaaaatccaattattaaagattgattaatgataattttttttttttttgctattttgttgatggctgtgacaatgaacacgtgtgttaacaaaaatacattttcaatttttttttaaaaaaaaatccaaaatttattaatatgaattcaatggaggaaagggcaaaagtcaaattgggtgagaatgagaatgtgacgaaaggagtacgtcatgaacacgcgcctattaggtccggtgaagatgtagtaggtgagtgttgtcatctactccctacaattagtaaagttacttaaaacagtagtgaaactccttccctttgtgttaggtaagcggtcttacgtggcaactactttgtggctttcggtcaaacctgtacggtgagccccacctcacccattcccctccaattcttcccaccaccctcacaatatccctcaccaaccaccaaaagttataatcacctacacccgcttccacttaaccttctttacaccaacaagtcatcattcttatcttttaatttatggatttaattcttttatttctcttgcttttcaattatatttacataaataaaaataataatatcacacaatgctttaattattttttgaaattcatttatatataaaaattagagaaaaaaaataggtctcactcccactcttctattacattatccataattttagcattttgctatgagaaatattaaaatgcatcagtaatacataacattttcttatgtgttaatatttttattggtccaattaagtattgaaatagcttttagagaatatcgataatcaatcgcaaggtaacatatttaaatgtgctaaacatactcaataacaatgctattttgctaaagaagaaagggttatgttaagaggcaccttatctaacattcttatcattcttatctaaatgtgctctaagattttagcagcccatgattgacaaagcatactctgcagttagacgatgaggaggttctagcgttggtgatgaacgtgaaagttgtaaattcataattctaatcactttgtcaaaa

SEQ ID NO: 25673 - DNA, 1606 bp, Cannabis sativa
  modified_base (1562)..(1579): a, c, t, g, unknown or other
tttttttttgtcaatcaatgaatttcattactccaaatatcaatttacaacctatttagcatcttcaatgacgacctgatgaacaatctatacattttcctataaaagcaattcaattttctttggtagatacacatagtataactacaatctcaaaaaccattcttcatccgccggctgcactttctttggccaagtgcaggaaattcggttcttcacaacagctttgatcaagtttgctacttgttctggtgtttgatagatgtcctgaattccacaatatatcattgcgattcttcaacaggtggtacacgagtgcagcaactgtagcagtatacacaacttttttaaacttgctggtctttgttctttctagccaccttatcaatctaataagagctaaagtttcaacattccatcccaggcatgacttcacataggaaaggcaaagaaaagagaaggggcaggagaagaaaagatgttctgaagtttcagtttgcttcttgcaaagcaaacagaaatcttcatcaataatcttaaatttatgtaacctttctcttgttctaagtctattcggtatagctatccataagcaaaagctatgtctaggtatattcaacctattccatacctcatggctctaataaactttaggtagagtggggcaaaaagtcttgtagccattggatattctatatttagctgcagcaaactgttgtatatccacggtagctttaacttgatttttgacagcaatcaatttcctccaataccagcttgcttgcgttggagcttagtaatcccaccagttctcatctttgatgtatacacagtgaacccatctgatccataggttgtcttctttgttcgcaattgcccatacatactttgtcattgctgcaatgttcgactctgcaatcttcttcaaaccaatcccccctgctacttttggttgacatacataatcccaggcaattggtctagagccctgtgtcacatgatgacctttccataagtaagctctgcatatagcttcaatatctctaattgacctctttggcaacgccatgatctgactccaataagaatggattgacattagtaaagagtttacaagaatagcccttccaactaaggacagattcctggagctccatactttgattcgggctgtcattttgtctgctaataccatacattctttccttgatattcgtttagcacggataggaatacctaaatatttgaaaggtacctccttcttgctaaaccctgagcaatcaataatacgctgcacatcatactcatccatgccacaacagtataaagctgatttattagggttcggattcaaacctgaagagactgagaagagctctaacccttgaagtatatagtaaatactcttgtaatcaccatgacaaaagagtatgacatcatcaccaaacatcaagtggttcaattttaattcagcacatctatcatgaaatttgaaatcaggtttggctcctatcttcatcattattccttagaggtactccatactgttggaaattattttnnnnnnnnnnnnnnnnnntaacaagtatgtttgattaacatccta

SEQ ID NO: 25674 - DNA, 6569 bp, Cannabis sativa
  modified_base (1729)..(1732): a, c, t, g, unknown or other
actcgagaaggtcaggtaggtagcgtattggctagccttaccaccagcgttgtcagctgttcataatgtatttcatatttcaatgctcaggaaatatgtgacagacccgactcgtgtcttgagttacgaagccctagaactacaattggacttatcctataaggaacaaatagttcaaatccttgataggaaaaaaaaaaagttcttcgaaataagaccatagctttggtcaaggtactctagaagaacaggatggtggaagaagccacctggaagctagagtccgacatgagggctcaacattcaagttagattttgaggacgaaatccttttaatgggggataattgtaatgaccgcatgattagattatggattagaaaaggcaattagcattaattattgatattttataattacatttgattttatattatggtgggccccatttttagaaatggccattagagttataatttctcaattctagagattttattaaactctaagagtgttatttatgttaattatgaattatgcaatttttataatttttgctctacaacaatggaaaatgtgatggatggccattagtcatataggtaagtttagaacctaattcttagtgagacaaacataacaaatactaggaatgtcggatttagatggggttatggtttggaccattttacccctaagcttataagttgcttatattggaagtaagggcattattttggtttgggggattaggtggctggtttgtagcttgacaactggctattaggtgttaattcagccttagtttttggattagttagtgaaattagttaattaaaagaaaaagaagaaaaaacccaaatttgttctcctccacccttaccattttcgaacccagctaaaaccaacagcaaccagggatttttgtgtgaatttgaggagtgttaactggaatcaagtggagtaattcaaaggtaagagccctagaacttgctcttttaagttttgttagttgttccttagctttgggcatgcaatttcgagtatttaattatttcatgctatttagtaaggttgttttaggcttgaatcttgtggttttggtgcctaattcttgtgatggagttttgatttttgtgcatttttcttactattactgcttggaatcattgttggatgttagtataggtgttttggaaagtttgagagaaattagggaaaatttggctgagtttcaaagtgttggggtttttaggtatgaaccaattaactcgtctgtaggtaatgtagaaccagttaaccatttcactaagtagaaccccagaaatccaatttttcagagtcttagttttagtgtttcctcaataattagggtattgtcatgctagttatcgatagggaaacttttagttttgaatttagatccccatattaggttttagcaagttgtttacctatttacgtgatggtgacatagggcatccatccagcgcatgattttccattcaggtcagtcgtcacacttgaacttggaacgaggtaagactagcatagaacgtatttatatatgaatatgtatatgtgtaatatatgcatgctatttgtgattcgtacattaccaacactagtacggtagcggtactgagtgcaatggtacagtgcatgatgttcaatgagtacaatacgtgttaccaacactagtacggataggtacgtagtgtatgtggtannnnacttagtggtactcgaggtacggtgcaaatcctaccaacactagtacagtagcagtacgtagtgcatgtggtacggtggtcgtaccttagtaaagaacgttcttactcatatgttaagccttcttgataggtgtatgggcacctagatacaagtcggtaatatattgtatgttatatacttttcttactaagtctattgactcacagatattatttttatgtgtagataaaagaaaggctaaggttgaacaacattgaatttagagctcaggggatgattgtacatgtcaagacggtgcgacctggagagttcggtctcgagacgacctgacctgtattttgtagttgttgtgcaacatgtctataatgttattttgaatgtaaagttaagaaaaggggatcccaattttatgtaaatatatatatatatgtttataaagtttaaaatttaaatcaaaaattttaatttggcacgatttttaagaaaatctttttattagcaaagatgggcaaaaattactgtagcatgcctaagcattagggcattacatgggggccccaacattgtttccttcgtgccacatgtcaaaaatagtgtccacatcatcaagctaactgtttgggtaaataataataataatttatttatttatttaattatttaatttgatatgatttaggatttgaatgagaattaatttcagccactcattatcattcattctattattttaattaaataaatgattaacctaaatactattgtttgcctatgtaaagaaagagaaggaggtagaaaactctaatgtctcatcttcttcttcttctctttcttttagtaattttcgaaaaaaagcttctactattagattttgaaaatttcatctgtcctcctcattgattttagccagttacatattctaagtaagttgagcatcatcccacactattcaaggtgatactcaggcttttgtggaagatcgtgtagaatgttaaatgttacttaataaaggaaaagaatatttgggttcaatacttagtgatactctactatagaaataattcgagtgttagaatactgaatagaaagatctatttatctcgttgcattcccaatgcaacaaaatcataaattatttatgtgtttaatttaattattttagaaacatgttttaggttgttaatacaataatatttataggacatattaattttttaaactatcaactgttgcaaattagtattattgtattaaaatggaaactttgttataacaatatgatgtttaggaaaataaacccttttagaaaaaattagaaaatttaaatattaattataattatataatattagctttttatgttatatcagagcaaactatcagtccgtgccggcagtctcctgaagaagttgataggcactgaaggtagcttgctccgaaacctaggatgacgcaagtagtagagccctgcaaccaaagccacaaccctaaagggggtcgcatagagaactaatgcaacacaaaggcagaaaactacgaaaaggctagttgctcgaggatctctccaactaagcaaagactgaactctctccccttgcgttgctatgtccccaaccacagtctgaatcctccctgcaacactcctcaacctatcatacctcattcgaacggcatcgttcgattttgatgatggaaatgtgtcaaactcttcatcaagctcatctgggtggactgcctcggcccacgataactttgtgtccatgttaggagggtgccttggcctaagcctatagttccaaagcccaatcaaaaacatgtaaaggaacatggtaggaagtattagctcagggtagcaaattagtatgaggaaaaggatatggacaagcactgttgtgattggattcttccacgtgcaaacatctccaagccaccagctcatcgatatcacacctgagataagagccatgatacgaaagaagttggccttgcttctccgcatgctccaaacatgcgaatccacatctaacatgtactccaccacctcttttcttagcggtggctcagctcgtcctaatctcactgccacaatgttcattgcttggtatctcaagttatccacttggttaacagttaaaggatgcaagtaatgcattttaggtagtaaaggatgtccatacacatagatcatgttcgccaaagatagtgtcgtaaaacgtaccgctagttggagctctcccatcttcttcaccccgtgggggtgaagaactaaaagtgggtatgaatgtgtgtaaattcgatgagcttcaagtgtagaaagtcgaatccgaacctttccaattcgggaatcgcgagctccagtgccaccaccattcaacttctcacttccaccaagatggcagttgtcaaagactcctagagttataactgtacaaggatcataaacctcccacgtatactgctcattccatttgggattgaaagtgtcaataattgttcttgttcgaacccatttatggccatacttagctacacaataagcatctgtactccctctactatccttcatcttcatgggaagaagtccttgagcacctaagatcccaacttcaagaattccaatcggttgtttccaaagttgcctcgccgtaggcctttggtcacttatatacatagttgattcatcgagcacatggtaccccccttcaagacaaactcttaaatggattctacttgaaaatttgagctctctcctcgttctgtcgggctccaaaacaccaaagccatagttctcaagattgaaccagcgagaatgaactgacctgtggtcaagacgtcggtcgaacatgtcaagaggtaaggttatcctccccaacaagtcatcttttgaagggtgaactcgatcctcgacagtaataactaactgatcctcaaaaggctcagctgccacaaacattaaatcttcattccaaagggggttagcagttcgagttgggcaagtattggttctaagaacttggcttcccacctgcgctttgacgaaaacttcaggtaatcgacttcgatcgtttggcataacgtcttgagcttcgatcacattaactctaaggtaccaaagttttggagagacataaacttttgatctaatgttgaagactccatctccatgagctgaagcgccgtcagaatgccaagcatcggaaaatgcctcatcagcttgagtacccatccaaacggccaccatgatttcacctcttactttaccttcaccacggcgatggtcgagcctgtaccactgcggagccagaggactgtctggtggaactctagttgggatctcattcaagtcgaaaacgactcttcctaggtaatcgtctctcccgatcatctctttgtctttgacaaaaacttcaagagttgaagattgaattcgctctttcgagaaggcaaagacctggttccattctggattaagcttcttctcgaaatgcttggtccttcctttgtagtttccaagcttcacttccacataaggatcacaactcgcagtgatgccactcggaggaagatctttggccttaaccactcgaacatagagatagaacatctgctcaacaagatcataagtgcttgagtatctctcactattcatccatcccattcctccatgaccagcgcgaccaccaacaccactaacgctcggccatcgttcacccaagtctgggttagtgtccttgaggctgaaatcatcattgacatttgcaggaggaataggatgactatgagactgctgatgatgatgatcaggcgcaacctggggaatattactactttggtggtgcattgtcaatggcacacctcgttgccgtctctcaattgacattgtagtaagttgaatccgcgctcagtgttcctattttcccaaaataaagcaagaatactcaatggaaaaattgttggagcaaggacatttgcggtaggactattatttggtgatcttctctcgtcgtgaacagactcttcaataatgagtttgttatataaatatataggagttactttctaatttggtatggtaaaaaaaaaaaaaaaaaaaaaactggtttggtgttgttgtggttgtgattatctgattctcaaaatggatttctagaaaaggaagtgaagaaggttgttgttggtagctgggcataataataaggtcgtgagcatctaccagttacactatcagcttcatgctctgccttttgttgttgtatacttagtagcagttcgcaagaatactctgggaagctcgaatccgaagcaaagaagttgtcttttggaagaaacaggtaataaggttctctgagtaagctcttggtttttgtttaagcaaagaagctttgttggagaagctgtgcgtataagagaaacttaaagttggccattcaagaaaaaaaaaaacagaggaagtcgaaaagttttaactacttcattttcctatgtttggtttggttattgtaaatgaggaattaaataataatatatcaattgggcttctataatcatctttagatgttttcaccaacaataattaactttataagtaaacgagaaaataatggtcacgtctgagcaaattgctctcatttctttgttattcttcctagtaaaaaaaaaaactgtagaatgagaaatagtttaaataaattcaattaaatatttgatttagctttaaaaaaaattaaatatttgatttggctttcaagaaacatactttccttgagtagggagtaattgcctgtgataaagaaaaagtaaagcaagtacttgggatttaaaggctaagagcaccaa

SEQ ID NO: 25675 - DNA, 4405 bp, Cannabis sativa
  modified_base (2875)..(2878): a, c, t, g, unknown or other
ttaatcttcccattaaatctgtccaagcagattggggaggggagtacagaccattcaagaggtttctagaggatcaaggtattcactttcaacacccttctccaaagactcatgagcaaaatggcaaggcagaaagaaaacacaggcatattacggaaactggcttaacccttctagcacaatctggtttggatttgtcttattggtggtatgcttttagctctgctgttttcaccatcaaaatagattaccaacaagagtcttagaatatctctcaccatatgagactctcttccatacaaaaccagattacaacatcctaaggtcttttggatgtgcttgtttcccccatttaaggccttacaacagatacaaaatggagtatagatctcaataatgccttttcttgggttattcctcacatcataaaggctatctctgtgaaagtcctgaaggccgactttacattgctcgaaatgttatttttaatgagcaactttatcctgcaaaaggctcctctactatgtctcaggtacaatcaaatatttcacctacttctacttatactactttttctcctatgtctgtacctctgcatactgaccacacttttgttgcttctggtcctgctatatcaactactcctgctgcacctgagtcctcactacccactatcccacatagtcctcctcaggatttacaccagccaccaaataacacctgttctgccccacaaataaccttgtctctctcccaaaataatcctcaacagttacctactggtttatctcaaaccagtgaagtccaaccatcattaacccaaacacttgcacctgagccaaatgcaccatcaacgactgtcttgcctaatccctctgtcccatcccacactactagaagccactccatgaaaactagatcccaaagtggcattaccaaaccaaaatcataccttgctactaaacaccctctccctgaatcccttattcccacagaaccaaaaaatctcaaagaggctcgtagtaatcctaaatggctggctgctatgaactccgagattcatgctctcactcaccaaaaaaatggactctggttccctatacaacagatatgcaggtcattacaaataaatgggttcatcgtgtcaagctaaactctgatggaagtttggacaagtgtaaatcaagacttgttgctcgtggttatcttcaaacttaaggcatagattatgctgacaccttcagtccagttgttaaaccaatcactgttagagttgttctttcacttgctgtcaacaatagttggcccgtgaagcaattgtacgtgaggaatgcctttctcaatggcaatttaaatgaggttgtgtacatgcaacaacctcctgggtttgttgatacctctagaccagatcacgtttgtctacttcacaaagctttgtacgggttaaagcaggctccaagagcgtggaatgataagctgaaccaaactttgcttcgttggggtttccaaggatctaaatctgattgttctttgtttattcatggagctggcaacaatctggtttacatctgtggacgatattctaatcacgggaccaaatcgatctctcatcaaccattttatcactggtctaaacacagagttctctttaaaagatttaggccctattcactattttctgggagtggaagtttacaggaatgacaaaggcatgtatcttagccaaagcaaatacattacagatttgcttacacgggttcacatggagggtgctaaaacgtgttctaatcctaccagttcctcgtccaaactcagcttaaatgacagtgatccgtttgaagatatcacactgtacaggagtaccattggtgctttacaatacctcaatttgacaagaccagatgttgcttatataatcaataaactcagtcaatttctccatgcccctactgttaagcattgggaggcctgcaagaggttgcttaggtatctaaaggggactttatcagatgggcaatggcttaaacaaagtgacacttttcaacttcaagggtatacagatgcagactgggccagctgcatagatgataaaagatcaacaggtggctatctcatgtttttaggagaaaacttgatatcttggtcagccaaaaagcaacatgtcattgctcgatcaagcacagagagtgagttcagggcccttgctcttgctgctgctgaagtacaatggattacttctctgctctctgaactccgtgtcactctctctcaaccacctgtgttatgggttgacaatcaaagtgccactacacttgctgccaaccctgtgtttcatgctcgatgcaaacacattgagatcgatcttcattttgttcgagacctcatcttaaccaaacgactctcagttcgctatgttcctacgtttgatcaagtggcggacatcttgactaaaccattaactgctgacagatttgcttatcttaaaggcaaacttcaaattgcttcatcgccatttcgtttacggggggatgttagctaagcattctgttacttttctgttagttcgttaatattagttaagttcagttttggttgttattttcctattctgcacttgtactttgtatcatctttgtatataataaacaggtctcaagctaactagttggttaagcttttcttggcatttcattctttggctctgcctttatgctctgctttgttttctcttctttgtttttgttttctgccattaataagcttctacaaataataaaacttaataatataatctaatctagaaatgttatgaaaaaactagttatatttttttgtatatgttcgtattataaattgtcttaaagttggttatatnnnnaaataaaattgttgaaaattgaacccagggtctttattttactattttggaaaatataaggtccattttgttgtttaacaaaacagatagtccaattgataacttttacaaagcacagggtccaaaataatatttacccttaaaaaatagtatataaggtaattttcaaaagaaaaatgtacaaagtttgataaatttgattacactaaaataatattgatccaattaataaaattctattatcaaatttaagtttggtagctattagtgcaaagttgaaacatatttttaaaacttgtgaaaatatataatgtaattttttctatctcacctgttctcgttatcacatgtggaagttgaccaattgaagttattataagatagatcactgaaaaaaaaataaagaaaaagaaataatatacgtcaatatcattttacatgttttttttttccaaaagtataatacataattaaaactaaattaaaaaaaaaaaaattataggttcttgtttttaaatttatagctatatgaggttgtcttctttcttgggattatttcacaaatacacaaaaacaacaaaaaaaaaaattattaaaaataccgttgtacgaaattttaaatatttttacaatttttatgattttatttacagaaaatatggtctttttatgttgtcctcttgttaaattattgttgattttttgttatctttatgttattttttgttattgtttcgatgttgtttggatattattttcctgttatttttatgtagttttcttgttgttttcgtattgtttctatagaaaattgtaaaaatataaaaaaaaaaaatctttaaatgtaaaaaagtaatttttttacaaaaaataatatttcatgtaattatcttttttctttggccaggcccgctgatctttttaggcataggtgcggcttgttcagggttgtgttttgctattgtgattcgattgtcgcccctacaattagtcttgtctctgtgacataattttgaatattgtagtcttgtctttatgatatgattttgagtattgtagtcttgtctgtgtgacatagttttgtttcgttgttggttcttctttgttcttcgatgtctcgccatcaaattattgtaagtggttgggaataacaagttctttgaaactgaaggggtagttaatagtgcaattacatacactataaaaaattactacttttagtgacaattttttagtcacaactagggcacttcatcgaaactagaaaatcatggtttaaatccggactgtgacaatccaaaccgttgtagaccgtaactgagaaaactgtttttggtggttcggttaatccagaccatttatcgcgtaatggttcggttgcggttcgtaataaattattaacggttaaaccggactataccgtttataataaataattgatttttatatatattttatatatgactatatgtataatgtatgtataattttgaacttttttgtgtgtcgagttttttattgcatgaa

SEQ ID NO: 25676 - DNA, 2548 bp, Cannabis sativa
ttgtgtgttaacttttgatctttccttgattttttctgatacacgagcctcaacactaactgggagtgtcaaggcattagaccctaaatttttgacagcaagcttcccacgcctctctgcctcaacactaagctccagtgttgaggcgcacccatatcttggtcaaaaacgatcttctctgttaaattttggccttttaatgccctaacatggaactatagtgttgaggcgctactccattatttttaatttctttgccttaagagctccaaacgtatgggaacttttggatttttttattgaatgaatttcttggtgctcttaccccgagatgatttatttgacatttttctcatatttttttcaatatttctccattcttcttcaacactaaacctataaaatatcaactaccaaaagcgtaaaattacacaaaacaagagtaaaattatttaaaaacacactaaaatcaacctaaaaatagtactaataaaaacctaacagtagtcaagtgctctcttaatttttagaaggcctcctcacattctttggtccattcgaatttcttattttcttgtaacttattaaaaaatgggatgcacttgtctgttgattttaagatgaacctactgagggcggttatccttccaatgacactctgtacctctttatgctttcggggagaaagcatgtcgatgaaggcttttatttttgttgggttcgctttgattcctcgagaactaacaatgaaacccaaaaatttctcagaggagacaccgaatgtacatttcttgggattgagtttcatctcgtacctttagagaaccaaaaaggcttcctcgaggtctatacagtattctccgacagtctttgattttactagcatgtcatcgacatatacctccatattcctccccaattgattcttgaacattttattgaccatttgctagtaagttgctctggcgtttctcagaccgaatggtatcaccttgcagcagtacacacctttatctgtctggaagcttgtgtgttcttcatcgacaacatgcatcttaatctaattgtatctagaataggcatccatgaaactaagcaaccagtaactagactgttaggttatttttagtatttaatttagatttattctagtatatttttagtttagttttactcgtatttagagcatttttacgattgttatcttttatttttgcagatttaaaatagatgaagattgaaaaaatatcaatagaaaaaaataaaagatcgcagaaaatatcaatgggaaaaattagaatcctacctggaaaaaaagatattacacgtggaaaacgtggtcagtggagcacacggaccgcgacctaggaatgggtgtgcatgtaattgggatttatatatatatatccgagaagactataaattaccttagtaaacatgctattgcataaaaattgataataggaagataatcatattaagccatatccaatagatacaattgaaatcgaagccctagtttttatcaactgttaatttcctttattagtttaattgtttctcctttcattgttttcattattttctagttctaagctattcctatttttctcattcaaccaaatagaagtaaaagtttaattttaacgtacttaactacaatgctcgtgggatcgacctcactcttgtgagtctaatacttgtaaacgatacgtatacttgcgtgttgaaatgatcacaacatagacgtggcatctaccattgggtctatccgtggaaggggaaacagtctttggaacatgtcttgttgaggtccatgaaattaatgcacatcctccatgtaccattgggcttagggactgaaattgggttgtcaaccagacaggatacaaagcttcctgcaggaagccgtttgtagtcaacttatctgcttccatttttacagcctctgctctcaccagggttaatggtcttcacttttggtgaactggcattgcatcctcgttaatgttcaaggcatgaaaaacggtgttacgatcaattcatgtcacatcatagtggttccatgccagcatatcttgatttctcttgacaatgttcacgatgctttcttttaccgctaaatgtaggttttttcctaccttaatggttttggtagggtctttttcgtaaataccaacttcttccacatcctccatcggctcaagtgttctttttgtctccacctaggggtctaactcatctttaaagtcctcttgggtagtttcagcttccgcctgacttcccatcccacgagcaataggtgcccctctcggaccatgaatactgtctggtcggagacattgtaacaatcccttgcattcctttagtcacctctaattgtcccaacacgtccattgtcataggcggacctacgggtgttgagggagggctaaagcccaccctgagatttaaaaatatattaatatacaattgttatttttaaatatacatagtagttaaatagaacaattagtcaagatattttaaatttacatgggagaccata

SEQ ID NO: 25677 - DNA, 4487 bp, Cannabis sativa
ttgcaaaacacagggtccaaaatgatatttaccctagtttatcattaagtggtagttgaaaatgtctatatatatcgttatcgagttcagaccgttaacactaaccatctcaagattgagatcacttgacttaagatcaactaagtgacattgacttaaaaaagacatagcagtatgtttatgatatattttccactgtcaatatcggtctagtccaatgtatagccgacacattcgataaaagttcactttgttgatgcactagaaaagacattctatttatacaagtgtaagtaaatcacattgttgattatcacattagtgtaaatgtagctcatttataaattgtgggattgaaaagtatgaactatataatcatgattattttccactatgttgacaatactataatcatgaataactatatgtttgagataatttgtatattaaatatacaatcataaaagcaatcatgtgaactatgcaacatatactaatttatgatcttttattaattagtaaataagattatattaaaatgaattatatttagagcacaaaatctcaacaataactataatgaaaaccatcatgcgatttttttttttaagaaaattatttcattatatattttcgtgcatgacagttgattaaaaaattataataagagattaacattaacactcctttttataaaattggtaaatgatactatattgaaatgaaacacatctaatggaagacaattcaataaaattcatgatataaaattgatttttttttttttttacaagaactataacctgaacaaactcaattaagaacttcaattacaattttttagtcaatttctatgtctgaaaatgtacatcgaaatattttttttatggcggtatttacagaaataatattatatttatagcgaataccgctataaaaaaaatattttaatgtgtaatttcaaacataaaaattgattaaaaagttgtaattgaagattgtaagtaagagtccttttcctcctaaagacaagtactacaacatccgtacatcggctgctgaccaaatacaacagtagttgtccttattttcacttgtcaaaggacccatgaccttgaggctgcaaaatttcaaagtaaaaacaataaattaatattgaataaatcaatttaaactatacagcaaatattgaataaatcaattgatagaaatagtaatggtataaactattccataaatattataactaatataaattatctcatatatacaatagcagataattctatcatcatcataacatatttgtatagtaaaagtaagtgatttaactagtgtgtgtaaaaaggttgactcattaatattaacaaatggcatatttgtataaagttgacatacgaaggtataagccaacatagttggtcttggtcacttagtgataaaataagtaataaatgaagtaccttgtgttgagatttggtcatctttatcgaaactcaaggcccaaaagaaatatccacgaagcccaagggcctgagcaaacccaatcttggttgttatcgtaagagcattatcaaacgtaatccacgttgagtttacaacactgtacaccgtgacagtgtccacgtcatacaccacagtggcaccttcctgttcgatcatctcagtcaccaatttaaaattcaacgcaccatctactgggcctgggccgacagcaattgtgcccattttgctcaaatttgggccttcaagtttccaggtccgcccataaagtggtaagcccataaccatcttatcagtcggcataccggcccgaatccacgaattaagcccataaattgtatttatatcactagttggatcaaacaaagcggaattaggcccagttatattactccaagcaccatggtaatcataacacatgacattgatccagtccaaactttctctcatcgccggcacggggaaagaatggttgacttcagacaagaaaaactgagctgaaaagtacaccgccgccgtgagaagcaaaggaggcctagatgtgagttgggcctctttagttacggcccatctccattctttaagtaaaaggccaaagtccatcatttcttttgggctttctggggactcccaatccaggtccactccatcaaacccaaacttacgtgcaacttcaatagaagattgtatgaaaactttacgtgaagaagcttgagaagccattagggcaaagtccgtactagctccggctccgccgacggagaacagagacttcgccggaggattagcatatcggagtgttgaggtgaaattggagagagaaacagctgtggaattcgatatttggaatttgaaagtgacgtcgtttggagcgagaaatgcatagaaaatatgtgtgaacaaagatgtgtttatggctgaaggtggaaaatcgtttggcgatggccaatagccgcctttgatggccatctgaggcgatcgatcgccaccgtggtatgatccgacagctgtaattgtcaacgaattagccacaacaaaaatgagaagagtagaaataaagttgaggaggcctgccattattattattattattattttaccataaaagggtttgtgcatagttctaaagctatagcctttgatgtaagattatatatatagaaaaacatagaagaattcaagatatataatatatattttatgtcaaagctttggatttttcttggtgtattttctttcttgtgtttttaataaatggactgatcttgtataaatcgatcgtagctatatagttcgattaggtgtgtcattattaattaatttaaattatgattggttttatgttaaactgtttctaaacatcttaattatgttgataaaaaaatttagaaattatcttatatattattttttttaaacttatgctttgggtttctaaagtaatattgcgatttaggttgctccgctagttacaataaatttttttagtaaaaatcaaaataaaaaaaaaatagtttgaagtgtaaaattgaaaaaaccgaaaaaaaaattcacaaattattttgactagattttgagttaaaagattaatttataactatatagctttgagttttagcaatgcaagtagttgatttttttcttatttaaatttgtttttttctttttgacaattaatatatgttggagtaaagccgcccgttatgactcaatcagagtattacttcttattattattctagaacaaatgtgtaaaaataataatggatcgactgttggatgtgattggagattaagtttctagataattaggtaatttaattattattttatactatgctaactatattgataagttttttttttcctcaagccactatgtattgtattgataagttttggttcaacgttaatatatattagtgatagaagaaatttttaaagatactgtacgcaagtttaaattcatcataataattattttatttttttaaatttttttttttgcatggaaaacatttattataaaaatttaaatgttttatttataaaagttataattttaagctcacatagctagtcaagcgtaatacttcatggtcgtacgcacttaaattaaacataattattacttgtgtgccaaaatatttcaaactaattgtatttatttatcatgaatccaacttattaaaattgactcgttacataatatataagttcctaacaaataaaattgatgtagtgtgcacatatatcattaatcttaaaaacaaaaaattcgttacaaattttatttttttttgagaaacgaattatttgaccaaaacttgtcaaataataatgaataataatcatatttagggtgcttaatttcaaataataataaaaaaaaaatcatatttagggtgatgcatgaatcacgaggagactatatataaagcatatataattaattaactcaacaaaattggaggttacctgcacgtaatttgtttatatatttaatttatttcttcggacattgcggaaagtttaatatatttctccctcaaatattatgtataaaattatttagggacaaatatttccttaacataatgaaagtacgtacacttacaattgaagtgtttaaccttttagtgctgaacattaaatggttgtccttcgctggtgtttgcttgtgatttgtgaacaatataatatggttgggccaaaacaacataatatttccacacacatgaactcattattaatggggtttctattaatttgtgatattaatacttctttttaatgtgtggatattgtgattacatcgtactattagttttaacttcttctcgacatttggagatttcttgtataaattaaaagagaaatgctaaatggtatcagtggtgcctaacaccctcctatgtgtcaatatcgctattggtccaactaagtatcggggctcatataatttaatataatagtttttatgg

SEQ ID NO: 25678 - DNA, 4137 bp, Cannabis sativa
  modified_base (4066)..(4105): a, c, t, g, unknown or other
ttttggcaggggtgaatccaagtttaagtaaggcatcagacagtttctcaaaccaagctcgaggagtttgtttgagtccataaattgccttgtgcagcttacacactttggttcgatgattgggatcaatgaaaccaagtggctgcactatgtaaatgtcttcatgaagatcaccattgagaatgcattattgacatcaagttgtctaacagtccaacccttagacagagcaatggtaagcacaactgaattgtcacaggcttgactacagagttgaaggtctcatgaaaatcaaatccagcttattggtgataccctttggtaaccaatctagctttgagtctactaacagatccattagagttttctttgattctgaaaacccatttgcagcctatgggctctctgttggggggaagattcaccagaatgtaagttttattcttcttgagagcaatattttcttcagacattgtagctagccacttaagatcattaagagcattcttgacttaggtgggaataagtgaagctattaaaacttttggttttctaatcccaaatttggttcttgctgtcaattaatgttctttaaccactgttgctggttggtcaggtgaagctgaggcagcatttggcatggttgtggggcagatgtactggtaggaacagtagcatttggtataaccacctgatctgcagcatgcataactgtaggcataacataggtataacagtgggggcacccataggtatggcagtagtttgtgtctcagtttggtgttgcctagtgggattggtggtattaacatccggagaggatgaaacctcattatctgcagcaggtggtaagttattagcaaaaaccacattagcaagagtagaagtagtaggttgagcaatattcaaaacattagtgtgactggatgagaagaagtgggtgtagcaggatgtgaaggatgattgatgccagggggagggaaaaatggttgagtctttaaggaagacctggagcagtaccatgctgcaaagtgagagtggctatgtaattttgagatgatttgtcatctgcttcaagagcaaatggaaaaactagttcatcatacaggacatccctagagatatagagtcttccatccttagataggcatttgtaccctttgtgagctaagatgtagcctagcaaggtgcatggttgggatctgaattaaagtttgaccttgttgtagggtcttaggtagcataggcagccaaacacttttagagaggtgtaggctggtttgacttgaaagaggatctctattggtgacagattatttaattgaggggaaggcattctgttgattaaaaaaacagcagcacgacatgcttcatcgcaaaattttaaaggcatactagcttaagctaaaagtgtcaatccacactcaactatgtgcctatgttttctctccacatctccattctgttcatgtgtgtgggcacatgaaacttttatggacaattccagattgttgtaggaagtgagtgaatgcttgatactcacctccccaatctgattgaatttgcttgataggtaaaccaagttgaagttcaacttgggttttaaaggtgataaaggtggaaagagcctcatttttatttctcaacatgtaaatccatgcgtgtcttgaaaaggcattaacaaagctaatgtaatatctatatccacaagaagaattaatgggggcaggaccccatagttcagaatgtaaaagttgtaaaggtgcattataaacaatggtggatttaggaaagggaagtttgtgatgcttcccaagacaacaagtagagaaaagttgatttgaaaaatcaatatttttattgcttgtttggatattacatgagtttaacacttcctgaactattttatcatgagggtgacctaatcttttgtgccacacaaagcaaagaaattacaagttcatgatagagtactcgaattacattgagttgataagggactcaagttaatattgtttgacttctgtattggactcaacagtggtggatggacatgatgatgaatatgcaaatgtgtgccattacccatgtggacttgccggtcacccatatcggtgttgttggtggacagattttgttcatttggtgtgagatgattggtagcaccagaatcagggtaccaattgggatcattgacaacttcatgtgtggcatagtaggcttgcatctcttcgatatttgtattgacttgccctgggaagttttgaaatgattcaggtccattgaaggacttatcgaatctatagaagcactgttgaatagtgtgtcccagtttgtggcaagttggcattggggtttttggctccaaatggtggagatgccacgacctcgagagacacctcctcaaaaatttccaaattttccacgagatggagagcctgtgcctctggaaataggcataaaagaaccagattgagaggaattagattgagagaagggggaagcattacctttaaacatgtttcctgatccataaggtgaagggtttggggaagtaaacgatgtgcctttgcctgtttgagctttagtgtgagcaagattagcttcatttttggcgatgtcaagatccttagctgctttgtccaattgtacctcctgagccattaacagtgcctcaatttcagccacactataagcatctgtcatggtgttgacagatgagatgaatacgttgtattcagctggtactccatagaagatagattcaatgtgatcttgaggtgatgtagaatggccaatcaaggcaagagtgtcgatgatactcttaagcttgagaagacaatcactcaaagaagtttacattttggtgtttcgaaggagagtcttgtactaacctatcttagctcgattaagagaggtgtagtactcacgtagattgatccaaatcttcgtagcaaagtcagatccaactattgagaaatttctctgacatggacgaaagaagctaggataccaatatattattttattgctcccaatccttgaattcagggctcactctgttatggcgacgatcttcatcagtgagatattatggtggagcaaggttcggatcaagaaatctctgcaatcgacttcctttgattgcagcaagcacttgatgcttccatggaaggtagttgaattcatccaaccgaacatagaaagagtgagaaaaagaaactagattagttttaggaagagtgatttgttgagaaggacctggaggagtcaatgaacctccattgttaacagcagaagaaccttcattgttgagtgctgttgaatgctccatgacagggacgactaaagttatgataccatgttaatgctcaagaaacagagaaacagaaatggaagaaagaagcattcaatttcattgaattggaaaagtaatacactggttcaatatatacaagcgatcgagcttagagcaaactaacagaaaagttagttagaagaagaagacactcgtaacccaactaactttaactaacttcactaactaacaactatctaggtactcttaacaaattagactcaatcataacatgttaatagcccaatttttttacaaaattccaatagactttaaagattgaaatagcttccattacgttagtagagattgtagagttggaagacaaaggaccctcttgttatcatctcgcaacatcgtgacccattttaaagtcacgacccaaatttgaaatgatatgtataactgaataggttaggatattaaatataaatatctttattaagtaataggtttattggtttaattaattatgccggtacaatcctaaaaatatattgttatctcaatttgtgcatagggtaatctggcatttaataagagtgatatgtcgagaatatttcaaagcttggacaggtgatcttccctcaacggaccgtccagaaagatttatgtgcaagaatttatgattaagtttaaaccattaatgaggaagcatacggaaagagcttgtgtaaagtccgcttaatttaatttggaaattagcannnnnnnnnnnnnnnnnnnnnnnnnnnnnnnnnnnnnnnnaaataatttattatgctgttatttatggaatt

SEQ ID NO: 25679 - DNA, 6748 bp, Cannabis sativa
tagaaacttattaccttcagatttgtcacaagttcacttgaagacctagcatcacttgttgatgcttgtgtagtagcatgttcagtttctgtaagtgtctggagattctcatatccattttgctgttccatcttcttatgaagattccttttttcatctttagattccttagtctcatgtcctctatcatcctataacagtcagagcttagtgtgagtaacatctaaaacaacaagtaaaaataaattgagccaagaacttaaggtaagacatgctaccacggttcggtatttggcatctttctcttctttttgtgcattcaactttcgctcattttctctctgttgcctttttgtttcctcaacacgcattcgtttcctatctctttctttcttctcttcctcttccctttgccttttctttgccgccatatcagcttcttttttcttcctctccatttctttctgttttttctgcatctccaattgctttagattctcttgctcgagtcttgctcgctcaagcttcatggcttcctttttagctttgcgttcgtcctcttttttctctgcaagacgccttgcagcctcagcagcccccaaggccttcactttgacatctctttttcctgtaaaagttaaacaaaacagccaatgaaatcaatgcaatgtcaaatcatgagtgtgtgcatttcccaactttactagaatgagaaataacctgttgcaactgcagctgcttgtttttgttgaacaagtggaataaatgaagtaatattcgatacgatattgctaggcttaggctctgtcactgtcaaacttggacctcctctcctcgaactagttcttgttgatgatactttgggtttactaaatcgattatgaaataatcccggttttcccttaggaccagctgttcctagtgatgacatgctatcattctctttgttattgtatcttctcttaatgccttttccatttccaactttctgtttggtcctcttgtgagttccattgaagctgaattctgtgttaactgaatctaaactacttctatcaatatttgtttcagcttccgatgcagcaatgtttgcgattacatcagcaagtggtgctctttttactgagctagtcaggtccttagcaacattgtcttctcggtaagtataagctacttcatctacattctcattttcttcacaaatggatggaagctcaggaactacgctcattcgcttctcagagctgtctgatttcgatatgattctgtcccagacttttcgaactggagacaaacaaggtttctttatctcccaatcaaactgactagttgaactgggaagacaatctgaatatgatctttcttcaaaagcacaactaaaggcctcactcaaacaaccgtaatcatctttcggcttatccatgccctctagaagcccagttggaacagactggtatatatttgaaaatttgagcaatttattcgaaactgaagaacaggatactggagtttgtaagcaagtagatctgcaaagctcctctagaatgctagcacgttcaattgaagtgttcggaagactgagcttgtcaaagctgatcctttgatcagcaatgcatggttgttcatcatctgattgcaaaacgaaactctcgagcacaggcattgtctcatcagcatcaatcaagtgcaatgaatcactataagtcaaagattcagcattccggatttggaatttttcttcaaggtgagaagaaaatttgtcctcttctaaagtgcataatgagattccatcaaagataaaactacttggatcttccattcttcttgcttcctccataagaagtgcatcacaagctgagacatgggatgcttctggttcctcgtcagcagatacaaacatgggatgcgaatccctatccttcaaactacattcatcctgcagatacaacatgattgtcatatactgtgcatcagaaaatattcaaaatgtaaaagtaaaaaaaatgtgtttagtgtgtgaaaaagaaaatgaaactgaaaatacctcttgaattagaagcttcagtgaagatttagacctttcttgcatgtcttcctccttactttgaggcatcccttcaacttgaatcttaccaatatctaattgaatatcgtctcgagagctttgaaggtctcgggattcttcgacatctttcagaccatgctcttcaggaaacaagtttttaccttcagtgtccctactgagaggagaaactgtattttctttagcaccaggtgaagtagacaaagcattcagagagccacttctttttcgattgttcctagttgaaccctcaagagattcacctacactggctttctcaatggattttacagcagcctgccgttcagttgattgatagagacccacatcacaagctccagcagactttctgaccacacttgaaacatgggatgcttccaattcctcattagcaaaagtgaccattttcgtttcacttaaatccctatctttcaagctacaatcatcctacatatacaacacgatgtcatatactgtgcatcagaaaattttccaaatatagaaagaacaaaatatatgtcatagtgtttaaagaaggcagaatttttgaccaaagccagaagagaaaaaaatacctcttcaactagaagctttagtgaagatttagagttttcatgcatgtcatcctcctcattttgaggcatcccttcaacttgactcttactgttatcttctaattcaatatcatctagagaactttgaaggtctcgggattctacaacatctttcagaccatgcttttcaggaaacaagtttctcccttcagtatccctgttgagaggagaaactgcattttcattagcacctggtgaagtagacaaagtagccagagaaccactcctttttcgtttattccgagtcgaaccctcaagagatgcacccacactggctttcacaatggactttgttgcaatctgccgttcagttgattgatagagaccaacatcagtgacatcatgagcaactctctctgaagagtctgcagtacaacaccgagtatattcaaacttctcagttgattggtagagacaaccatcagtggcatcatgagtaaatttctctgaggagcctgcagtacgacactgagaatattctaaattctcagttgacattgcttgattacccataatatcatccttggaaacagaacaaggatctgtacacacttcctgaatttcaaaggagacaggtatggatacctgagtgtaatcagcatgtgttgatagtttatgaacaactgaagagatattcttcagtctatctgcagaaactatttcaccaggtgttctgctctctgtctcacttggggttactaaaggttctttcaaagaatatttctctttggaacttttttcactttgctgcaaattatcagtagccaaatccttctctgcttgaggtgtttcactcactgctgatacagcatcttcattcagagcaataatgtttgtatcagcttcctcaacaaaggcttcagaagaacaattcctaagctctctttctttgctaaaggcttccctttcctccaaggacactcctttatctaacacacctccagattctgataggacaagagggcttctttctaacaatctctcctcctcattcttctcaacaaaaagagcagaaaccccatcgaaactggagggttccacatcgtcaaaattcagttgcttgggctccacatgcttagtactaccaacatgatgttggggaaaatcttccacaccaacatcgcttgcaccaatcaagattgacccaaaacagactcgttgctcatcaatatgcgttgcagtttccattacagctgccgaatcagcaggcttgctggtgctggaaataggcgagtctttcaattcatcacatgacaccttattggggccaagttcttttgagctttttaaagattcagtttccagatattccttcaatcccgcagacttggagtgagtaacttgaagacccaaattttgggagctgtcaacttctggtgttccttcagttataaaagttcttgtattttccttgtctgaacactctgttgaattttctgcataaagctcttgatcctctccaattggcaagaaaagttcagctgatatcagtctgtctttgtcttgttgagaactcttcgaagcagaaagtaccaagtccgtagtaatagagagatattcgtcttcaaagttccgtgtatttgaagacttcactggcaatgacaaatcatagacagtgttgtgcggttgagaagagcttctagatcgagttacccttctaaaacaaccatcagtagctgatttcactgtttggctcagagacctggcaacttttcctttcagaccataacttgcattagaaatattagcagatttcactatttggctctgatcagtaaattgggcttgtggtgctagattgcctgaaccacttttcttttcactgtcatagttagcttgtttagcagagcttctggacctggtcattctcctcaattctccaaccttagcttctgctgctatgcaatcttcatagtgactttgaatatgattagcacactcctgaggtggattagactgcttaattgaggggccgatagactcttcaattgcaattccatcctccccaacaacattagacaaactacctgcattcaaagagttatgttgccaaccagagctttctttctccttgctacaagaatcacccactataacactttctaccgtgcaaatgttgttactgttatctacagcaggttttacaaagttcaattgttcagactgttcatcttgaaaggaaggaatgtgaatgttttcacccgaattaatggcattcttcaatcgggatttagctgcttttgtaccagtgcgaatctcaagagccttctgccttgactttgctgtttggctctgatcagtaagttgggcttgtggtgctagattgcttggaccacttctcttttcactgtcatagttagcttgtttagcagagcttctggaccgggtcattctcctcaattctccaaccttagcttctgctgctatgcaatcttcgaagtgactttgaatatgatgagcggactctggaggtggattatactgctgaattgaggggccaatagactcttcaagtgcaattccatcctccccaacaacattagataaactacccacattcaaagagttatgttgccaaccagagctttctttctccttgctacaagaatcacccactttaacaccttccaccgtgcaaatgttgttactgttatctacagcagggtttactaagttcaattgttcaggctggtcatcttgaaaggaaggaatgggaatgttttcacccgaattaatggcattcttcaatcgggatttagctgcttttgtgccagtgcgaatctcaagagccttctgccttgatttggatctttgaatcttagccaatgaaaaagctgtctctgatctaacatctaagaatcctgcatctctctgctcttgaggagatgtaacactaccatcctcaacctccattctctgatcttcaacaattgtattacactgatccattgtagaaacaccaactgaagcacattcagcataatcaaaaccatcacattctctatcacgcctagcatgatccaaaccatccaattctctattttcaactgatactttcgtgcacgaaccatttggtagttccctatttgtagcttcagcaattggttcatcatacactgaacaatgactaaatgcaaatgggattacaggccttggacgtgacagaagcacccccgaaatgaggtcttcacaattcaactctggcaaaagaaaaaccaaaaaacgaaacatttacttctgcaatgcaaagacatcataattgagagtttcttactttctcaatgttaattacacattaatcctctttaaaataaacaattaaaaaaagacattgccaaaatttgactgagtaagaaaaccctaggcttagtttgttcaatccaccacaggaaatggtccagaactatatagacactaaatccacaaagccaaacactacgaatgaaaccggaacaagtaatcgaaaccttgaaagtggaattcgaacttcaaacaatcgaaccaaaaaatcgaagtgaaagaagtaagagcacatatacaacaagttcgaaatcaaaatcaatggcggaaatgcaatgttatttacttaccagtggaatctaaggttcctcctaaccaaggtggaggtgttattccatcgatgaggagcttagatgcgaggtgcttatcgtatagactcgtctgttgtttgacctggtcgattatccacgacttcctctcaaaaatctgaacccagagcttctcaatcgccgacattgtcttcttcttcaacctttcaattcgtagtcatgaagaatccacaacagaaaaactctagagcgagaaactctgcgacagtgtttagagagagaaagagtttttggttttggggacgatgacgatttgagaaccccaaacgtttagcgcggtatgagaaattcaaatcttgccattattcaatgataaacgacatgtcgttttgttgatgatcaacagagaaaaaacgacatgtcgttgataatcaatttcagctaacgacatatcgttcgtataatcgatttgtcgttggaat

SEQ ID NO: 25680 - DNA, 2503 bp, Cannabis sativa
gagatgagaaaataaacaacccttaactctagccttgacaatcaacttgatctggttacttagcactttagcaaagctacaaacaaactcaaagatacatctatttctattacacaaaatgcaatatatagtagcagcaactaaagtgttaatcaataagttttttttatttgcttcagtgtaaacttttatcatatttccatttgttattgttaaggttcttcaatttgcctttaacaaactctccacctttgcaacgatgtgcatcactatttttcaaactcatgatttccatgtatagaggtaactctcttgagcataaaacgtttcagacttgagtctgtaaaagaattactacctgattcaagtttcaacattttaattataacatcaaactagcaaaagaagagaaattgagactcaccagcaaagtaataacagtactgctcaaatccaatataagcctcaaagcttgttctcgaaaagccatcaggtcaagaagaagctgattcattaaaaggtatatatacatatattaatcatagttaatttgatgtcaaattttataaaaataagctgaataaaaaatttcaacataatagtaggaagtgaagtctaatggattttcatagtccaatagcaaagttcacacttgaatccttgaaaggaatacaactcctggattaatcacagccatttgtaagttgtaacaattcaataacatttccaaaccaataaacataacattaaaaccattgagagggagaaaaagagagggtaaaacaattggcaatcctctcttttataattttgtccaaatcatcttaaacactatgactaaaacttcataaacataaagatcacacagaattcggtccgagcttagttaaacagtgacaaattgatatctagtgtaaaacataaaataagaaaaggaagtatacaacccatgtagtacctgaatccatggttccaaactctgcaaatgatgttctgcactatcatgtaaagcatccaaagcaaacttgtcaacctggaaccagtatcctcactagttaataaagttcaaaaacccacttcacgtgctgccacacaaaatatccagcattcaaatgaaaaataaacaattcttacacgttcaagttgtaatttgctaaaatgttcagggaacttctttgagagcaatacacaaagtcttggatggtttgggaacacgcctgctttccaaaatgcttctgaaaacacatggccaacgggatctgggtagtccagtatttgatttagcctatacattttggccataagacctttagcaacttctgtaagttgaactacccattgcatattcaaacccttatgtgacccaacggagctctggacctgggcatcatgactggtactcctagagctcttgggtgtcatttctggacccaaatattcagtccatcttgctggaccctcccattccctcgatcttacagaagtaggcgacaatgatgaatcttgacttgaatattgtgttcttgatttagccattgcttaaataatctctacaagcctctgcatttaaagttccaacatgagttgcttcaaaaaaaaaaaatccaacatgagctaaaatccactgtgatcaataatttagacatttgcatatgtttgaatcgtttatttaaagtagtctcactaacatatacagaataccaaaacaagcgtatgaaaaaatttccttatttgcagatacataaaaaaaaaaaaaaaaccttcaaactaaatactctaaacaacaaagaccaattctcaagctgagcatttactactagaaaataaactcggaattttttttatttcatttgttagctattcggccgctaatgtaggaaagacctcagaaaactaaattactagaaaatttagtaagaaaagtaaaaaaaaaaaatggaaaaaacatcggaggcaaaaatagcaacctcagtggtacagtttcactttcagacccgaaaacgacgcaatttctattataaaaaaagaaaataatctaatttccatgagccacattttctcggcaaccaaatgaaacaataacgaaaagagtgggagaagtaaagagagaaacgaaggaagaaaaggtacagagaattgatagaagtggaacttgagaaagagagcagcttgtgagtaacagagaagatgaaggtcagatctgagtcttgggcattggtaggaggagtagggagggaggcattcgatttcgatccttgatagaggagttggtggtgtagtgggagagctgaaatgaaatgaaatcttacatatcaaagagaattgaaaaattattaatatattttatcatattaaaagtaatgagaattagttataaaaaaaataaataaataaataattaggccagttgggaccccctttttctttttcttttttctttttaggtttattttattacagcgacaatcaaatcacgggtaaatactatactatactattactg

SEQ ID NO: 25681 - DNA, 2885 bp, Cannabis sativa
ctcaagatcataaacacataagaatgtgcttaaatcactacaatttcagcaacaatttaaaggataaaagagataaaactacctaaagatctcaaatcactctagctctaaagattatcacaattcaagcttgaaactaagcaatttccaacaaaattcaagagctagaaagaagagttttaagagagggaggtggtcggtttaaagggctgagaacaaatgcataaattgcttttcatttttgcaactaattctcgtttgttacaactaatttgctttgccaatttaccaaagtgcccctagggccatataacactcataaaagtattttagggtaaaatagtcattttcatcataaatatactcaaattaatttcagtttattcacacacaaataaaatggcaataattcatcccaaaattgtatttcggccccaaacctacttctgcccgaaatacccagttgtgactatactgcgcaaacttgtcagaacacacttgaaaagggacaaaacaagcatactatataataaaatagttcataagaacatcataacataaatttctcagttttacccttctcgtgtcaaaatgaataaaatgcccctagctcaccaacggggtcttgacatggcatatatcatattaattcacatataatgaattatatactaatataattccataatgatacccaattaactagttagggttcgctaatccattttcataatcttagggtattacactgctggccatataggagaaacgtcgacactagtagcaactgtaggccacttcccacctattacaccagccgtagcttttgaggaaattatccagatgacaatggtccaatatacggccatgtagaaacaaatgtaggcattgctggccaaagttaggacccgacatctgcttcgagtcccgaacacgcattcgtgccaccctcaagtaactaccgtgtataaatgacaaaacgaacatcttaacaatagtcatattcacggggaacaagggaacaaataagagggtctcgactttaaccagcccacatataattccatgcaaaatagggaacctgtcgcacctaacacagatcgtggtagagaagagagaccgcaagaggaagaccctgaacgatgaaaccctcaaagtcaggcccagccgcaagttgaggtaaacaaagtcgaatctcactcttcctctactaaaagccactcccctagtgtttataccaggtcaacatctgttgaaacacgatgagaagggagatatcatgttcataaaggtgatcttcgtgatcatcgcaattaaatttttagggcacgatcccaaacaccaaggaatcgcgatgatgaagaaccttgtgatccctaagtgggcgatcaaggaacacagagcgtaaacaacccgccaaatgcaccagctttgactatagaggtagtaatcctagctaacatagctgcgattactgccatacgaacggtaacacatgccaatcctgttttactgggggtattgaccaagagagcctcctgggagcattcagaattatcaagcagcagagaaagcccatatccaaactccaagggacattgccttttatagaagaagtgcaacaagctcgactcccgatgggctttaggctgtctgaattgctcaaatacaaaggtttcctaacccaatcgattatttagataactttaatactattatggaaaatgttggatactcgatgcgactctagaggagaatgcccatgaattgttcaaccaattacttaaggcctccatatcaacatgggagaccttcgtagacctattcgtgacgcacttcaaggccacgatgacgtacaaacttccatacacaacattgggaaatataaattaggatgtcggtgagtccttacatgattattttaaacattttaacgctgaaataaccaagttcgagaaggcacccaagtctttgttagttttcatgttgatcgcaggtgttttgtcgaggaccaatttttggaaggaactacaagcacgacgacccgagttgttagtagaattctttgcaatggcttaactgcataaaacaattgagaattctttggccgagttgtagagagggaaggagaaacaggagtcccccgtgccctgctcgcattctcggagcccgaaaggaaaaaattccagaggtcgaaaccccagaagacgcagtccacagagacgacgagtgctggtttcttcaagacaaaattgaagaattgatcagatgaggaaaatttagccaatacaaaaagaatggagaaaatcattcccgagcggatgatggcgacaacacaaatgatgcgtgtggctttcaaacccctcgcaatattttgaccatcataggaggaccacatgttggtggggaatccaaaaaggcgcaagagcgctatgcaaaggaagcaaaagaaaaacccattaccaatgtgaataatttaagtgaacgactggagaagttgttccaaaaagagtgtgacaatatcactttcatggagagtgatgctatgtgggtacatcaccctcacgctgatgccttggtaatagtcgcaaacatcggaggagacaatgtacatcatgttttagttgacaatggaagctccgtcagctttctaaactttcaagcctttaaacaaaaggggttacatgaaaaagacttgcgaccagtaacttcaagtatctatggcttcaccaatgatacaatcgcattaaaaaaatgatcaagttacctataaatttaggaacttgccctgttactgccaaatcgatggatgatttcgtaataattgatcagtattctgcatataatgtggtaattggtcaccccattttgaaagagattaaaat

SEQ ID NO: 25682 - DNA, 2288 bp, Cannabis sativa
agaatcactattataaaacattgtaataatatttttacaatgcaattaatcaccattatactattcatatatgaatgaggattaaactttacacctctatatgtaatcacaattacactattatattatttacgtgcaatttttttaaaagatttatagacacacatacaattaactgtttcaattttgattttgaaaattttaaataatataattttaaattttttaaaaaatgtgtgagtagactttgtagcacattattcatccttaagttagacagaaagaaattacaacttaattatgtattgatataccaaaaatataatattaatgagtattgttattgggcatcagtatcagtggtgtctaacacctctaaattatcgtcttgcgattagtaatactccctaaaaattattatattaaactatatgagactcgatatttagttagaccaatagcgatattgatacataaaaaggtactaggcaccactgatgtcttttagtatttctcaatattaatagataaagagtattgttattaaacattagtggtatctagatgcactttatctgtccccttgtgattccctaaaagttatttcattaagttatatgagatctaacttaattgtactaatagtgatattgacacgtaaaagggtgttagacactactaatgcattttagcatttctcatagataaagattaaaaaataattactgtaatgatgtaagaaaactctaaggagactgcaattaggtggtttgaaagttgcatttcattacaaaaaagagctatttttagtgacaaatttttagtaacaacataaattttttgtgactaaatataacttttagtcacaacaagtattgtgactaaaaatacatttattctcaacaaactctgatgtgactaatacttttagcaatggaccttttggtcacaacataataattgtgatttataattaaccacaattttttatttttagttacgagttttgttgtgactaaaagtaagtttttttgtagtatttgtcttcaaggagacttcaattacctcatcaaatttatcgtgtgactacatgcaataatacacgacatatatatgttgtggcactgtagtaataatcttcatttttttttaaatatatatttatattattatttgtatttataaaattaatatttaatttatcgcgtgtaaatgaaaatgtacccctatctatttaggtattcgagaaactttcatttttttttcatgctcatgtacattataattttctaagacatctaaaattttgaaaattttgtaaaaatataacacaccggaaataaggttcaaattgtcagttgcatgtgtgatcactcttttttattatattaaaaaataaataataataaagaatatttttttagtgtaattttttttttagtattttggtttgagtgaaaataatttttgacattaaatttaataaatagcgtgacactaaatttagtgtatagattggagatcctataattaaaacccttcaaaacaaattactaaattatttgggactcgatatttagttggaccaataacgatattgatacattagaaggtgctaggcactactggtagcctttagcatttctctatatatatagcttgtgccaaactaataagtagtagagaaaaacattaattattacagaaaaccaaagttgtccatggcaaaggaaatgatgatcacttcactctcttacaaaaaataaaataaaatgatattcactaatagtaatataatttactcactcaatcacacactctcttaggatttttatcaaacacttaaccaagtagggaaagtgataagataagaacatatatatacatatatatggacaattacaaagtacaacccctttttatcattgctctacttggtggtaccttacacagtcaaatatgcaatttccccatgcatcgagcggtgaactctaaaaaaatattaatataattttttctttaaaaaaaaaaaaaacaaaaaattgggtggtaataatcttttcccatttcatcacttgattacaaaatgagaatcaagtcaacgaagtttccaaacttactgagcaacaaccaaccatattctgccacgtaataccaaaacaatgtgaaaaccataaagcaatgaaaggggtagtttggacaattcatgtttacggggaacaaaaagacaatgggaaattttatttacaccccaaaattttttaaaagcaccccattttaataatttt

SEQ ID NO: 25683 - DNA, 3119 bp, Cannabis sativa
tgtcagatagatcaaaaggtcctttattgagtcagccgtgccttccttgtatgctagcaaatgtttatgttactcattttatgaacaattgagttgtacacttatttttgttttgttactatcttctgtatttttttttaaaaaaaaaacttatttttattgtaaaattgaaactaaagatcgcagtaagttaaaagcaatcatttattatgctttttttaaaaaataaaaatcttatgtttatggattttttttttacataaatttgtatttatgctatactaatttattttgaatttttattgtatataggtaatatacattctaataagatcaataaatttgggatatttatgcttaaatataaaataccacctaattagaaatggtttatctatatttttaatatctttttcttccaaaacacccttacattataaaaaaagtctctctctctctctctcttgttgtctccactccaaagccccaaaatccaactgaaccaccctgaaactcccgaaatccctacctattgctagagttcactccctcattttctgcatttttttttaagttttagacgatgtcgtaaaatatcaccaaatgtagttatatcgcaaaatatcgctaaatgtctctaattcacaacattgttaaaaatattgctgaatgtcgtgaaatcacacaagttttcacaatgattagcgttataatgtgcatcttttgtctcatatcaaaaatacatcgctaatagcatcgctaaatacataaaacatcgccaaatatcgctaacctttatccctaacctcagatttagtttgtcattgcaaatatatcgctaaatattgcaaaaaactaaaagaaaaaatgcaaaaaacgagagagtccgtgagagaggacaacgacgggggcttgcgactagggttctgggtttgtgtgttcgacaacaggggttttgtgtcgaaattcaatgtcagagagtaagagagttagagagagaatttttttttttttttcaaatgtaagggtatttttaggaggaaaagatattaaaagtatagatatactatttctaattgaataatatattaaaacaccatgttttacatttaagcatactaagccaaatttcccaataacatccatcaattaaataggattatataacgtgacacataagtaccatatatcgtaatataaaaatttcttattggaatcaaaaatggaaaccaggtaccaggaatgcgccatctcctccattaattataacagtaggactttgaatcagtgcatgaaacacaaatcaaaatgaaaacttgaaattttacttctcttaaaataataattcacaaatcgaaaaccatttccaccaaacaactccattaacgataaaaaaataatagttttattcacaaacaacaaaagatcgatcatgagttcaaaattaaaatagttccttaaactaccaaaaatacttgaaaaattagagacggaatggttgatgaataaaggaatcactcaatcaacactttaaaaaaattgatcctaaacgacataaaaaaaactccattaaaaccgataaaaatagctttgtggaaaaattaaaactaatggtgtagaattaaattaactaaacttcaaataatcaaacgattagcaatgacaagattaacaaacacaagcagtaatcggaggaaaaacagggatgaacaaagtatgaacaaccagaaacaattaaagctgtaaaacgataaaatcaacacaaagatatatactggttcaagcccgatagatcgatataatctatggatctattccaattctagaataccactaaattctcttaattcattgagcaagaacatgtacaatatagtcaagattgattctctgatggattctctcaaagtatttcaactctcacactcttatatatccaagaattttcttcatctacagaagattcttcatacaaaacccaaccccagtctttctcttttctttgtacctttctctctctacctctcaatattttctctctatctctatctctaaactcaatctgatcattgtgtttgaaatgataagtgttggtggtatttataggattacgatcaagatcctaaagtcgatggctataagaagttaggttgtcaagttagttaggcaagaactaacttaaccaacagatctccacgttagcataagtaagagttcatctgggagcatgtatgagggcttccagaattatgaaccaaggcactctttgaaggaacattcggataggaaaaagccaactggagttgactatctgggactctctttcaggaggaacaactagccattcgaaactcctttctagaggaaggctagctttcttgaggactacacccggagtggacatgatggtcatccgggaactcccttccggatggcaaccatcattccacaagacttcttccagatgaataagttagttttcctggaacatactttcgagagacaaataactttttaggaataaatttttgaggaccttttaatttggaggaactataccacaagcttcaatcgtgaaccaacaattacaacttcaaccaagaagcgacaaatcaaccaaatagtcaaaataataaggtgattaaaaatttgaaacaaaaagcaactttacattttgcattgtgatctacaattacagaattgtcattatcatcatcgatgcttcatctctatcgttcttcttatcacttcaaataataaccccacgaccaacgcttcaaacatgagcctaccatcctatagcctaccaacatcactaccacaataaattgacaaaaataaactataatgttcgtatgtacataaaaatagtatttttatataacctaccatcctatatgcctataaacctattagtttatttttttggcatattgaaacaaatttttatttttgttttttagagagtgttgttgaaggaattttaacaacactaaaataaaatataataataatataaaggggaatatatgcgagtactcaacctagaatggtaagtattcaaactaaggacacaaaatactgaataaaaactggaaatataaagaacacaagagagt

SEQ ID NO: 25684 - DNA, 2759 bp, Cannabis sativa
ttacaaatttttatttacaaaaatacgcttgtagagttataaaattacaaaaatacactttgttcggcaaaaagtagaaaaataactaaaaaaataacgagaaatcaacctcatgacaactatacatcaactataaataaactataaaacaactaaaaataacctcgtgacaattataatacaactataaattaactataaaacaactaaaaacggttcattagttttactgaagagatatttttctaaataaaaaagttcaaagagtaaaaatgaaattttttccgatgtattttttgtaatttttttttcaagtttttagtctattatgtagatttttctataaatcataaatagtataaaatgatcatttctctacaagttttgaaataaggacatttacttacatagtgctatgatttaggatcatttgattatttcacttattattattactattattattgtagttgacaaacttaccataaataataggtctaagagtacttctaataatttctctactctatcatttagaatgcctcactaaaataaacttttttttctatttgaacacaacatattttacattataccatacatcaacttttttatagtttttttcacgtcatttaaatatattacttatattaattaaagtttaagaaaaaagttaaaaagtaataaatataataaacaaatgttaatgggagaaataaagacaattaagtacaaaaaaaatatttaaaaaataaatagaatagctttaaagcttagctacatttagctaaaaaaaattaggagtttgagatgatttactttagctaaagatttagagcatttgttggaaaattttaaccttttagctatttttctgcgtactatagtaaaattagagttctcatctttgggatatatccaactaaaaattatctcaattaaaaagtgtaaataattttgagttgttatagactttgcatgcctctaacaattcatgcggtgccacttgtttcggactgctcaactcataagtacagggaaacagggctcgattttgagaattaatgccaagtattctaagttggatgaggatactagggaaagtgaatatcgggcccagatgtttggaaaaaccagtgaagtcgatgatgagttatgaatttattttcatggcagatgcttcatggttggatgacaaggctgaattagctatggttatgatacaaaaagattttggagtttgggcaatgaatacttgtcgaagtaatgttgcttcggcactggatgctgagatccaagcaatgttcctagctttgcaatgggctaagaacgaacgatgggaccatattactattgtgtctgatgctcaaactgcaatcatggcctttgaggcaagggagtgtccccccgcttggaattgttggcatacttcctataaggtcttagagattttagtttcctttgtttgttgtaatttctatcatatgcctagaaattctaatgttttgctgattcattggctaagagtgctagatgttttagccataacactggtgttgtttgaagggaaagaatctcccttgtgattcctgtcctgatatatttttctaattaatgtactttggcattctttaaaaaaaaaatatagtagaattcaataatatttttttttctttttgataaccgaggattcaataagatttagtatgtaaatttgaattcataaactaagtaaacaactacaagagagaaaattaaagattatgttcatttcacttctttagtaactgcgattaaaaaaggacattaaaataatttttcaacgattttgataagaggtacctaacccactcttttttgtatctgcactctttttctaattttctaattggttaacatcaataatctcttaaaatatagttatatattgaaacaattaaacttttgtcctcacaaatttatttaattataattaaataatattagtaatagtctcatattattatttaactatagtttattttagtataattaaaatagtattagtaatagtttcatacaattatttaactataattgaaagattacccaagtcaatcaattagaattagaaaaatgcaaaagattgtagatggattccactctaaaaataatactaacaaataaggagaagcaacattccaaatcttattaattttttactcataaagtttattccattctatttttatttttaatcatactcattcctctattcatcattactcctaactaaacaacacctaagcatttactttgacaaaattgtgcttattccttaattttaactacggtcatacatagtcatcagaaaacacatgaaatataaaaataatgaaattctaaagagtaaaaaggataggaaatgtaaatattgttaaaataacaaatggccatatactaaaactaaaatacacgaataatttttttttttagtgcaaacagagaacatgaataaattaaatgactgttaagaagttatagtgtagcaaagcccgcatttcattgttattagcatatagtaggtgtacagtataagcttaaatgtgccaagagaattctctcacaataagagagaaaataagatttgtcaagagcaatttcttcattttaatttagcaccagtatatacccaactcccaaaatcaatccaactaaggatatcatgttcttccagacacaagcagctactttagacaactatatgaagagagaagcaa

SEQ ID NO: 25685 - DNA, 1838 bp, Cannabis sativa
gaaaaaaccaaatcgattaaggcaactgaagacttcaaataactcagttatacccaagccccctgccaactcatctcatatgaagccaagtataatgaggctgagagcaagttacagcccattgtggggaattttgacgcacttcaaatggacctcaactcaaagattgagtaagtctgactcttggagggacaaatccaagccctttctaagaaacgggaaaatgccttgtctacaaaagaagaccttaagcttgatcaaaagctttaattggatgatggaaaaaaatgaaatttctgacatgaatgcagatagggtgcgagagctaaaagaagtcattgaggtggcaacatttacgatatggcacacagactgagacatgtctctcaatgtatttagcctaaaggaaaaggagacgagagccaggtttattgcttgagagcaggagatactttggaaggaagaacttgagaatcacaagaacaacttgttgctctttcgtctcaagaaacatgtgccgactccgcatcttaggaactcactgttatccatcgggcatgagagcgtgatgccaaccttccatcccaagaaaaatacaacgcttttgatcttccagctttgaaccccactggcccaaggattcgtcgtcgatcgtccaacctcaagtttaattaactttttccttttattttttatttagaggatatgggtttcccttttagtatttgtggagtcaatagtttttccctaaccacatgtgttttatacttgtaatattttatctatcttttgacaagttcctgggaattaagatagcttttattactttgaatataatttcacatttctgattcatataacattataactttatagaattttaattaagctatttactctgaattctctgaggctccggttccaacaacttgagcccttgggtttcaatcttatacttagttcttttttcaacgtttttattatgttatcgatttagggactcctagaggttccgattctaatggcttgagcctttagatttcagtgtacttactttaacccatcaattttaggatggaaattctcacgaaagcaatttactttcggttccttgaggttctggttctaatggcctaaaccctttggacttcaattttcactaatatttaagaattcccttttcattgctcagaatttgcaattatgaaagcttgagcttcccttttcattgctcagaatttgcaattatgaaagcttgagcttccctttattgtctacttgagttaacttaaaatttattgatcttatagtggtatgaacttttcacccacgaactccatgagggtttcggtttcaatggcctgagcttgccgatttgaacttccaccccaagaccaaaaagtgaatgattatggttacaagtctctcaagtgagctattttgtaaggtgcaagacattattagtgaagagtgatttttctttactgtgaccttgtattccaccattgtttacatcaataaagcttggccaaaaagtagtgattagtcaccacaaaatgggtggtgaaccatactcgtgtcaatttctttaatcttcaatattctattacattttctggttttgttcattacttgatgacatgtgttattacttcagttcatgttgtttttcgattcttggtaggtattataattcaccacatatttaaacaccaagattcacctataattctataaacacaacttatacaaagtagcaattatttcacaggaataaagaaataaacaaacttagcatatataataaaagaaaaattggacagaagaaaattattata

SEQ ID NO: 25686 - DNA, 2093 bp, Cannabis sativa
  modified_base (1987)..(1992): a, c, t, g, unknown or other
cagattaagataatttaaatttggaaaaggggacatgagtacttacatattgttggttaaaattcctcatgtttttcgatgcattacccaagtaaggagagctcagggcctgaaataatcattatatatttttttttatcataatctaggaaacgaaaaaatggaatataattaattactagattttatgactatatatatttataggaccccatagttatacctgaagaatatttagaaaaatcattgtcagtactttaagtgcttatatatatatatgcgcatgcatatgctataatttgttgagtttaaattgtagtactgaactggggtatcatgataataaatagtttgtttgtttgcagagaaaaaagagtatagaaaatatggaataagaaagaaagtagaaacatcacctcaatttgagtgtgaaggaatctgatatacccaatggcttctaacaacacagaagcagtgtcagtctgcaaaagaggaacacacatgcattaccctattcgtctttctccatttctcttttatcgaatatccctcccattatttttcaaaatcaaaaaccaatcccatataatatatatatatatatatatatgaattcctatagtaataaagttagctatagtaatatggtataggactagctggaagtatatattttaaagtaacaagtgaggagatgtgttattattttgtgttatttgtaaaataattatgagatgactgaattaataattaatattaattaattaacaaggtttataattaattttggtttaccttcccaaatggggaaactagctggtgaagtgccgttattctatcaccaagcttctccttcctcacctatacttgcaaacatcattaaacaattactatgcaggaaaattatatattaatgtgtatatacatctcaatttggatcagaaatagggaataagtttattataaatatgtctatattaattaattaggtgatacctttaaaggtggttggcttgaggatgcctgaaccctagccttcttattactcggtcctctggaatctgtgctatgacactacaacaaaaaaaaaatatatattattaatataatactaaatccaaatttagataaattaacccaatcgaaacatgtgtgtcatacatatatagctaaacttttatcaatgaattcaactatttcataagaaaataatttcttaattaattaataataataacggatttaaatgaccactatatatataaataaaaatatatttatgttacctcagagaaatggtctgtattttggtttgaactttcatctgggctgttattataatacgagaaatccaacatattattactacctaaactagtagtagcagtagtagtgacacaagacttaggtgaagaaactagtgcttgaggtgaccaactaatattattattggacctattcattccctgtaagcactcttcttctctgcctaattgactatacaccaaccctcttttcatggaacttccctcttgctttacaccctcaccctgatcgacgccgtccacggtggttgtggcagcggcggcggttgccggaagcttgactacatgagctggtgagtcattattattatttccaagtaagagaggttgttggtcttcatcccaattttccaacttcctaggttgaaaatgatgatgactcagagtactaatagtattattaccgaacttatcttcatcattatttcccgaagaaccattagtacccctgaaaatagtattcaccaaatatacatatatacattaatttattagctatgatgagacaaacataatgaaatttcacacatgcactgtatatataaagtatagtatatagttaattttctctaattttttaagaagattaaatttcagtaatcgaaaacccccatacaattaccatgtgatcaaaactaataaaaattaataataataataannnnnntaataataataatattaaaaaataccccccaataaaaggtaaagaaataaagcttatgactctctgagttgtgtctgtttggaagagagagagagagagag

SEQ ID NO: 25687 - DNA, 1917 bp, Cannabis sativa
ttgaggtaatggtggaggtggcttgtgcaaagtcttttcaacagaagaatgatgatttgatgttgaaactactgggggaattttaatagttgcacttactggtttttttttgtttccccctctttttggattaaagtgggctccttgttgcccattgtctctgcctcatttgactccagatttttactatttctcaaggttaccactttgcaatgctctttgccaactcttcttaggtgttttgtatcactagggaaagtaccttgtggcctattttgaagctcattagctagttatccaacttgattttctagagttctcgtggaagttgcttgagtttggattgcagtgttattttttgccatataattctcagttcttgtcatgaaattttttgtcttgaccttgaaatcttgcatcatactctcatagagttggtttggctgccttgttagggtctttgttgaatgggttgttgagaaaaaccagggggaatgtttggtctaaaaggcatagaccaattgataggactagcccctttacttctgtatgccaagtttggttgtacccattttgacttcccatgtaatggactgatgtagggttgaatggacaatttttaaaggtatggccctcactacaataaacacaagaaacctcctcgagctgacccatagatgaggaaacattatattaacccatttattgacccatgctcatattcttcggcatatttgacatagaagctacttgggcagccaaagcggtaatagaatcaacctcaataacaccgaaaactttcttccccaaaggttctctagtagtaggctactggtaattgttgtaggaaattctctcaataatgtcataggcctcattataagacttagcaagtaaagccccatttgccaaagcatcaaccaccattcgagtattagcattgagactgttgtaaaatgtttctgtttggatacaatgaagaatgccattgtgaggacatttctgcaataattccatgaacctctcccatgcctcataaaaagactcatcttcaaagtgttgaaatgaagttatctccttttggagcttagcattcttagtgggaggaaaatatttcattaaaaactgccccgttaattcttgccaagttgtaactaatgtagaaggcaaggatttcaaccaaacttgggcttgatatctcaaggaataggggaataacttcaacctcaaggcatcctctataactctgggcaatttgaaagaattactcacttccataaatagatgaagatgaaggtgaagatcttcggtgggtgcgcccctaaactgtcccatagtttgaagcatctggaacataactggcttcaattcaaactatggtgcctgaatttttggcctcacgatgcccgaattgagctcattgaaaagaggggatacagatggtcggggtgatttgatctctatcattcgccatggtcactagattttgaccattgtttggggctagctccctttgaactcgctgtcaatctccttggttatccatcatttctatttccccttgtgctctttgttgtgctcttcttctttctttgaatgtgcgctcagtttttggattaatagaaaatagatcaggattaatgaattcttggtactcgttcatgtactagagtaaacctgaaaaaaaaaggaaatatacaacccactcaagcaacgttagaatcttaaacaacaaaaagattgtaaaataattgataatacacaatttttaattttaatcgccgataactgtgctaaaaacttgttgtggaaattaatatactatgcaagtgcaagcaatcgataacaagtaatataacaaatatatggagtaacatctccacaaggattgcaaattaaaatagatataaaacaaac

SEQ ID NO: 25688 - DNA, 1362 bp, Cannabis sativa
aatctgcgagtaaagcttgagctaagtgagcaacactcacaacagtaggggacttatcagaccatactagctcatttcgatgtttccaaattttcgatgtagagcaacagtaagaatattatttttttgaaaacttggcaagtgtattttcggttgtagaaattattattagttaaattattatctagcttgaaaaagtataatacgaaattattaatattctaatagatgacaatgtttaaaaactacctttcaaaaagatttaaacatactctttaatttcatttttgtagtaatattttctaaacttagaaaaaactaccaaaactacataccaaacatgaaagttagcattcgcaaaatatcagccaattaaaaaagattatcaaatatgtttccagtcttattacttttttactgttaatattgtgataattaatttatgaacttattattgcatatttagaagaaaaaaaaaatattgcatagtgacaatatatcttaggatataagtctatatatattacatttttaaaagaatatattttttgatacacttggtcaatgtttaagattatcttttaatccaatattttcaaaacacattataagaataatagtctttaatgacaacactatgataaaagtatcaatacgaaaataatgttaaaatattttgttgcacaccttatttgtttttcttatttatattcgtggtaaagttatttgaactttattcttatacagtactttattaaaaaaaaattaaaaatttatgaattattataaataattataatatacacaataattaaaaataaaaataaattaaaaaaattatccttcatcaccaaattaataagagcggtgccctgttttgggtctgtagccgtttttcctgttttttctttttaactaccacttaacttttgaattgttttcttcatccttcaaccgctccttctgttcatcttttttaatttgttttcctgctaactgttcccgccttgctgctatcttgctggagtagcaattccctgttcgtgtcctatctccgattacccttatggatcccctaatcaatgacattcatactgccctttctctcactgatgaggaacggccagttttcacaatcccagaatattcttctccacaaaccgaatctgctcaacacactctccttgccaaagttctcactctccagaatgtgtacagtcaaatgttcatagatcaaatgggtggtcactggcgaggtcgtttccaagttcttattactgaatataaggaaaaagaaggcttattccacattaagtttggctgtgaaggagataaaaaaagggtgttgaataaggaaccatg

SEQ ID NO: 25689 - DNA, 2197 bp, Cannabis sativa
  modified_base (1362)..(1364): a, c, t, g, unknown or other
tttttttcttctctttgacacaatttctttcaaaagttcaattcttcctctttatttactaaaactacaaaagttcgataaaagtacttattcttgtagtgtatacaatcatggaactactattgataccaactgttagttttatgatactaaatcagatacgcagtggaagagtttcatattaactaatcagcattgtaccatatctcaatcgatctctagatgtttgtacattaaatcattatattaaataataagtttaggatatatacctcatgaagactatcagggtatcttcaaaacttctcctatgttgtatcccttaatcaatatagaattgttaaaaagatctatttagttggagcgggtcggagctccgatccgacggatcacttctgatccaaaacatttggatacttattagatctaagatcatattttctctgccctacctaattttttttttctgaatcggatctaattcgatccagtttcaatatattaaaaaaacataattcaagactcagaccccgaacttaaacccagaccgaacttgcccgtgatccaaacctggacccggacccgaaccccggacccgaaccccggactcagacacgaacttgaaccccaaacccaggcacgaacccgaacccgggaccagaacccaaacttggactcaaacacgagacctggacccgaacacaaaccccggcccgagcgcgggtgcgagcccgggcctggacttgggagccgagactcttacccaggccgaacctaggacccaaacctggactgagactgtgacccagacacggactcgggcccgagcgcaagtgcgagccctaacccgaacttggccccaacaccaagattgggattgcgacccaaacccagactcgaatctagacccaggatcaggactgggacccgagacacaaacccagaccgcgacccaaatcgagagccgactcgaacctgggctcggacccgtaccagaacccgagctcgagcacgggcacgagcccaaacctgaacccaagttcgagactgggacagggaccgagacccagacctagactaagacccagactcagacccggatccaaacccagacctagatccggactcatacccgagacccaaactcgcacctgaacccagacccaatcctaaactcggacccagactcggacctgaacacgagacctgagacccgaactcgggacccaaacttgaacctgagacctaagacccgaacttgacccataggttgtgttgggttttatgccctaaataacttgacccgtagagtttattaaaaatatgttataattttatacaatctattaatacaagtcaatnnnaaacatagtattgtattaaataatcttaatataaaattaaaatagatattaaattataagcttagatatatatataaaagaaaagggtcgggtcgggtttgatccgatccgaataagtcggataggatcggatctgatctgatcttagtatctgatctagcaggacagggcaaaatggattcgcacatgatctggattaggtcagatcatagtctgataagatctgacccgatccatttacactcttaaatccaaagaatgagaatgatgtaattagacttacaccagtgtcttccaaataattccaccacacacaaagaatagtgtaggctattaggataacgtgtacagagttgttcttgttgagttctcaacacatgagcaagaacaattgagagacaaaattgttttctttctctttatatttcaaaaatatatgtcaaaaagggtatttggatttctcaaatcaggctttacttatagtggttaaaaccctttaattaaatcatatttaataaatttaataagtaaatatttataactgaatttggttacttatatttatgagggaatctctcaactacttgaaagaatatctcaactttaaaatatctttaaccacttttgaattcaaatatttatttaattgaattaattaaataaataattaacctgaaagataaacgtgcatagggataggtgcctacccttgtcttatttaggacaaggatagtgtattttatcttgacagcttttatctcaacaaatcttgtcttaacaatttttatcttttttctatttaattaatttaaaaaattatttatttattacaa

SEQ ID NO: 25690 - DNA, 1947 bp, Cannabis sativa
aaacgaaattatcctaattcctgtacatttggaatatttagggagcaaatgtgtctagaacgacacatttttgagtgtacacttcagcatagagcttctgtcttcttctcaataagtgtgctttggcatcaacttgctacattgcaaataactaaagtcatgaaaaaatttcacaaatgtcgcataaaaattacacaaatatcaaataaattaaacgcaaagtaaaattgtatagtaatcgcacactaattgcatagaagtcgcataaatataaatatatgtcgcacaaaatttaaaacacaaaatttgaagagttaagaaacaatttatagcatcgtcgagccattcctcttgaccatcactttcacaaactaagactgattggctgggctagtgtgaacatccctaagacgtcgttgtcccttgagtaagtaatccacttttggaaaaatttatacagtcgtgagtctgctgaagtgcgcctcaatgtgtctacttcaactggcccaattcgttgtttcttctttccctctgtgttgtccttcaagaaaatcggcttccattttctcctaaccctcaagaattccactctagggggtggcccatccaactcttgcacatcctgagactgtgtatcacccacggtaaccataatggcatctgttggagtagaaggaacctcatctatgttgggttcccaatcttccggatacatatcatcctcatcaaaattgtctccataatgtgatggttgtgtcagctctaatggctgtgttggcgttgatggctgcttctgcaacaaacttataatggccgcaatttgatccatgacaagccttcatctcagtctgtgcagtcataatctcaagtttttgggtttcaacattctccaatctctttgctaaccctaagtagtcggcggcattggctatagtagaggttgggggcacaatggcagatgtggagggctttggtgcttctttcaatggtgatggtggaattattttggcactttgataataggccacccattttgcttgggtctcgaatacggttaaattttaagtaccaatttgtatttcttcgacctcatccaagcccatgtccaccgtggggaaatcacccctcacaattggacttctaataatcaaccttccaattccaaggatacaaaatttgaagaacaactatctgcaaaaagtacgaattgaattaatgtcaccaaatattgcactaaattgcatacaaatgttagaaaatatcgcataaataacgcacaaaatcgcaaaaaacataacaaatattacacaatagaaaatcatgcaatgttaatataaatcacacaaatgtcgcacaaaacaaaacttaaatcacagagaaactcatgcacatatgtcgcacaaatatcgcacaatgtcgcactaaaaatcaaggaaatgctaaaagcataaaattgcatatattcacacaaactaaagcatgaatcgtataaacataaaaaaaaaatgtcacacaaatgtcgcataaatatcgcacaacaaactacaacaattgcacataaacacaaataacacttatagcaaaataaatatcaaaacaacaatgataaatagagaaagattcacatacccttttctcaaacagtacaaccacattaggttgcttcacatcatctttcgtaacttaataaggagtgctccagttcaacattctagggaatctagtccctttgcactggccatacttctttcccaaatattgcatgagctcaaacacttaatattgcagggccggtgcatattcgtacacattgtacttcacctctagttgagtaatatttttctccttcttcgtcttatctttcttaatagagaccttatccatgtagttcttcctaagctgcatcatatttttagttgtagaagacaacaacttctgataagaaag

SEQ ID NO: 25691 - DNA, 2761 bp, Cannabis sativa
  modified_base (1882)..(1883): a, c, t, g, unknown or other
  modified_base (1968)..(1968): a, c, t, g, unknown or other
tacaagtttcactatatatatataataaatacaatgattatattatacaaactatattatatgtagggatatatttatactagacatagactatataatacagtattaattatatatttatataaatttgctacagttgtaaatttaatcattttttatctgttaaatgttaacgtttctaattaatattaattatatctttcacatatatatttatttagatttttttaaaatgaaaaaaaaaaattgaaacgtcaaagattcaaatataatatttaagaatttttataactataacatacacgatgatgaaaaaaaaaaaattaaactaaaaaaatatcaaaataagatctaccaaaatactaaagagtgtattacatatttttagtaaaatttttgctattttgctgacaaaagtttttaggtctgcatgtacatgaaatgcatttataaaaaatgtattaatattggactttattgttaatataataactgtgtatatatgtaaaccattgaaaaatacaattctaaatattttaatgtcaattggccaattatattacaaggaaacgttattaattataaaatacatacacacatgatgacaatgacttgaatagtgatgattttaatttactcattattagtcattaattaaattaggttttggacaatattagctagcaaattattgtatgtaaatcttgctaatctttctctctcactcttcatatattattttttgtcatatacaccgtacgtatttgtatatatatgtcgttattatacttttgattttcatgtgaatatatttacatatacatttcaataacttgagctgtaaattatcactaaaatctaaatattaagtatatttttttgtcaatattaatgtaattgaaaatgctacaaaagctaatcaaccaacataacatgccattatgatcactacaaaccaaaaacgagagagaccaaaggagcgggcaaacaattgagatatatatggtcaatttgttatgttgtgaggaaatccaatgtggttggtaactaataaattttaatttttaattaattataataatataaaaattagaattatttaacataacataatgataaaaataataagatatatattataattagtgacaatttatatctaaatattatgttttagttataatttgtaattttttgttgtgactaaaagtcacatttagttataaaaaatttatattgtgactaaaaaattacactaaagttttcttttttaatgcatgatcaagagactagagccactggtatctagtgatgctcaaatgatcagtggtatcagtatgcactacaagaaataagatttttgtcagcgtatttggtaaaacaatatttatttttgccagcggcaggacatttttgcgctagtaaaagtggttggcaaattaatctgtgttggcgttgaaacttttactaatgcaaaatgaaaagtgttaacaaaaatctaacttttgccagtgtaaatactaatatagaaataattaaatgatgccttgagacaatgttcaaatcatattacatatatttattactaaaaaatattatatttagtgataatattttagtcaacataaatttttgactaaatgtgatttttagtcgcaataaaaagtttcttgtgactaaaacattgaattcaaataaaagttatcattacaaaaaactgctatttttagtgacaacgttttagtcacaatacaatatttttgtgactaaatgtgacttttattcacaaccaaatgttacctgtgactaaaacataatttttagatacaagttgtcactaatttagttttagtcacacaacaagtattgtgactaaaaatanntttagtcataacaaattgtaatttttgtgactaatactttttgtcacggaccttttagttataacataagaataataatttatanttagtcacaattttttcactttgtcacaagttttgttgtaactaaaagtaagattttttgtagtaatatcactaatttaattttagtcacaataaatattgtgactaaaattatatttaaccataacaaatttttgtgactaatacttttagtcacgaattttttaatcataacataaaaattattatttaattataattttttcacttttatatataaattttattgtgactataagtgaaatttttttagtaattgtagaggtggttaatttacaactacatcgagtgttagctcatatatttatacatgcgtgtttgattaaatattgttttatatgctttttttgggttgagtcttactgtttgcctacaattgtctcactcttcatgaatcattattctttgtcttgtacaccattcgtatatatataactgttaaatttattgtcaaacatagtaaataaatatatatatagttttgattttcatataaattaatatcaaactatgtatacatttcaacttatataatatttagttttttgtcaatattaatgtaattgaaaatgctaaaaatctaataatcaaccaacttaatgtacgtgccattattagatcactagtatacaaaccaaaatcaactaagtgagagatcacaagagagggcaaataattgatataataaattaaggagaattgttaagaacatctcttagtatattattggtgtaattttcagaattgtacacaataaactcttatatgttataaatattaataattatgtggat

SEQ ID NO: 25692 - DNA, 4199 bp, Cannabis sativa
  modified_base (981)..(984): a, c, t, g, unknown or other
attatattgaaatgggttttatttagggcagacaagccaacaaactctcacttacactaatataaaactaaaagtgcatttctattaatcttaacactttgatatctagatcaagcatagtttgtagtattgtcattgtaacaggatttgacagattctattcaatatataacctatcctccaccattacatatcctaagtcacaaaattcttgatattgtaaaattcctctctgtatgtctactcctctaaggatactggattttttattttttggcaactacatatgtgttattcaggttgtaacactaatagctaatttattattggtacaatgccaaaaactgtataaaactttccataggctgaataagtatcttttctgtaactttaacatttattctcattggaagagttacactctccaaaatcattgctctacccccagagtaatcaccatctcatcaatagactttctagcatcaatgcaagtctagaaacttgattccgtgtagtctaagagtattacattaccacccttattgactaacatatagttcatcttcttgatcttaagattcatttgattttcttctaatgttcccttcctggattaatctaacacctgctcattactcccactcaatagtaggtgtatggtctaatgcattgcgaagcatacataagacctctcactgttgatcctaaagaattattttcatggcctttatcttttctggacatggcctttatcttttctggaatatttatcttttctggaatagttgaaacttttccttagataaataaaatttatatctaggagccaaaagaattcctatagagagccattagaaaaaaaatgctccagaatcttactaaagtaagtcactagcactagagtaagtaaactaccaggtataccacaagtcacaggtttagttaatctcatacctactatactaggatcaggaagttttnnnnagtccattgaatagacttattattcaaaatttcccttctttgagacaggttagctctttgctgttctcgcttagcacgtagattctcaatgtttctccaatgctccatgaacaagctatttgaaattgttcacgttgtttgtcaagagaatctcgcaattgttattgtaagctagccatttggctaagcttctcaactagatgattagcctcctcggggttttctagttccactcgtggttccccaggtggaattttattactggtctcagctccaatggcagtaggtggccttgggggacaagcagtggatccggttctgaggcatccacccaagatgcagatgttatctcgtcaccagtcccaataactggcgtgcccctagtgtgttggctagcagttgtgcttcttttccacacttatggatcgtgttgcaactatcttgtaagtgacttcttgagttatggctcttaatgaaagtaccaaaatattaactcaaaaaaccagccaagtcgctcgtatgtataaacgagatgaaagttaaaagtaactaagtaaaatagagagcacacacaagagtttatagtagttcactccatgtgtagcgaaagtaatagagctacagctacttcatgtttttattcccataagaatgattataagaaacatagctaagtttaaaagctctaatttctagatagataaactagagagagatgttctaaccttatgggtactattctgaatgtgaaaaatgagctagaggagctctccttttatagagaaggaggtcccattataataataataaaatattcaaaaatgtgaaaaaaaaaatacattaaactatttttgactgttgatgatgatctaacagtgaaattgactctagaggacagtcgtcaatttttggagcttgagtcgcatctacaggacttgttatgggtaagttgtagttaacatttataactctcttgaggatgaaatttagacttgatatctttagaattgtgattagagtgtgagacatgacttgatatagcattgaaatagctttaaaactcatgctaaatcacgtcaatcggattattattgagtgagttatggcaattttactgaaggttgctctgacaccaacgcctaggttgacattggatgttgggtcaagggaaaaaaatttggggttgtattttttgatgcctaagtgatcacttactagtttctttattctggtgaagttgttcactagttctcggagatgttgctatttgtcagaatcgatagactcaaaactgctcaattttttactaagccattttgtcgaaatagtaaaatatgaagttgtgactttgactattatgagttcatagttcttgttttctatgaaaaactagatgaaagctagagacaaaatcataatcaaataagcagaacgtagcgcatcaagacatacatcaacccgggagctaggtgctcttttataagcttccaagatgttgttttgatgcttccaaggtccttgaaattgagcacgaggtctcctaccctatttttgaccatgccggagagaatgcccatagtagaagtttcatttgactgatagaaactagcgcaccaggttgattgttaacttgggcgctaggctcaacttttagccgttagggattctcgttttctcgccgagtttacttgtttctttaatattttttatgacaaaaaaattgcccttaaggagattctcgttttctccctgagtttacttgtagctttgataaaatgattagaaatagcccaggttgataaaatgtcaacctgggtgttgggcctagcactaggtgtaaacttgggcgctgggcctagtttatagccaccaaatggctctatttgattcccaaaaatacttgtatcttaatctttgatgaaaataataaatatgcccagaagacttctcaaataactccttgaagctggcgtaggttgacaaaatgtcaaccagtgaactaggcccaggaccaagtgtcaacctaggtgctggttgccttgttttccctccaagtcgatctgtttctcccgcgaaagcacttgtttccttgttttggatgaagattaaaaaaatgctcagggatagtttttcagtttgaagattggaagtgtcctaaatttacactatgtcaacttgggcgctagggtgcctagggcacctagtgctctaggtgctcaaaaataaaagtgctttgaattgattttgattcctcaaatatgtttgtgacgagtctaattcatgtctcagtacaaagtttgacccatttgcattaagatagtcccaaaaactgaaacccttgtcaaaatgtcaactttggcactgggtgaaaccttaggtgcccaagttgactttcgggatgttgttttgtgtattttcagctttcaagcctcggactttgattctatatatcttcatagaacgtaatactgaaagatagtgagttggaaacaatttggtgtgatccaaacaccaattctagagttttcaaagtcaacctggtcgtagggctagggacccctcccaagtcgactgctatgactcgggattactcaactttaggatattttctttcttgtcacgtgtcaaatattaatgttcatgtcaccagggtcagtttctaagtaaacagattctatctctagtaaaaaaaattataattaaactttatgattatattattcaaagaatatgccctagttattctaggacttggattattgttccaattatgttttaattaaattttttcttatttcattggttttttttagcaatttatatattttaaacaaagattttggtttattttctaattatatataagtatgtatatacaattacacatgtttgcatttgtgtttctacgataaaattatagagagatgttttcaatcattgcatgatattattggtatttaaaagatcctaactgccattgatcaaattgacaaatttcaactctgcagactacatatatggttcatacttatcaaaaattcaaaagtaaattcctgaaaaagttgtgttcttggcttttgtgattatagtttgaccaactataatttagttcttgtttgaattactgattattagagctataaaattattttacttttaaagttcttgattattgaataagtactcgtggatctattatgtaaggacggccctat

SEQ ID NO: 25693 - DNA, 6196 bp, Cannabis sativa
ggagagtatcttgaaataatagggtcaaaattggtacaatgtttaaaaaagaggtaaaaatgatagactttaaaaaagagggtaaaaataaaagacaatatataaaagtgtatagaatgtaatttcatctattgactcagtcatacttggcccaatttaataatagtaaagaggattaatgaaatgggcttggacattaggctttagaagaaatgacccatgataaaactttaattagaaagatgggttaggcgtgaatccatgggccttcagtgtatacacttcttgatctctctttacttattgggtttgatactctgccatttatttataccattttgtttaaatttgaaaaataacacaaaaattaaaataaattaaattttttcagctaaaataaatttaccattaataaaagaaatatttaatttaaattaattatatgtacacaaataaaggcttaaagtctattaatttgagtctttatcaagagcactgttatcttttgggacacaaagatggcagttgtctgccatgggtgttacacaccttttggtgacttttgtcgctagtttttggtaccttaatattggaaatgtactttggccaaagaaactcttcaccaattgatgtggccgaccactaccatcttttgggacataaagatggcagtattcgggtagatggtttctacactacttggtgaccttccttgcttggctttgacgtcttgatgataaaaaagcacatttggcaaagaatctcattccccgtaagttaatttttcaatagaaatgcagaaaggatttctcagctcaatttgagactgaggtaaacaattcattaaatagacttttccaatacaatgggagcaaatacaatggtgccaggtggcatacgcagaatacaaggcataacagaaaaagagaatattctcttaacaatgattacacaataacaacctctgccagctatgagaattatactctgctacactgaggcacaccagaaggcaaggtggtgctcatacatggtttctaacaccacccctcaaacgaaggggcaattctttgattccgagtttatcaattagaaaccagaaacgggaatgtgtgagactttttgtcaagcagtcagccacctggtctgaggaaggtacataacaaatgtcgagttctttgttcattactttgtcacgaacaaagtggatgtcgatttcgatatgcttggttctcgcgtggtaaacagggttggaggcaagtgcctttgcactttgattgtcactccatgtgactggtatgcttggtaacttgaatttcaattctgtgagcaaggattgaacccaagttatctcagctgagacatgtgccaaagccctatattcggattcagtgcttgacctcgaaacaactcttgctttttagatgaccatgcaattaaagtgtcaccaagatatacacagtagccagcaaccgacctcctatcatctggacaacaggcctagagtatccttcaagtgtcaacctttcattgtatccaatgtgcagaccatgatagacagtcccttttagatatcttaatattctcttggcaccagaccagtggcttgaagtgggagtttggaggaactgacttagtttgttcacagcaaacgcaatatcaggccttgtgtgacacaagtactgaagtgctcctattaggcttctgtaaacagagggtcagtcattggttcaccatcacttttcgacagaggtttacctgcaatcataggtgttggacatggttttgtgttcagcatatcatattttctcaacaaatcactgatgtatttagcctgagtcaggtacattcctgtttcatcctgatgcacctctatgccaagaaaaaagtgaagctgtccgagatcctttagggcaaaagctctgttcagttcttgaataaacttgttcacttctgcaaagttgttgccagtcacgataatgtcgtccacatagattaatacaagtatgattacttgtcctgttgagtagaagaacaaagagttgtctgtcttcaagttcttgaaattccagctgtttagtgtgtgtttcagtctgtcgaaccaggcacggggagcctgctttaacccatacagagacttgttcaacttacatacatagtctggcttttctttgtcttcaaatcctggtggctgcaccatgtagacatcttcttccaatgttccatttaggaaagcgttgttgacatccaactgcttgacttccaagtttcttgacacagcaagagttaagacaactcgaattgtggcagatttaattacagggctgaaggtttcgctgaagtcgattccagacctctgatggaatccttttgccaccagccttgctttgagtctctcaagggttccatctgcagtccacttcttcccatacacccatttgttcccaataagattgtatcctggcagcctaggcactaacacccaagttttgtttctttttagtgcaatgatttctctatccattacatcattccattccttcgattttagtgcctcttcgatacaacttggttcagctaagttgagattccatttggcttgaccaagataagctttgggtttgaaaattccagccttgtcacgagttaccatgggatgagttggtgcaagttgctgtgtagttgctggtgcagcaggttcttgttgttgcctttctggttcatgatctggtgcatgtaaaatatcaaaattatcagtgtgcaaactgccagtatcaatgtgttcactaacctcaggtgtattatcagcaggtgctgctccaggagaactttgtgaatgtgaatctgtaccagtaggagtaggatcagcaggtggttgagtgatttcagagttagagaagtgcagatttgggagctgtgaccattgagaattttgaatgatggtttgtttttcaggaacatgattgtttagaaagccattttttaaaaggaaattccttctcgttgaaaacaacatttcgtgagatgtaaactcttcctgttgaacttaggcatttgtagcctttgtgtgactgactatagccaaggttgacatatttcagtgaatggaactgaaacttgtgtgtttgatagggtcttatgcaaggaaagcaagctgccccaaacactttcaagaaggagtagtctggttttttgttgagcagtgtttcgaggggtgatttctggtttagcacaggtgtgggtaacctattgattaggtacactgctgtttggaaagcatcaacccaatatctaagtggcatatgagcttgagccaaaagggttaatcccatttcaactatgtgcctatactttctctctgctctaccattttgagcagaggtgtgagggcaaggatgagtgaaattgatgccatgctctaatgtaatgtcagtgaaagattggtattctcctccccaatcagttctaagagtcttaatggttgtttcaaattgattttctacaagtgctttaagtgtgtgaatgcagtaagtccatcagatttagatcttagaggatatatccaaacatatctgctgaaatcatcaacaaaatggatatagaatctgtagttggtattcgacatgacaggggcagggccccaaagatctgtgtgcaccagatccaacactttggaggcatggttagtagagtttttaaagggaagagcatgggatttcccatattggcaagcatcacagaattgaacattttcattgattggaggattaacattaacaactttcaagacttgatttaacaccttactagaaggatgtccaagtcttctatgccacatatcatttactgaaatcaaatgttcattaacagtagattgagctacactttctttatgaaaaactgaaacaccagtgtacaaagtatgctggttttgattacttttgacagagttgatggagtggtggatattcgattttggtattgatggttgaagctggtacaacccattcttaagtgtcccttagagtagcaccttctttgttgctttgtccttcacaaaacaaaaattggagtgaaattcaatgaacacattgttatcagcagttagtttagacacactaattaaattttttgcaattttaggaacaagcaacaattcttttaaaaccaagtcatctgtagagtttgtttgcagtttgctactgccaatgtgagagatagttacttgactaccatctccaacagttaagtgattcttaccaccatactccattttctgattgacattgcttgatgatgaagtgacatggttgttggctccactgtcagcatatcattgatcactatcaactatttcaggtgaggctatgaaggcactgtggccacttccaccttgctgagcttgctgggtttttggatcatgacccatataggattcatcgtacctattgtagcatatctcagcaaagtgaccatacctgccacatacttggcaggttggtttcgaactattcgatctacctcttcctcgaccctggtatcctcctctggtgtgtgatgagccactacgatttctagaatagccgccatagcttccccttcctcgatttgagttgttggttggtttcccaagaagattagcagctgcaagattggcagatggccctgtgttgactcctcctgatgttccattacttttatttcctcctacagcatgcaacctttcgagtttgctgtcaaaactcagcaacatctcttgagcttcctgccatgaaatgttagttctagcttcaatttgtacaacaatagcaaggtattgagcatccaaaccagaggtaacatttgagatgagatgggcttcaggataagggtccccagctaatgcaagactgtctgaccacatctttttctgcttgagatattcaaccatgggagtagctccttttcttgttgtttgtatcaaggttcgagtgtcatccatcttggctcgagaatgggctccaaacagattttccaaggcactccagagggtagtagatgaggcgcatcccatgacctcaatagccacagattcggtcatagaactgtaaatccatcccatgagcagctggtcactaacgatccagtgctcatagtcagggtttagagtaacggctgggttttcttcagtggaggttggtgctggtatgagttctggtgggcagggacgactaccattgatgaagccatcgagtctgtgccctcgaatgatggtcgacaccattgttttccacaatgtatagttgttgcgatctagcttgagggaaaagggttggttcaaggtattgaatggctaagtaaagttgtgagaataggtgttggggctgctaccatttccagtcactgcaccaaggttactttggttgggattgatagggacaagggagtatgagagtttccagtagacatggtgaaggccgattttggctccgataccaagttaatttttcaatagaaatgcagaaatattctcagctcaatttgagactgaggtaaacaattcattaaatagacttttccaatacaatgggagcaaatacaatggtgccaggtggcatacgcagaatacaaggcataacagaaaaagagaatattctcttaacaatgattacacaataacaacctctgccagctgtgagaattatactctgctacactgaggcacaccagaaggcaaggtggtgctcacacatggtttctaacaccgtacttgtggccgacctgtgccactttattgtgcacaaggagagcagcggttgaccatgcttgatggtgaatgggaaatgattcctttcaattgtgttatacaccttagtgttgggggaccacatttggacaaattttctttggcagtttaaaaataaagagaaatgcttcctttagtggcggagagagaaatatacgttaagggagcaaattgtaagaaaaaaaatttggggggaggggaaagggggcaagggcaaattataaataactaggtataattttttttaccaatttaatatatacaaaatacataataaaaaaaaaatgttgggaaggctacagcactgactttatgatcaagtttgaggtaatcaaattcattttcatttgattttaaccagcctaacttaccactaaaaaaaaaaaaaaaaaaaaaaaaatttcatttttt

SEQ ID NO: 25694 - DNA, 4882 bp, Cannabis sativa
  modified_base (78)..(80): a, c, t, g, unknown or other
tttttatttatgtataaataataagaaaaaaaaaaaaaaattgggccttaaaaaaatgggggccttgtgcaatggccnnngctgcccaatgcttgggccggccctgatagatggcgatttcaaattaaagatactatttagttgtaaatttattatttggagtaatatctagtttgatttaccaaaaaaaaaaattatatatatttatatgtaataatacatatttaattctaaatcaaaattaaattaaatctaaacaaaatagttgaattagtttgcaagataattgctccattagcattttactatgccacggatccaagtgaagtatactacgaaaagaagaaggaatatgttaaaatcttttgaagagtttagtactaacattaatattaatgaaatcttttaataaaattttaacatgaatatacattaattattagaatttcacattggtgatatatacttgatcctataacttttctatcaatatacatgaatcctgtaatataagaaaaaggtggatggatacacgatccaataatgtcacatacatacattatatatatagtttatatagcctatatctatatttatgttgtttgaaatagatatggaatatataatacaaacttatatttaaattaccaactagtgtagttgttgctgactcggaaaggtacatataatgttttatgtcatatttatagtttaattattctctcactcacatatgacatatatcatatcatgaaacatatctactaacaaatcagaggatatatagagtactctatatcaagtctattaacgtaaatatcttaccaatttttttttgaaaaaaatatcttaccaattaatattccaaattaaagtattaaaattcccattatttattaataacaaagcactaataattaagacaaacaacacctacatagccaaccgagaggcatacaataataataatagtataatacattctaagcaaacaacaataacatcacaactttaaaagtaactatatatgtttatattaatagaagtgaattgagagtatataatttattagttgtaataacatttaattgagctgaacggttgagtcataaacagccccagctttccaatcctgaggaatggcatttgttgattgaacccaataagtgtagccaccactgcctgttgcttggaaccttaatgtcactgacccacttggtggatttgccatgtcccaaactcccccaaaagctctcctcataggtatccattccttgcaatcctcctacatatatataatcaaaattaagtatatatgttttcatttatgcatgttaatgtgaaaattaagtaattaattggctgaccctccatatctcgagggctgtaacatcgttttggccagctacatagataacaaccaaagccaagtagtgagggtagttgctgtgctcatggactttgtacataacattgtaaccagagtattggcaagagattcttctgtactcaacttcaaccacaccacatgcaaacaactcttttgctgcacttggaacaattgccaattttgagtaggctcttgggctcatgatgaaatcagttctgtctccttcaccatggtcagtcactactacatttactccatctgagttacaatactgaggatttttgcacctaacctgaatattaataatcaattaaggaaattcgttaagctagtgatctttattattaaattgcaattagtggattggacgcgcccccatacccatgattattgtgtagtgaaattaatctaaacaaataaaacttgtctcgctttctaaataaagtaattaattaaatataaaagttattaatgtcacctttagaatttgggttagactcacgtctcatgacgttgggcttacatcaaataataataacaatactataattactacttattaattcggtggtaaaaaaacttagtttagaggagacaattaataacttgtgtgtctcacgcggtaacatttctctcttttcattataaaatattgaaagcgacacaatattatatagagtactatatatatccttatgagatactttaaggtgctaacactgtcacgagtaatataaagagaattgttaaaatagcttttaacaaatatatctctaactaattattatagagtgccatctataaaaaaaatatcactactaatataaattaaaatatttatggaattcagtattaaattatacttaaaatatatatatatttatatatatgacacctaattgtggtgttaacattgcgcatgtgctaaaaatttgtgcatagtaataataataagtacctgataacatgcaccacagccggatccattcataaagagcttataagaaactccggagacgtaaccatcattaacagttcttccatattcaccaaacccacaagctccccctaataatatttaatgcaccacaaattaatataattaataaaataagctcatttctgttgagtatatactttattaaaatgacaaaaacagtgggaaaaaaacactatacttggagtgccatagcagtcagggctaccataataggtagctctagagtcagtaaactgagaggtacaaaatgctggtaacaaaaccaccataataaaaccaaccaaggtagtactgcatagtgtaaacaaccccatttattttcttatatatatgtgatgtttttgtatacaaaacaaattgaagatgataagataaatggtagcacaaagattaataagcatatatataggtagaagagtttatgaatttggagtttgttgatatagaaaaagatagaattaacatgtatttatagtagaaagagagaaagagatagtaattaataataggctttggtgggatggtgtgaggtggctgctatacagaagaagttcataactaattaaaagagctgatcagagacggctcaacattagattagagtggtgatgtgtacgtccacttgtacacgtacttattcgtagaccattttcctattgggcaccatgcccaatacattttatagatgtcgtcctatgattggttagtggtatttctaaaaattatttttttaagttatatatatgaaacccgatatttaattatactgaagagggcatgttataagcactaatagtgttttttagcgattctcttattcatactctctccttaaatatgataaaagttaaaagatagtattgacactctcttagttgttatatcgttattggtacaattaaatattggatctcatataatttaatataataatttttaagaaatatcgctaattaattatagggtgtgccactaaaaagtattggacagtacttgtatccaatatcaatgctcctttaatatatgcaagcacaaattacatttaattatactacaataaatattaggagggacacttttgttacaagtcatatattgttattagtgtattttaatatcgaattttatatatattgatttgataaataatagaaagaattactaaccaattataatataatatgtgaatctaatattggaacaccctaagcctaaggtgtgaaatagaaatatgctcatatgacaatatttttaacccaatcatacttatcaaataaataagaactgatcactattttaaaatgagtaaaatgatgactgaaaattattgttagataattactagatctaataatttagtattattagtaatttagtattattaggactgtcttaaaaatcaatgtcatgtaactaataatgtgcacatattatagtatggtgttggaaatttcatgttcaatttcatattgatgtgacacgttatgagtaataatatagtttgtattatttattaaattataagtatgagacagaatattaaattatatcaataacaatttatcattttttataatacttgataccttattgttaactttcctcaaatcttaaatataatattcataagatattttttggattagttagagaagaatttatatttggatacgtggcagcctaacttttttgcctcatatattccttcactttttgttgggtctttttctacctctagctatgtttagagaattctctcttttaatcattacagttcggactaattttctccttttattccttccatagtttacttatttggactacaagtctagagtacctagaaatttcatttgtttattatccacaaaatattaatttataataatctacttgatttggtacagggatatattatatatacattcatgtatttgttcgttaaggtttgttttgagggttcatgaacataattaaatcataaataaataccactgggatagttggtaaacaattagacaatattttggaagataaaagttaagacttatactcttacatttttaatctttccaaagaaaatttataaattaacaataacagtgtattatatatgtacttcatgatttttttatcatcctaattttctgtcacctttttacttacatactcatttgtatatgggaaatttgaattttcatgcttaataaactcataaattggtcttttaaactaatattatgtataatttgtaaaataggataaccttttcctaaaccccaaaaaacccctcccatttttcccaaccgtccctctctcttcctctttttccaaaacaattgactgaccatcgggccccatcgggtcctatatcaagtctttttcttcaacccagattcaattttttcatcatgatgcatcgggcctgcatcggacatgcatcgggcctgcccagaaaatgcaattttcaacccaaaaatcacagattcacc

SEQ ID NO: 25695 - DNA, 1971 bp, Cannabis sativa
  modified_base (35)..(67): a, c, t, g, unknown or other
cgctcttccgatctctgatctatattaataagtannnnnnnnnnnnnnnnnnnnnnnnnnnnnnnnngcataaaacccaacactatcatgctcaaacagaatctaatcctacatgctaggaccaagcatatagagctggatctatactttgaaagggagaaagttctcaatgacatggtgcaaatcaagcatgtctctgcatttaaacatctagctgatggactgactaagcctatttcgagtcaaagattctcagatgttaggaccaaactcaaaatcaaagttccttcaattatgagtttgaaagggggtgttagaacagttaattctgttagtgacagttagtagtgagctatcctagttagttgagtttgttgcaattatttctgtttcttgtagctactgtatataagttcttcatttcatcgataactattgagaattgttgctctccaattctctttctttgtctttctttcctttcttcttctttgtgttctttcttgtttctagttcatcaatggcgagacagttcaataggcaatttaactcagctcacccataaattatcttgattggagccaagtgccaagacatcttttccaatggctaccatatctaatcaatgtttttcctatagccaagaccccttctttgtttggcttacatatatacatcttcccaagaaaccttatggtgccccaaaacctcagctgcccctttccaaagaaaagccctataatttgaatttactctttgcaagaccttctttaggaatatcataatttgatcttatggattacgtatcaatataagaacataattaatcaaggtgactttccctacaaataagagattctatgaactcaatatctttatcctttgagtcattttctccactaataattcactttcaacaattgttaaacaacaggcaacaataggaatgccaaaatactagaatggcagtttgatttaagtgaatccggatacctcaattactcttttgatttcatgttaagccattccactaaaatagaaggttgagttggtcttattcaggtacaacctagagattttagagattaatttcagtccttgcaatattctgtaaatagatttatattctccaaatagatctataatatgccaaagagattacaaactaacatgagaattaaaaagcttttaaaagcttaaaaaactggaacttattaatggaaggtacaaagaagagatatcaaagaagagaagatgagatgtatatagagagagataagattaaagatcaaacagcacaccatgcaaaaagccgacacttggctagactaggctgctcaacagagactactacaaacaagacaagagctagaaagtccctatctgactagatgttcgaatagggactttggggaaaatattatttgaaattttgtccacctaatgtggcatgtctatgtaagccaagatagagtacatatggaatacagccttgctagtagcaagatagggtctccataaaagatatggcaaaactttcaagtagcaacagaaaggagtgaagcgagccaccaaggagttgtaataacatgtctagccagcaaagagaagcctttaggctggccaggtgagcttgtatggccagccaggatttgggtacaatttggccagccaaaaggtgactttcagaccaagggagcttttgttcgactaaagtaacctgacctctacaaggaaaaagtgtacaaagctggccttcacttgccaaaggttggcctccacatccaaagactggcctcctcttggtaaggctgacaggaacatgacctgtaggatcctgacaggcacatgacgtgccaggtcctagcgggagcatggctgaccagacctcaacccgtagaacttgcatagctcgtcagactatatcctatagtgtatggtcagctaggattatgtaacaccctaactaac

SEQ ID NO: 25696 - DNA, 2370 bp, Cannabis sativa
gagaatgggtggtccctctggactgtgggttagtggatcttctatagcccgtgggttcttttcgagaacgatggtgagtttcctcatgtggtgtattaacatcttctaggtttttagccatgaaggaggtagttttttttttttcaaaagaaagaagggttttttttgagctttttaacaaatgctctcaatgaaagcactaaactgtttacgcagatttttgttaactaaaattgagcctcacagtgataatttcacacagaaaaaatgaaagcagtaaaataagaaaagtaaatcacaagggatttttttacgtggttttgtggttaaaattctgatagtccacgagtaaatcttattatatttctgatagttttctcagggccccttttttcgtatgatctttcatccctctttggatcttacacgctactatttatattcacatagtaggcagttaattacaaagttgactgtacaacgactatccccaaaaattatggggtttgattacatatcacatagtgtaaatgcggttattatttgaaaatcatatagctgtgattttcccgcttttactgggtcaaaatgatcgtgtatttaaacacgtctttaattgttgtgttctgggatgtctcgacaggagcttggttttagtgaccgtgatagcgagctggagccattttccttatacttttgaggtcaacaatgtacgccttgttgcttctttatttaaaagcttattgcttcatttgggacaatcacagttcttgttaacacagagtttctcggggctcatttgaatgatagcttctgactcgtcaagattgtaagtctcagtcagaagatgtctgaagttaactgggggaagttataggaatgagccctcccatagcgagatgaacacctcggttattgggtcttgagctaacccgactgtgatacttagtttgtacgttatatactaagtgtttccgcagtcgatatgcgtcgctttcgtcttcccacatgtaatgtacttaatgcctcgctctatgcattcaatgccatatggtttctcgttaatatactaagcaacaatttatatatcgtttcttcgcataagacctcacagtaagcaagttgcaaatatactctgccacttatgcaatcaatgagttattccattaaaagtgatttcgtcgatccatattctcttcatcttgacacgtgtcctccattgagatgttagccaaattttggccgtaacagatttaaaattttggttggtacaggattgtaccaatcagtatttgttttttgtgagttttttgggaatcggcgattttcgtattttggccataacttttcactcgggtgtccattttagacatttcatatactatttttaagcttatgaagagctctacggtatgaaacatatattatagccaaaaatatgtattttatttttgggtgcttttaccataagattcagtagaaaatcctagggtattttatgcaggttttagatagtgttttggaatagacccttattgatttactgttgtcatgacataggacctgagatcgtcgagcatcgttccactcaggtcggcctgcacacttaattttggacttgaggtaagaaaagctatttgcactactatgcatgttatgtgagaaacaataattatcatgtgtggctcgattatgatcgaggtaaagatatggtcattactgttattgagaatgagcaaagatacggtcattattgttattgtgaatgagtaattactcgcttgaaactgcatataggtttcttacttatcgattgctttatcgggcaacgatagtgacatatgtagcttgtgggcaacaagtggtaaggatgctttatgaagcaccaaagtcggcttgtcttataagacaaataattgttaatgtaatgtctaaatatgcattgaataaatgtttatattggatgataagtgtgtgggttatgcaatgttgtgatttctcatattatgcattatttgtgtttcaattgcttttcttcctaagtctttgtgactcacgggtacttagtggtccaggtataggaaaggggaaagtcgatcagccatgagtcaaaagtctccgagcaatatacatatcaagtgtggtgtctcggcttccagcagacaggatccacccttttgatcatgttttgaaaatgtaaccctctattgtaaaagtggttttgtaatgtgatgcgaaagcttttaaataggggatccctaaaactagcagtatttcgaacagtaagacaagttttagtttgattccaaaagttttaaataaattgccttttattatattgttaatttataattgttaacgcagattttc

SEQ ID NO: 25697 - DNA, 3373 bp, Cannabis sativa
  modified_base (1368)..(1376): a, c, t, g, unknown or other
taaattcctttatcaaaatttaaagacttcattgctctaaaaataaaaaattacaagacaacataactttaagaaaatgaaaaatagtcaacttaaacaaaatattacacaagaaaaaactttcaaaaataatctcgatatagatctaaatggtatatcttaaataatgaaatgaattagaaatcatcatcatcataatggtgtccaagagtataaagcaaccaaaacaaagagcatacaaatagaaaaatgagatatcctatcttagtgatgcgtttattcttttcaattctcaattgtgtatatatctcagttacatctaccaagtgctttccttcaatatattgcctcacattataatagaagtatggaatatgcagtacaaacataacccaatgtcctatgagaacaagtaataagcattgaagcccttgagtgataaattctggcaatacaaccatgttgattcttgatgttgaatcatatagattgatataatctgaatctaagtccactaaacatatgagctgataaccaacaagtaatatcagagttaggatgaagaagaatgacaacaaccatacccataaaccccacatctttttgaatcacaatttcgatcgttttcttttttgtacgtattagttaaatgagagggtataagagattatttattggatgaattgcttctggaatttatgtatttatatagtataaattataaataagtggatatgatatctgctaatcctaacaataatatgattgggatataaagaaaataataaaaagataacgttttaaataacatactgacctcatttaattttgattttttcaaagtaataatatatttataatgtaatttggatttaaataagtaaataaaaagataaatgtacattttaaataacacacattatacgtaatttaaatttgattttttaaaaggttttacatatatcagatatttaaaagatattagatatttttctaatgattatttttcttatctttgtgtatctattcgaatgtagttcacctcacttcactcactaccttattattaataataataataataataataattcctagaagaaattatttttgcatcctagtgaaaatttataccgaaaaagaaaaatataggacttaaacacaaataatatacattgattaattaattattttatgagtaatttgtggcataaatacttaaatttaactttgcaaataaatagctaagtttaatttttcagcgataataatagttaagttataattctgaaatttttgtaggtacctggctattaagtgttaagtaaattattacgtggcaattcctgattggtccaagtcattaannnnnnnnntttttaaaaaataattaatttaaatataccaataaaaaaattatatggataatgacttattatttaatggtcaggtatctacagatttctaaaaatataacttaggtattattaccgccaaaaattaaatttaggtatttatttataattgagagctaaacttaggtatttatccacaaattactctatttttatttcatttttcaaattattctttttttttatgaattacattcaacaggaggaacaagttctcaaaggtcaagctaaaacaaagtcgcatagaactcacagcgaaaatgcatggccaaaacaaccgtatcccacactgacacaatttagaaatctcaacaagaaaagacacaaagctaacattgatcacagaagatagggtgcgaaatacatttattacatagaaagtaagaaaaaaaatactcgatgacctacaaaaagagaaaacctcaaacaactagacaacatgatcgagacaataccataatgcccaacaggaacaacccaaagcaggagatagaataacacgagggtccacttctctcggggtcaaacccgcatcctcccctttccgattgcaacccccaaagagtgctcaagattggaaatgccagtaaggatcccaaaggcaaactgcagtcaacaatcaaggaaagagaaaatccccaaggtgtagagtcacaactgcccctaacaccccaatgaagccagcaccagacctcaaagccacctccgcctccaccaaccgtatcgagatcaaacactccttcaaatgagatccaacaaacccctcccaccacaacgtcgaccacaaactgccaatgccaccgtcccctgactccaaactcccatagacaagaaatgtaatgatcgcttagctttattttaaaaattagccgataattagagtttaattcaaattagctagactgttaattattatttatataactatagagatatatttgaattctaggtgtgttaattatgttatatgtgaaattttatgattttcatattttatgcccggtaacagtggaacgcaacatatggcctatagagtcactttattttggtttagtactttagaaatactgaagcaatttagttagatatttaaaatgtcgatttattttcgggataatagtttaagatcattttacccctaagtatgttagttaccttatgttttattaaggagtaattaagtcatttcccatgtagataattacaatatttttctttattaattttatgttgaaattatattttcattatactttaaaatttggattaaaaacaaaaaactagtttaaagtcaaaacttagtctatttctctctctatggttcggcccccctttggaaccaagaaaaaaatttaaattccggccaaattcagaggttttttgttgggaattcatagggattgaagatagcagctcttggtaagctagtttcccttctttttctttgaattttctggtttttgagattaggttttcatgcaaatttcagagttaggttactataggaatatttgggtttagttctatttttgaggttgatttggagttatttgagctggtttaagcatgtattgttgtttgtggttgaatttggacaaaaaaaaacctcacatctgaacccagagttaagcacaataaaaaaataaaaataaccacaaatctcacatattacacaactaaaaaattatttcttttgtaatctcaaatcaattgaaaaataacacaaatcagatatatactgtgtaaataaaattaaatacaaatattacacaatatatattacgtgaaaaatattagatatacatatatattgtgtaatgcacagatcaaacatttgtagagaagctgccaccaaccatcgttgctcggactgcgcatcaccaaccacctgcaaaaacggagagacagtgagagagagagagagagctagcaacagagagaaggagagagagagagag

SEQ ID NO: 25698 - DNA, 5163 bp, Cannabis sativa
  modified_base (1290)..(1291): a, c, t, g, unknown or other
tcttaccatgacacttcggtgggtcagccaatatatatactacaaatttataaaaagcaccacaccatatttataattaaggataaaatatcaaacataaataatgtgaaactacaatcttcatcttgacaagccctcaatataaatctagggtttattgagagaaaatggagaaaataaattaacaagaaggaaagagaaatttttacaacattattattattgttattggaaaaatattattcccaacatttaaacaaatccctttagggatagacttagctttttttttcttcatatctaatctatttgcttttccttttttttatgattgtacacgagcaattgtcaacaatatttgtttcattatcattaattgtttagtttcatagttaaacaacatttgtttcatcaccgcttttcaattttgtaagcaaaaattgcttgatcgtcattttgcatagttttacaaacgacatatgcttcatcacccttttacttagtttcataaacaatatttgcttcatcaattttttgctcagttcgtaaacaacatttttgctttgttacccttttgcttagtttcataaagagaattctttaagtgataaacactattgataatataaatggctgaaaagttatcaaaagttgatggccttatgaggtggcgtttggtttgaggtaataatattgaataaaatggtaaagaaaacagcttttaatatctcatgtaagtgcaatagtttttgtttggcaaattatgcggtacattggttgttcagttttctgtctttccatgtttgatgtcttagctttttacaatggtcatctaagttgtcatcaatttcatctgttttgtcttggtgacttttattatgtgacatgtcagattttagcttttatattctttttttgtttgagtcagttccagctggactcagctatggttgttagttagccgagtcatttccctttcaacttagtaaataatattatgttgttgctttttctaactaacactctcatctttgataaaattattttttattgttgctctgctagggaaaaatatttctctggtatttttatgttatatgtagatgaaaattctttgaatcttcaagaggttaaagaaggagtttgaatctgtgttgtctgaggagagttcagactgaactgctgaaggatcttcagctttggaagagcttgttttcttggatctaagtgtgcttagatcggttatcttgattgtgttcaagaattaggtaacatcgtgtaaagtcattnnagattatgtagtttgatttgtaaaatcaatactggtgtatgtaattgaattgattttatagtggatgttactttacccgattcttggggacccaagcactactcagttggaatgtgtttccaatgcaaaggaagcttgtaaatctggtgttcattgatttagctttcttgtcttaattctttgtaatatgcattaaagttcaattacttagctatcaaagatattagaactttcaattagtatcagagctaactttttcatgtgaagaaattctgatcctatagctaggtttgaatttttttatcaatttaatctattctgagtgagctgtgtggatctgtattggtgtaattttctttcaaaaactaatctccatttcaagtttcatttcattgtgcaacatagtttattgtttaactttgtgcagattaataggaaatggaaatgtttagaaaagatggatctacctcacgacctcccatgttagaagaatccaattaccctttttggaagactaaaatgagagctttcttgaaggttgtggatgaaaaagtttggatggcagtagtcgagggttggtctccaccctctgtactcgatgatgaaggagaaaagattaagaagtctagtgaatgggtcgctgaagagatggaacaagctaattttaattccaaagctctacatgctctttttaatgcagtttccacaaatcaagtcaaagtgctttcaagctgtgaagttgctaaagatgcttggaaaaagttaaaaatcaataatgaggatactaaggtagttaaaaaggctcgactgagatccttagcaaaatcttttaagaatttgactatggaagaagatgaatccatttttgaatttcatgctaagatgtgtgacatctctaatgaatcgtatgctcttagaaagatctactccaacaagaaactagttagaaaagttcttggggttcttcctaaaagatttatgtccaaagtgacatcaataaaggagagtcgtgatattgaagcccttgacctggatgagttgattggttccttgcaaaattatgagctaactcttgagagatggaacaaaggaaagaaaactaagaattctaaaaaggacaaaactaacatgggtgtagcctttatccataaggaagagaatttgaaagaggttgacctatctgaaaccttcacagatgcaaatctagctctcttggccaagaattatgctcgttttctaaaaaggaacttcaagaaatctaattttggaaacaaagaaaatacatcgagcaagaacccctctagtttcaacaagcattcacaacatcatgagagaaatgggaaaggaattcaatgtcatgaatgtgctagttttggtcacattcaggtagaatgtgccaacactctaaagaaaaagaaagtcttaactatcacttggagtgataacaaagaagaagaggctagcgacgagtctaaggaagaaaaatttgtaattgccttcatggctcgtgaaacaatttctaaaggatcagatggagatgatacagcttctgactcggaatccattatttatgagaagaataaagcctatgaagaaatgtgttctcaatggagttacttggctacgagggttaaagagcttcagaactgaacaaagctcttgatgaaagtaagtgtgaccttaaggagaaatgtaagaaattgactatggagagccaagtaatctctctcttacttacattcagaaactgctaccttgaatcaagctcttcagaaccagaagccatatggtgatagaacattaattgggtacaagttactatacaagcagggtcatgatctgactattgatgaaaaattgacatcatcctcaggtgacaagataaagtttgtgtatgctaccactaatctcaagaatgaagagtcagataagtctttagttgagcccaacttgaattcggatagaagaacttcacttaatgaaagatctaataccaaataaatagaatgctttgtcccaacgtgtcatttttgtaacaagagaggtcatattaggcctaaatgctacaagctcagaacatacttgacaaacattatcaacaataaatctagtcaaaggaagtttcctttcgctccacaacgtgagactactatgaagagaatacccaaacatgacaatcatgctctcgttgctcatacatctttatctgccatgaaagataactgctagtattttgacagtgggtgttcacgacatatgactggttcctgtgaatctttaccaattttcatgcatctaaagaagggtttgtcacttttggtgatggaaataaaggggagaatatggggcaaggagatttaaatctctcggatgtatctcctttgacaaaagtttttcttgtagaagaattaaaagcaaatctaatcagcatattagtcacctttgtggtgctgattatgatgttagtttcactaagtctcagtgtttagttacatctcatggaaaaccaatcctcacaagcaccagaacagctaatcactattatgtcctgatgagtcaagtgaaatgtcatagagtgtttctggacaaacctgatttatggcactacagacttggccacctaaactgtagagatctaaagaaaatagtgaccataaaagcagttcgtggagttcctgaatttcgtatgggaaaagatcggttgtgtggcccttatcaacaaggtaaacaaatcaagtcctctcaccgtcctatcaatgctcaacttacctccagagttctagaactactgcatattaatttaatgggtcgcatgcaaactgctagtattgctagaaaaaggtgtgtgatggtgtgtgtggacgatttctccaaattcacttgggtaaactttctaaaagaaaagtcaaatactttcggtgctttctctgtcccttgtctgaaactacagactaagaaagatgttacaattggcaaggtatattgtgtcagaagcaatcatggcaaggaatttgaaaatgacatttttgcacagttctttgataaaatgggaattagtcatgagttctcaactcccaaaactccccaaaaaaatggaatagtggaacggaaaaataggacatttcatgatcatgtctcaggttatgctttgtgctaagggtgtcgctattcgattttgggctgaggctgtgaatacagcttgttatatttgtaactgtgtccatttgagaattggaactactcaaacttcttatgaactgtggaaaggaaagactcctaacttgagtcatttgcacatattttgttgcatttgctacatcttaaatgatcaagatcatctaggaaaattcaatgttcgaggtgatgaaggaatttttctatgatattctattaacaaccctgtctatcgagtgtataacaaaaaaacttacacaatgatggagtcaatgaatgtgaaatttgatgatttggaggttttagacactgtctccggggatgaagaaccattgatccacatatctcaatgatgcctttagctcttaatgttcaagacacacctgaaaccccaagacttccttcatctggagatgtactaatgtcatctgagaacacagctagtacatcagcagatgcaccagctactgaagtcacttctgaatctcaaatcattagtaaggatcctgataatacttctcatgctcggctatataagaagggtcctccaacctggattcaaaaagctcatcctcctgccattgtgattggggatctgaatgccaccatcgtaacacgacgtaaagttttaaatgtcattgcatttgcttgttatgtttcactagtagaacctcaaattgtcattgaggctcttctag

SEQ ID NO: 25699 - DNA, 1834 bp, Cannabis sativa
ctcttagctggttagtaggattgggatgtgcattctgaagctccgcaattcggatgttggtgttggtcacagtagcagaaggatgagttgttttcttctcatgtattagaacattcctggcgcgccagatgctttgaaagatgattgctgctcctcccaagaacaggtggtaattgacatttggaggtctatgagcatccgcggcaaaccaattcagccaagtctcccaatcgtggatgtttaacacatcagttcgaatttgccagctacatccgaaccagactgcacgagcataagggcagtcccaaaacagatgaaaagatagttcgaccgttgtacagcacaaagggcagcttgtatctaggagcgagagcacaggcccaagttttcctctcgtcaacaggctatcggagaggatcttccaccagaacactttgagtctattgtgtatcttagccccccaaatggtcttccatttcctagaactatcatcggtggaggataagttcttgatcattcggtaggcggacttgatggagaagttaccacttgattccggcatccaaagccaagagtcttggaccggcctactcgggagggtaatgttgataattcgccttgcatcgtcttcatggaaccaccttttgataaggttttcatcccaagtgttattgttgataaagttgcttaccaaactcactcctcctgcatcctccacccgaggaggggggagaggattcgtccctggaacccatggatcaaaccaaatggacgtagtattcccgttccctatcttacggcaaagacccttcttgagatgtactcgagctttaagtatagctttccataatagcgagtctgccgattttgcctcaacatctaggaattggtcataggggaagtactttgcctccatagttttgtaccagaggctatcatcgctagttaagagcttccaagcccacttcatgagaaacgccttatttgtagtttccgtagttcagaatcctagaccacctgagacttttggcttgcacagagtttcccaagctacggtgtgcaattttctttttaactctgagtctccccaccagaagtctctcagatgtcgatcaattttatttgcaatcgtggttgggatgacatcagaggcagccacatagttggaaattgtcgatcctactgacttgataaggcaggctttgccagcactggaaaggagcttggacttccaaccttgcacccttcttgcaacgcggtcaaccaaatactcggtgtccttagtgcgtttcagcgatctaaacagggggaggccaaggtaggtggcttgtcgagacattcttttcattcccaaacattgactaatggcttgagcgtctctgctagtgactcctttagagaagtagattgaggatttctggatgttaactgattgtcccgaacattgacagtaggtgttgagacaatctaggaattctttagcctcatgcagggaagcttaacccaataggactaaatcatcagcgaacatgagatgacttaaagaaattcctcttctacccatcttgaatcccttgatcaatctctgctgctccttgagaaggatgaggcgagagagggtttcggctgccataataaagagggatggcgacaaggggtcaccttgtctaagtcctctttcaggtttgaattgtcccaccgcaaccccattaagtagctgcttgatttcttccactgaaatacaagctttgatccattgaataaacttatcaggaaagccgaagtgagctaacaccgagacaatgaagtcccaatctaacttgtcataggcctt

SEQ ID NO: 25700 - DNA, 2039 bp, Cannabis sativa
gtatttttgtaattttttttccttttttgtatttttttgtttttttccctatttttaatacaatattattgatgattaatattatattttttttttacatattattataaatagtaaattaaatataatacaaattttatttgtgtattaaatttaacacaaattttacattttgcattagaaatagtcttaggctattatattatgtgtacgttggtgggagcacttttattgtttttaagagaaaatggaaaaggtaaggccactttttcaatgaaataaagtcatatgtcataatatcaaataaaagaagaactatatcttatcccctttcaagaaaaggaaaaaaaaaaacaaactatatttactctattattatctctgcaaacaaaaataaagatgctggctttctctttttcctcaaggacaaaaacagaaagagcacagataatcacattatgaagaaaacaaaagagacaaaggaacctccccactccaccaccaccaccttctttactcattttcttttcactatttccgcaattcaaagcaatatatatatgtattatgaaaaataaaaataaaaaaggtgccttcacaaataccaagctaaggaaagacatgcatgacttacacatgtgctagtattgtcagtggaatcttgcttagatgtgatatttttatactttggcattattaattattataaaaccgagctagtggaagactaccatcattagaaaaatgctcaacttcacttaaatataaaggcatcttccattcctatccattagcaccgaacacattaataacaaattgaagtcaaatcaatcattatctttcttccatcaaaatgggccaaaaggccttaagtaaaaatgataacaagactggttgtggaatatgttttagtaaacttatgcttgtttgtatcctcaggaaacctcaatgacagccatcaataaatatgtttcagcaaagcccttttctttggcttgaaagattatgcaaaaattgtatacaaaatttgaataattaatgtaaaaagagcaccatgagatctccaggctgccactgtttgacaaaaacaaagcctttgattatgctaatagacataaggcaatattctccaagggacaacttggcggtattctgcccagatttctctgtatttctcggcacaccgagcttcatcccttctttctctccatattagcagaattagaagatatattggatagaagtatggaactggggaactgcaaaatcaatgaatttttcactaatttgatgctctattctgtctgtataactaattgttagttcaaaaagttcataaaaagttaccttatcccgcaaggtaaactgaatgaaaatgcaagcaacaagtccccaaggtaattacagtgtcttgcaattccccttcacagccaaaagaacttgttatgatgtgatatgtaacaagaaataacaatacctctctttttcttatttcttttatcaattaggcaagctcttaaactatcttcatattgttctattctcattaacaatatattgtatcactattaaaatttcgcaaatgtggttcaaataagtttcccattcacctcatcaatgatgattttgaaggttttagaattgtatgacaacattagggtcatatttagaaaccaggatttgattggactaaaaaggataagagagaataccatagaaaagtgaatgagttgattgtttgacaataataaattatgagaacataagttcaaacataatattgttttttttttattcactggatgggatcatgggatataattatcctaagttcttagattaagttatctcatactaagtaaattaattaatagtcaagtagagtgtgatcttaccaataaccagaaacaagcaactttccaccaataacctttggaggccttccccatattagtgcttttggattctttttaaacacatgcttttgcttgttagctcccctaaataccaaatacctgctcaattttgtagtacaaaaa

SEQ ID NO: 25701 - DNA, 2889 bp, Cannabis sativa
attggcgatgctagtataggtgactgttttataaaacattgggaattctttgctcgacagtataaaagtgtcgagaatactgagtttttaattagtagtggttgcacatggacttattcaatcatgaaactgatcagatgggtgatgcatgtccaaattttacccttgatccgatgtgactgattgaaagtctctttgatgtctagagcaattaataccctactaggaaaggtgtacctcgaatcacacaatgaaggctgtttgatattgcatgtgtgacgattgtactaatcaataagtactaacgtttttttttttttgggaaaatcaaaaaactcaaattttaaattattttaagcctatttttacaacctatataaaggataaaaattggcgtttaattcttttagccattttctttcttgcataacctagagcaaagaccttaatgaaattctttctttttcctttgaaatgacttggtcgacatattaaaaatgttttgccttctataccactgtccaactctcaccctttgtctcagttatcccgatttttgcccacttgacgtggcatgttcatgttgccattatcaatgacacgtgagagtacactcaccaagaagaaagccaagctatctactcagcacttcaaccagcaagagttctgaacacttaggagggacgacaaaatgagaaaccaaccacctcaagcagactggtcggccaccccaggccggccctttggccagcataggctgaccagcttccaagcactgtgtagctggctagcatgcactctggcaagtgcatggctggccagcttctggctggtagatttttggtccacaaccttcattcgtggacagtgagtcaagcagtgaattgggccttgacaacccacgaaaatagagagaaaatatgagtaacttccttatttttgaggtgtaatttagtcagttgaacttaattgattaattatgtaaatataactttatttacctgttttaagggatattaaggaggtaagctttattatatagagagcattagtaaaactctaatcccctattcatttatatataaaacctgtatatgaagtagttgtatatgaaaagtagatttacatactccgaggcaataaacccacttttaggacataaactacttgaataaataatttactaagtgtagagctagaatttattaaattattaatagaaaaaaatacctatagtttgacaagagaaatccgaagtgaggtggtacagccaggcttcttagcaaaggcatcaacatgcaacaatgatagataaaataatcaaaatgaggaagaaaagagccaggctgacaatgtaaccttctcacaagaacccacttgaaattcaaaagattgtttgaccaggatgtgttgaatttacaatttcatttacttaaagattcatggtcgtgttgaagaatggaacaagttttaaggataagtaaataatgagcttagcatatggccctagattggaatccaacaaagataattgcaacttatcctcccaattcttacctccatgataatcataaacaccaaagaaggaagtggatgcatccatatcagaataagcggcatgctaaataaaagaaataaaattacaataacttaagaataattttttacaagattaaaagacacaaaatgagacttgctaatacacaaaatgaaagcaggcttgttaatagaagtaaagattatttgaaactttaaataacagaaaaatagatcaatttcagttcagttttaattttaaaaaacaaaagattttattaattaatcacaatatcttctatggatgcgcaccacccttgcattgacgataacccgtatcttagttgatcattcccactattttcagagagcttatcagttttgggagtactgagttaagtacccattttctattcaaaataaaaaaggtatgaactaaaagaaagaaagaaaaaaaatatgtatgtacgtatatatcaaggtttttcaataatcaaatttcaaacttcaaattaaagaaaaatattgaatacatcagaatcggttagtatgaaaaattattaaacaaaataagtagaacagaaccctgaccaacaaagagaaaacccataaaatatcaaacgggatcaactaaatcaaaggtcacaaaagttcacaagatttaagtgaaaaccttagtcaatattaagttaaacacatactttgtaaagaaattgagctactattttcacaaaccccaaaagcctaaataaaaaaaaaatatcttcaaaaaagggaaaaaaattataaaactccacaaaggaaaacaattcaactagaggagtcttcgggcttgagatccttgtcgagggagaaatgtaaagagatctactttaggtgagaggcacacagagagagggaattgtgggtgagaatggaatgatgggggtcaaaaatcgcgagagctataccctaatttctgatctggaaaagagaatgaatagtctttgctgattttgcaatttggctttagaatgaatagggcttcagcttcatcagtttataaaagttgaacccacttttgtgagtgcttagaactgattatataatcatatttgacttttttaaactgacgcaaattttttttaaaattttactttgtcccgttacttttgttattagcgtctaattagcaacagacataaataatatttttaagtcacagtttgaaacacttgcacaaatacatgacttactattcacgtcggtcaataaacactacaagaaaagggaccttttatcccccttttttagttaacaaaaataaaaaatgggataaaagatatattgagactttttatcccacttttagat

SEQ ID NO: 25702 - DNA, 3667 bp, Cannabis sativa
tgaaaatttttatttctttcatgcaagtgttaagaaaaggaaagtagaaaatcacatcactacttttgttgagaatgatctagttattgatgagtatgatcatgttattgcccactattgtaattcgttgaggaactttatggagaaaataagttcagctacactcaaaatcttgatcttgtttgtttgaagtatggtaacaagttgaatattggtgtgttttgttggccaaatatcattctctacctattctacccctagctcaaccaacttaactgaattaaccaactgtcagttatgaaagttggtgctcaagtcagtggttacacatcaagagaaatcagatcaagagtgagagagagaattggtaattgttgttcaataagaaaagagagagagagttgtgagtgttcttgagattgtaatggtatggtgtaacttgaatcatcatcaccactagtatagttgttttgtaccagaagttaagcttcttgagctgtgtaatttgaacactgtaatctcttcttttcatcagcaaataaagatatctctcagccctattgtggctgttttctggtcggggatgtaggcaaggtgatgcattattaccttgttcgaaccccgttaatttcatgtgttcaatattgttttttatacatgtttgtgtcattgttattgattgttgttattccttgataatctctaacaagtttcattgtttattcttgtcttttaatgttcttggtgaggtgttgttttcacaacaactagtatcagcgccaagtttcttggagcaagaacagaatcaagaaagtgactcatggcttctacatgcacgctttgaagtagacaagttcaatggagtcaatgactattgactgtgaaggattaaaatgaaaggatttttggttcatcagggagtttacaaggccattaacaagaaagaattgaaagagttgggagatgataagaagaagattaaagaaattgaaacaaaagcacagagtgccatcttgctgagtttgggagatgaagtgttgagggaagtgtcaaatgaagaaacaactttgggtttatgggagaaacttgccttgatttacctaaagaaatcccttgctaacaaagaaggagatgttgtacactctcaagatggaagattcaagagaactcagaaagcatcttgatgagttcaatcgaattgtcttggatcttagcaacataggagtaaaaatagaagatgaagatcaaggtatcttgctactcagctcattgccaaaatcctatgaacattttgtagatactatcctatatggcaatgaatccttgaccatgacagaggtcaaggaaactctcaattctaaggaaatgcaaaataagaatggtgaaagatttgattgggttgcagacagcttgtttgtcaaaggcagaaatgaatcaagagatttcaatggtggatataacaagtcaaattataaagagcaatcagaacaaagggcacaatcaagggtacaaatcaaagacaaaatccaaaccagaaaaacaatgttactactgcaagaaggaaggacactatagagatgaatgtagggcactttaggtaaaattgaacaaaaaaaagggaaaataaaaagttgctgcaataattgcctttgatggttatgagtctactacggctttggttgtgacaagtcaagaaacatgatgtgattggattcttgactatgggtgttcattccatatgacaccaagaaatgaactgttaagtgaattcaagaaaaattagggtggatcagttacgttgggggacaacaaagcctgcaaaatcttatgaataggaaatgtgttgatcataatgcatgatggtcaagtcagactcattcaagaagttagctaggtatgtccctgaactcaagagaaatctactttcaattagtgaacttatatctaaaggttccactataaagatagatagttcaatgaaagtaatgaggggcactaggatagtaatgaagggagttatcaaaaatggtatttactatctgcaaggtgaaactattgttagaaaaacaaatttggttgttaagaacagtgatcgggacaatacaagattgtggcacatgaggctaggtcatgtcagtgagagaggtctctatgaattggagaaacatggtattctcaaatgtaagcttggaaagaaactggggttctgtgaagagtgtgtgtgtgtatggtaagtgcagcagagtgaaattcactccgggtttgcacacaactaagggcaaactggattatgtgcactcaaatctctgaggtgcttcaaggattaagaccattggggtgcaagctattttatgagcataattgatgactataccagaaaggtttgggtgtttctactcaaaacaaaagatgaagctttcaaaacctttgtcacttggaaaagactgatagaaaaccaaactgtgaggaggattaagaagctaagaatagataatggtttagagttttgttcagatcaattcactaagttttgccaagataatggcatagcaagacacaaaacagtgattaagactccacaacagaatgggattgtaaaaaggatgaatagaactttgcttgaaagggtgagatgtatgctaaggggtactggcctggacaagaagttttagggagaagctttgcaaactgcaagctatctcattaacagatctccatcaacagctctcagatttaagactcatcaagaattatggataggagaagtgccaagatatgaccatttgaaagtttttggatgtacaacctatgctcttattagacaagataaactggaacctagagctatcaaatgtttatttttgggatatccttatggtgttaaggggtataaactttggtgcttagaagtggatacaagaaatgtattattagaagggatgtggtgttcaaagaacatgaaatggcaatgaaaactaccaatactcatagtagtcggcggaaacaaagtgttaagatacaagctgacaaggaggaagtagaaattgtagatcaggtggatacaccaacagcacacagtgatcacagttcagatgaagagcaagaacagatgccatcagcggtacaggactataaactagtcagagatagagttaaaagagatgtgagaccccctgataggttgggatttgctaattacacacttgctgcaggtgaagaaattgaaagtggtgagcccaccccttatgtagaaatagttgctggcaaagacaaaaagaaatggctgagagccattgatgatgaaatgggatctttgagaaaaacaaaacctggataagagtacctagaccaacgggacaaaggatcataggctgcaaatggattttcaaacataaagaagggatgccaggtgaagaagtgaggtacaaagcaagattggtagctaaagggttcaatcagagataaggtattgactacaatgattttttctctctatttgtaaaacatacttctattagaatcatgatagcaaaggtagcaatgtttgaccttgaaatggactagatggatgtaaagactgcattcttgcatggaaaacttgaagaaaagatctatatggaagagcatgatggctataaaagcaagggtactgatcaagcgtgtctgc

SEQ ID NO: 25703 - DNA, 2528 bp, Cannabis sativa
  modified_base (2498)..(2498): a, c, t, g, unknown or other
cattccagtttctttctctctttctatcttctctcaactgctttcttcttcatcaaaactctgtaaataacagagtgtttcacagttagttttgtttgttaactttaatttgttaataattgagttagcccataaccaattccctcttcttgtttctttggttcactttgcctatataaggctcttttacctaagttgtaaataacattttagattcaataataaagtctttttttttatgttctctattctaatatgatatcagaaaacaatcattaaaatttctcaaagctcttcaagctttccaaccatggtacgaactcgagccataacctctgctaccaccactgatcctatggtcaatgccattgctccaaacgctcctccaccatctcaaactcatagttccgctaacaatgtacatggagttccatcttcaactctatatcacaaccaaactcaaaacgatcagcctgcttataaagatattcgcagtccatactatttaagttctgctgatcatcctgaattggcacttgccactctggttctcaatgacaaaattttataaccatggttacgagatttcaaattatccactgtcgctcgcaacaagactccatttcttgaaggtaccttacctcgacccccttccaatgactctcttttaagttcttggattaaatgtaaccaaatggttatatcttggattttacactctgtttctcctaagattaaaagtagcataatatatctcgacactgctgtcgagatgtgaaatgtgttatacaatcatttcaatcaagataatagacctcgaacattcaagctcaatgaaactctaacatatcttcatcaaggagatgattcattgagttcttatttcacaaaactcactgtaatgtgagacaaaatcaaccaattaagactcaagataccatgtacttgtgttgtagcaactcaacatcaagatcatctcaaccatgatcaagttctccaatttctcaaagagctcattgaatcctatcacattgtccgtgctcaaattattcttcttgatccttgtccacctctcaacaaagtcttctccatggcgatataccaagaatgccaaagaacattagggaatcattctatctccacccttgctactacaagctcttccacactagcaccctcatttcctaactctactgctccctcagcaaatcaaaattcaagaactaagaaacctcatcccatgtgttcacattaccaaaattttggccattacaaaaacaagtgttactttctacatggattccctcctacttatggtaacagaaaaacctactaatttaagcactaacaatgcaaaccagatcactccaacacacagattccaccccaaactgtacaagtctccaatcctaatattgaaaccaaacaatctcagtgcaccccaactcaatgtcaacagatcatttctatgttaacacaacagttgcaacctgcaacatattcctttacatcacatgatacaccaggtgtaaataacttttctagtaatatcaatcctctttcctttaattcttggattattgatagtggtgctattcaccatgtttgctgtaacatgaaatattttaacactttcacacacactccaagtcataaacctataactttactaaatggcaccttagttaaaataaaaaaatttggcacggtcatacttaattctcatttggtcttcataaatgttctatatgtaccaaccttcaatttcaatttgttatctattagtgttttattacataacagctccaacattcaaatctaatgacagttatatctagggaccttctcgaatcttgaagattgggacaaccaagagatatgacaatctttattacttacaacaagagatacattctacttccatttcttgtaatatttatttagataaaaaccaatggcataatcgctttggtcatccatctatacttattactaataaaattaataaacatgcagatacattttcctaatgatacaactggaacttccatttcgttatccaatttttgatttggccaaacaaaagaaattacattttccatctaatcaaaagatttctaatgttgttttttatcttatctatttagacatatatatatatatatggggaccatgtcccatatcctcaatagaaggatacagatacttccttcctatagtagatgatcattctcaatacacatggatatacttgcttcgtgctaaatctgaggccccaaatatcatacaaaatttctttacgtttgttaatattcaatataaaacaaacattaaagtagttagaatgacattacaaaagaattgacacttactaacttctacaccagaaaaggcactacacattacaattcttgtgtaggaagactgtaataaatgcagttgtagaacgcaaacaccaatacatcctcaatgtagctcgtgttgggttttatgccctnaataaaactcatttcaatatattcagattt

SEQ ID NO: 25704 - DNA, 2292 bp, Cannabis sativa
  modified_base (27)..(29): a, c, t, g, unknown or other
actaatcagattgtaaagagttttatnnngggcataaaacccaacatgaactgcatatccatctaccccagcctcctgtggtttggtgcgacaatcttagcaccattatgcttactcttaatccagtgttacatgccagaactaagcacattgagttggatctctattttgtgcgagaaaaagttcaacagaagcagttgcaagttaagcatgtgcctgcattcgatcaagtggctgatggtttaaccaaggctatctcaagctctcgttttatcattttcgaaacaaacttacaattggtagtaataccaattccaagtttgagggggcctgttagagtatactgttagcttgagttagttagaaactattattagttagttatctgttattttacagttgtatcttgttaaccaacttgtaacagtttcagttagtttcagttgttcttgatctaagtgtaagcatctatataagtcatgaacaatggcttaataatcaatgaaggaattcattttctttgttcatctttttcatcatcttttctctctgcctttactctctcttttctctcttcttttctggtttgttcttgttctcattcaacaatgtcaagaagatctaatatttagaatatgggatattggtttatgatcatagttttacttttgtagcacgataatatacaagtctttttacatgtaataatattgtcttttcacttcaaatcttcaaactaatgctaaactaaatataacaagcaagcaaaatgtggattataaaaaaataaaaaataaataaatagcaatcctttttgttaggatggagcaagcaactgaccaacttattaactcttcttacccttataatgagctttgagccataaggtctgccaagataaatagagtattgactatcatggtcgcatagagtaaattgtgtgtggttattttgcgaattttattatttcacattattagtttaacaaatttcttaataaattaagtaaatatttatagcaagaattacaatggttgtcctcacaaaaattgaagaagctttttctcccaagcttttattaaagcctgaagaaatcaaatatgaaataatcacatatcaaaagacaacacaatatataacacaagtgaagtgattgctacgattatagagcgagccaataagaatatgacatgtgaattaaccaattgccacacatccaaactaacttaaataccttttaaagttagcacatcactatttagtggtttggcaccctttttttttttttttttgccttgtcctatattatttgaatgaatttgtactaaatataggggaattgttagttgagccaacaagagaatctctacatgaatgaaatatcaacagttgaagcacatttcatttcagttcataagtacatagtgaggcatgtagatagttcagacaattatgtacttcacttcacaatgaccatatcttttatgcagccacctcctcactcattcgagttttttgattacattatgataagtaacggtccttttcaaaacaagataaatttcttaaaatgcactcttcgagacagtattaatcgtctaattgaaccaaaattctattttctcattctatattcaataatagctatacatttatatatttatagacttttatactatttacaaattactaataaacttttatagtattttcatagtctaacacattatctcctcgataatgtgcttttgaaagtttttgaacacacgagcttcaaatgtctgatttagatcaatacttattgccttatttgagcatgtttccattgatgaagaaccagtcaaactgagaagaccatatcagacagttgttgaactaccttttgtccttccacaacacatcatttctaaccttccaaatggcccatcccaccaacacagcctcctcagccaacataccatatcaaaactttagctcgtaacaactataaaataattaaaaaaagcaatttattgtttttactaaaaaaaaatattttgttaataaaaaaaactcaaaggataaagtgaaaattacatgaaatatgggattttgtaaaaaaagttacaaaaatatggcatttataggtttgccactcttctatgacattttttcacatttaagactttttatggtatttgatatgccatatttttgtaaacctattatccaaaagcacatttcatgtttttgtttctaacttaaatagttttatttttttttagtttattttacatttacattttagggttt

SEQ ID NO: 25705 - DNA, 1386 bp, Cannabis sativa
ctaagaaatagttaatatagaaaataattaaagagaggcattgtatttaagaatcatacaatttatgtataaagaatattttgactggacaacaaatcatattaccaaatatatgattaattttgttacaagtcaactttataataataaacaattgcttcagttacaaatattaaaaaacttcttctatgcatgttattacaaatcatcaattaattaatggtcaattttaaaattgttagcatgtataagataatcacaattcacaacccattagtaactaaaatatatattacattacataattcaatattaatatatatatataattatttgtcaagttagcaaaagtacacagaaagtcatatcagtttagttagcaacattatcttaaatattgtttataattttgatcaatactattattaaaaagtgaaccacaccttcatataatttctatgcctatataagaatgagccatgttcatggttcattcataccaagtactatcaaacattacaaagtaatctttgctcataaatacaaagatagttcttatataaattaatagacaaatattatgatgatgaaaatcaacactcttatcttggtgtttgttgttctaattggcctcttgggagcctctaaaggaagtaaactcacaccgaatttttacaaacatagttgtgaagaagccgaaactattgtaaagaaggccaccgaaaaacatgtggctagtaatccggctgtgcctgcacgcttgctcagaatgcattttcacgattgttttgttagagtaagtcattttcataacacgcacttttcttttaagtgcattattggtatgaaaaaaaatgttaaagtgtatgcatgtgttattatttcagggatgtgatggatcggtacttttgaactcaacaaagaaagatgccgaaaaggatgcagttccaaatcaaacgttgttggggttcgatgtaattgatgatatcaaagcacaagttgagaaaaaatgtccaggagtcgtttcatgcgctgatattcttgctttggcagcaagggactctgtatcctactcggtatgctcaaatttacatataacaaaatttaatgtcatctatattcagtttaatagtaatacgtgtatatattcagtttaagaaatcgatgtgggaagtgcctactggtagaagagatgggaaagtgtcgagaaagaacgaagcacaacaaaacattccaccaccgtccttcaacttctctcgactcaagcaaaactttgccaccaaaggtctttctgtgcatgacctcgtcgtattatcaggtgcaatattaaataattactgaacaaaataagtagcactactacaactacttttagtgacaattttt

SEQ ID NO: 25706 - DNA, 2645 bp, Cannabis sativa
atttgaagaagtctcctcacttatttgttgcatctttcacacttcatgcccttttattttatttatttattttttattttttgctgaattatcattttacttctttatacctataccacaaaatcagtaagatgagacttaaaaaatgaattaaaagtaattatggtacgtttgagaaaatgaggaagaatttgaatccatcgtcttcaagaactcagagacaaagtacccatatcccacttttgttgttgttgctgctgctggtgctcacaagccaaaggctccaaaataatgccataacaagtatcaaaccaaagaaacaagaacccattttttggaaagaaaaaaatgatttttctctaattttttttttttttcaattttcccctgtattggtagtattgtttatatcaatgtatttatcatatatacaaatcattaattttagaaataattacgtaattacattttcacgtttaaagaattttttttacatttttacagttttcaaataaaaaaaaaacaaaaaaactatataaaaataatatgaaaataacatcaaaacaacaacaaaaataacataaagataacgaaaaattaataacaaattaacataactataaaataaaaataccatattttctttcaataaaataaaagaaaattgtaaaaatttttaaaattctataaaattatatttttataatttttttattgtttttgtttatttgtgaaataatcccttaattaaattctataatgcaccccttaaaaaggatacactgatacatttttatatgttttagtatactaaataattttttaatcaaattttttctcagactaaaatttttttctagatgccgaaacaaatagaggataaatcaatacattcatttcattttaaggggtgcagtgtagaatcacctccaactatataatagagtaactatataatggagtgttggtattctttgctaattctctttagatttcttctcaggattctaatggctaatccagaaaaaggagtgctttacaacaatatcccttgtgattttcttgaggacattctctcaagactcgatgccaaatcactcaaacgatgcgagtgtgtctccaaatcatggctctctctgctacgaacaccatatttcatcaatctccacctacaccgtcaactgcctcgtgttgttttcctccacaaaaggaatagaaggttcgatccaactttatctatttgtaattgggaaaattttgttgagatttctctgcacaagtttcctttttttgagatgaataaaccaccgttgttattaattatgggcagcgttaatggtgtattatgccttttggacttaacctgtcaaatgggatatttatggaatcccaccattaacgagtccaaaaaattgcccttttctcctcagttgggacgaaatcgttctatacttgggttgggctatgatcccttcaccactgatttcaaagtcgtaaaagtctcatcacttgatgagaatggtgttgttggccctaataattttaaaatgggtaatcaaattggggtttatagtttgagaagtaatttatggaaaataataacaatgcctaacatattttcagaagttgaatcttactctacttctgatataactatcaatactcatgtgggctgctcaattgttgttaatgagtgtattcattggatgatttgctttggcaataccactgattatgaccaatcatttttagggatagtttcttttgatataaaaatggagaaatttaagcttataaaggtacctcaaattgtaaaagtatcccatgctaggaagctagctaaattttctgggtgtctttcttttgttactatgaatgaagtccaagtagttgaaatttgggttatgaagaaatatggtgatttggattcttggttcaaatatttgtctatcaatctactcaatcttcttccaagtagagttggtgagtattttccagtaggttttttgagcagtgggattcttgttatttcttgcactgatagtgataattggtattggtatgataccaagagtaagaggcttgaaagtatgggtgaaataattggtgtgtcggcctttacaacatatgctgagagtacatttaagttaaagggttgagagtttgtacggtcagaaaatatggatttatggttcatggatcatgcatattagcagttggaatgttttttaaatgtaaagatagtgttgatttgtgatattggctactaattcttcaatgagctcctacaaatctattgctatttactggtttattgatggaacttgctggttggtaatacttttttggactgttatttatgatcctttgggtgccccataacatgagcctaactctttgattgagctcctagagtagctagcagattgggctactttgaatggtcttgactgagactcccagttaggtgatcccttgaaaaagtctactctttgttttttagaatggttaatgagattgtgtttattagttcatatatgtgttgtgttgtaatatttgatgcattagagttaggatgtttataaaatgtaaagacagtgtttacttgaccactttacttacatatagttctacttggtttgctt

SEQ ID NO: 25707 - DNA, 3981 bp, Cannabis sativa
  modified_base (3751)..(3753): a, c, t, g, unknown or other
tcgatgcttacagggtcataattcttgtcatagaaaacattatgaaactagcacttaatctttaaaatccctggcaaccgccccactgtcgcaagttccttgctcatggttaataccttcatccacatttttagcatataagatgcaatcttaggtgggatcttctttgaacgcaacatcttcacaaattctaagatttatggacaaatttctttccaaaccatcattttactctaattcggaccaggtaaaataacactatacgctttgacttgaatattttttgttgtttcttcttatcttaccaagaccaaaaagagccttgctatcaatggcttccgaaattctttgttgcactaacaaagtcgtcatttttctcttccaaaggctacattttttcaattgaacttattcacctcaaaacttgtagaaattattcttgattctttaaattctctcaaaactccaccttggttcttgaaaagtcaacccccacctaggctctgatactatttgttgtgatttaatacaaatcatactaatcaagaacatcaaattaaatagagaatgaatcaaaagtataaagcaaatcaagattcaaaactaatacttatgcttaaatgaacaaaagcacagacattgttgtcaaatgaaattgtgaattacacaaatggtattagatatgaaaaatgcatattatgtggttcgaactcaattgagtctactctaggagggaacaagcactatgcatttttctttattactttcaactttcaagaatagagttacaaagagttcttaaaaactcagctcataatagtacatcaaaatcatctcaactcctttagagggaacccaaaactcacatggagaaacacaaactctctaagagaaacttgcatgggtgaacactaaactctcttggagaggctcacatgaagaaacattcaattctcttagtgaaaacactcaacttacataaagatcacaaaatactgaaacactcaaaacttaattggttcttctctcatttcttcactctatctcataacctcttctcatctttttcccttgtcccaactcgaaataacttgacgttgtctatatataaaagccaaggcccaattaactttcattgaagattcttgatagccactaataacttgccacgtatttaagtaatttcaatcactcccattaatagtgtataggtgactgagagtcaattgtgcttggtgaaagttgagacacatagttgttaagcagttagttaaagttagttagattagttgcttagctatcatgttagttaagtgctttagcctaactaactctctatattgtattgtacataaagagttgtgctcttcaatcaattcaatgatttttttttacttctctatattcaacatggtatcacaacaaatttttttgcttctgccattccagaccttccttctgtttccataatctgtttttcatttcgtttcttttctttctgccataacttcttcaacaactaccaatttcacccctgttgttttctcctataaagtttcagttaaacctgatgataacaacttcctattatggcgtcctcaacttctttctgccaccagaggtcatcgtctccaacaattcatatctgacactcatcaacctctatgaaatatcttactcaagaagatgaagttcgacatcagattaatccccaatttacagactgggaagtataggatcaactattatactcgtggttgttgtcctccatatctaatggtgttctcactcgaattgttggtgctgaaacatctgctcaaatctagaaaatgctagaggtatatttcgttactcaaacctcagctaaaatcgatctttatactactcaactttagaattgcaagaaaggttctcaatctattaatgaatacttactttgaatcaagactcttgtggatcgtcttgagtctgttggccacaaaatttccaccaaagaacacgtttcatctatctttaaaggattgccctcgatttatgatacctttgttatttctgttaactctagaaatgatgagtactctattgctaaaattgaaacattactcttgtcttaagaacatagaatggatattcacactaaagaacttaattctattatcttgctactaatcgtggttttcgacaaaaaccacaaagttctacatcattttctcacaatgcagataccacaaacttgaatgatcacaacaacattggcaaaggttcttggaatccttatgttgttccaaacaaatcttgtccatcgaatatgtttcctcaaacaaatactggtcaggttcgtggtcaacctcttgccaattcttctttacatcaatctctaaccaatgtctctaaaccagtttgtcaactctgctcaagaattggtcacatagcagcaaaatgttatcaaagattcaactatgactttcttggcataggagcaacaaacatcctaaaacagtcatccaacattgctactgctgatagtgttgtggatgaagcctggtaccctgattctgaagccactgctcactgcactgctaatgcagccaacttcacacagaagcagccttactttggacaagaacatgtgcatatgggtgatggtgctggcttccctatccaaaacattggtaataccctcattcatactacaaacacacataaaaccttatttctaaatagaatgctgcatgtgccacacattcaaaagaatttaatgtctgtctctcaatttgctattgacaataatgctttcctttgaatttcatcctcaaaaatgttttgttaaggactaggtttcgaaggagactgttctagaaggacatcttaagcatgggctttatgtcatagatccaacccatttttgtatgtcatcttccaacagattaaacaattcaaaatctttgtataatgttcaaacttgtaataacaatttcaattccaattctcagtgtacttccttttctttgtggcataaaaagcttgctcacccttctgtcaaagttgtaacagccataatggctaaatgtaacatttcaaatagaaataaagctgtgagtgatttttgtgatgcttgttataaaggtaaaattcacaaatttccctttcccatatctcatactgttcttaccaaacctcttcagcttgtgcatactgacatttggggaccctcacctatgttatcctctcgtggatatagatactatattcactttatagatgcctactctagatacacatgggtgtttctcctcaaagtaaaatctgaagctttacaaatatttataaacttcagagctcaaatagaaaaagagctgaaccttccccttctatctgtccaatctaactggggtgaatttcaagccttagaaccttacctaatcaaacatggcataaaccatagactgtattttcctaccactcaccaacaaaatggtgttgctgagagaaaacatagacacctaatagaaactggtgtcaccttacttgcccaagctttcatgcctctctctttttgggatgaagctgttagaacaacttgctatgttattaatagacttcctaccccagttatagccaatgaaacccctttgaacaagttattttataaacaaccaaattactctactttaaaagtatttggctgtgcttgttatgtaacgcccgtacttttataaagatattaattttatttacaagcgttaaacgnnnaatatcataatgtcgcatttttatttaatacttgaaaatattcacaactggccagttttcgtacaaaagacttaataaataataataaaataattgcgacataaatttaatagcgtaaataaataaatagaacaccctagaccgcctgcagttatatggaccttagcgagttcacacacacaagcgtccaaagttccactcgccaccggcattctagacttaatttca

SEQ ID NO: 25708 - DNA, 2173 bp, Cannabis sativa
tcaaaaaaaaaaaaaaaagttgttctctaatagtacctactccagtaaaaatttctcgatttcgaaacaaatcgaagccatgaacagtaaaaaaaaaaaggcaatgctatttacaggattggatttcatatttaaatgaaccatgaatattttttttttttttttggaataatgtatattgtaattattaagcccttcttacaaaatttgcatgaaattcttaatagtgttgagagaattttaaaataactagttcacacatgtataaaacaagtttataaaaaattacttgttttttatttttaatattataaattattcagaatttttaaaataattttgtgaagttcaaaatatctacattgctcgtcgtcagaataatcctactgctactgataatgatacctgaaagaaccctgctacggatcctcaagattacaagagtcgatcacttaaatagattttacaagtttaaaaatttatttttaaagtctaaagtgtttgtgcattgctcaatgtctcgagtgacctatatatggtacatggttaataataaaaaaatacttacatatagtgtggtacatgccagacaagttaacacatagtagcatataataatagagccacatagatccaaaacaaaaaaaaaaggcatacatatgtgacattcatggtgcacaacaaaggaaaaagtgaatcaaggcattaacttctcatatagacacccgcttatatacatacaagtcccaaacaagtgtgcaagaaaccattgcgattggcccccacgatcttatcttgagttaatacaagctcctttctagtacaatgaaagactcctcctaacaatcaatcaatagtcattgcctaaactctccctactttgaccctcaactcaaaaaaatgagctcaaaggggggtcacagttgtagtttggtctcgaagggggatcacaattgcagtttgatctcgagagggggtcacagttgcagtttggtcttgaagggaggtggggtcacagtcgtattttggtctcgaaggagggtcacggttgtagtttggtctcaacggagggtcacggtcgtagtttgatctcaaaggggggttaaaattgtggttcggcctcgggggttacatcctgactaacacatggtggtctcggggtggagcacccacaaatcctaatctcaaggtgtataaaacaacaacaaaggggttaattcagggtgaaccttgacctagtatctatggataaatctaaatggcaaccacgacttattgtagctctatcttggggtagctaatcatgacccccatagtcgtctctgagggaacctcctagcctcagggtgcacaccccgacccacgagcagatgtgcctcgagtgacaataaaaaaaattactccaactcggggtaccttgagattgcttaattttagagtatatatacactgaacctccaaacgatcaggccaaaaaaactacggttctaagtgataaagtggcccgaagcaacaatgacaattacacacttcaaaatttgactaagcgtgtaaagaaaaaacaatacattaagtgtataaatataagaccccaagaagtagacaagaggccattatcaccaactcatgaagccgcatttcagttgtctcggggtaccacacccctgacctccatgagatggtctcagggtagtacgccttgaactccacttggtgatctcgagggtggtgcacccccatctctatctcgaaaaaatggcaatctcagactaccgcgagacaatcccatctcggggtaaaaaagtgggtctcgggatataggtctcggagggggatcttttggactacgggggcctatctcggggtaccacacctgacccccatgcggtggtctcaaggtggtgtaaacccattaccccgacctcagctcaacgttaagaaaataataaatttatcccgagacaaccccatttcagggtaagatggcctacctcagggtataccgaaatgtttgaagcagtcaagatggacctcccaaggaggtatcacatggtagccacctcgaccctatgaagtggtgttgcagcttggaaaaaataaggtgacttgaagtcacaactacaacactccccaagcaatgatcgttcaacaattttttccaaggtacatacta

SEQ ID NO: 25709 - DNA, 2371 bp, Cannabis sativa
  modified_base (26)..(26): a, c, t, g, unknown or other
  modified_base (74)..(101): a, c, t, g, unknown or other
  modified_base (627)..(630): a, c, t, g, unknown or other
ccactgtaaggtttctgaaactttanatgtgtttatttacattgttttagcgattcatatttaggatgttaaannnnnnnnnnnnnnnnnnnnnnnnnnnntggtaaaacatattccaacacagtcgtgttcttactggaaaaaatagaggttttgaccttgttaacttgttgacttgacaaagaacagaacttttccaaacagagttagaaggctttggcttcctcaatgttggctctccccacaagaatgagatcatcagcgaagaaaatgtgggaaagaactggtccgccccgactcagatttatcccttttatcctacccttcttcaaggcctcctcatagagtgttgataatatttccgtagctcagataaagaggtaaggggaaaacgggtctccttgacgaataccacaagacaagactatcttaccaacctggccactgttcaagtagacattcagagtagtggtcatgctgaaaatactcgtattggtctgtatgatcagtcgtcattccatgtagcaaccaaagtgacgtacaacacattaaaataaataaaataacaaataacaaattcaaagaaagaaaaaaattgtatgtataaaaaaatgtttaattttattnnnnattgtatgtagaaaaaaaattatatatgaaaatagaatatacatttgatctattaagttttgtaatatgattgaattatatgtattaaacttttatttttttttataaatatgtagggattggattggatcagttacttttacgtgtcaattaacatccaatcgacacaagtgcggattttaaattttccaatctaatccgatccaatctgcactttgtggattggatcgactattttatgaacacccctactcttgatggttcttggaccgttcttggttgttcttgaatttgaactgcttttgtcttcaagtttctttggcattgtatcttcagctcgtcgcaccaaattggtagacttttctaatatatccgacaataatatatgtatacatataaatacacaataaatataaaatatttttgtcaattaaatatagcaaaaattaaattaacaattattaaatgttagatttttatgttgtatgtcctgaaacaattttgaagtttaaaactaaagcctaaattttgaaatttaatgccccatgagattttgtttagcaagttggtgagcttgagggttattatgttgattgtcccatgattgtttaacattgctgtgacatgttgggctctctggaaaactagagatgaattggtttggtctgataagcaatcaacaacagtgagtgtctcttttctagctcaaacaaccctcgcaaattggtctcaagctcaggatatgatattggttcccaccccaacttttttaacagaggctgatggcctagataggtggcaaaagccgctgctaccaaggtaaaaataaacatagatgctgcaatttttgacaacaaaggaacttttagtgtgcgtggcaagagatgcaacaggggagttggtggaggcaattacctgctgtcgagctgggactgtgcaacccgaattggctgaagctatgggagttagagaggctcttagctaggtaaaaaagaaagcatggcgtggaacaattattgaaactgattgcctttccgttgttcaagcaattcagagtagtcttcctttattatcttattttgggagcattatttctgattgtaaaatgttattagaacaaatgtgtgatgtttttctattaattttattagacggtcagctaatagtgttgctcactcgttcactcgagcttcttatttttttgttgatcgtactcttaggagcaatgatgtttctactgagttgcttcatgtaattataaatgattgcaatcaataaagttgatgactttcctttaaaaaaaaaataatattttgatggttagattttttagatttagctgaaaataataaaaatataaaaataaaaatgagaatgtaaatattttgaatcgaatttaaaatgaataaacaaaattaattaattaaattataaagttttttcttattaaaaatagtttcattgtatattatgtcacacacaaccaaactaataatctattggtatttattatttataatccattttattttatttaaataaaaatctaataatacatttattttttattttgaatcccaaaataatatagtcctaaatacaccgatacgtaaagcgactctgacaaccaaataaaataataaaaattaaatctattcaactatgttttattttattacctctgagcaaaccataccttaaattattagttgttaattttgtacgaccaatgtggttagtt

SEQ ID NO: 25710 - DNA, 2705 bp, Cannabis sativa
gactagcaaagtagtctttttcccttccaaagatatgtctggatcttgcatgcatattccaggtaatcctctgaattcatgagctttctagagacagcgattatgctatcactggtcattaaagtttataataatccaaaaccgtactgaagaaactccagtagtgggaatagaaattgaaagggtattcgagatagtgtatggtcctgaaggatgcttacatggttccttctaacataatctcaaggaatataatgacttgtcccctattccagatgttagaaagactcacaaaagaaaggtagtcgcctttttgaggaatacactactactctgatattcttttacccattaacgacgcacgactcttattgtcactgtcaacaataccatgcctcatatggtagactgcttttaggaattgagcctcaccttcctagcctaataactcaaaatgtaatattaaacaatatattttaccccaacagtggagtttatagaataaaactctcgaacgacccaaattcgtctagcccaataaccatgattgcctataaatatacactatcttctacatgtaaaagattcacaaccttgaaatgtacgtttgagttgtaaaaaactccatagctaaaagcttataaaagtaccttagggactaaggctcattaatgcccgaaccatataaaaatacatgtattctttattttttattcagtttttctttagctttatttttctaaataattaatttttgaaattctcaataaacaccatgactaccaaacaaaattgaagtaatagagggaaaaatttcttcaacaattacaataactaaactcaagctaatattgaccttatttgagcgagtaaaacaacatattacaaaagaaattagagaaataatattatgaagtataactacatattaaaaataaataactatgtaatatgacttttgaggaagctcaacactctaacatggtgagatgtcaatttagaaatttttaagtccttatatattaagaaatataagatttgatctaatcgaatgtgtgtattatgtgatacttaaacatatcaataatacttagttaaatgaattgatgattactagagaataagcatctttatataaaggagaagaactaaataaatcacctaataatattttaacttactaataccaaaataagacgaatataagaaagcgtaattaacacaacaacctctaactcctaatattataaaattttatatgttaattgcagtgtttatgatcacatgtacctgctatttatgtattctattgtattccatttgactatggaatatagaatgcactgtttatctaattaatgtcaagttttgaagaattttacaaaaactgtctgaggaaaagacaagaaaccaagctctcatagagggctagccctgaaaattaatggaactaagatttttttaataaaattaagaaaaaaatccttttaatatataaattttatattttaatttattatttttttaaaacaagttacatgggctgatgaaaaaaagcacagataataacacagttccctttccaattcttgtatgggcttaggtgggttaattcataaaattttacataacaatttttttttgtctataggtcttataaatatttggggtccttgtttgagtgggccttaggcatgggtctagcctgccttagcctagggttggcattggtctcataaccattagtcacataataaaatcagggaaacttacaaaaatacaataaaatgggggaaaatttataaaaattttgggacacaaagatttttacatttttactatacaaagtttggcaaaatattgtgttaaagtttcaaaattacaaaaatactgtgtttcagtaaaataaaaaaaaaaataactcaaaacgactaagacatgtcaaaaacaaccctagaacaacttaataaacaacatgaaaacaaatattaaacaacaaaaagataactacaaagtaacaaaaaaataattaaacattaaccaaattgtaataagaaaaataatatcaactccacgatatggttttgtattacgattttttcacttagttttgacaacttgatttctcttttggtcctattatattcttttttttttcatgaaatttattgttacaactttattctttcaactttgttttttctcttttctttttttagttagtgatagttaaaatgataacttattttttaagagttaaataaatagttacaataataatagaaataataaaatcatatgatttcaaaatagagtatatgatattgttatatcaaatattgtccacttgacatggcgtgtccatgaaaaccaagtaagaggacatgtggacaatagccttgccaatagaaggacaaagtccccttgcaaggcatggaaaaaaccgtcaagaaacaagcaagaggagataagaaagccgtcaagaagctacataacaatgtctggcaagccaaagggagtacataggccgcttaagatgagcttgtatggccatcaaggatttgagcacaagctgccccacagaaggggactttcagaccaagggaaggtccattcgactaaggaagcctgacctctgcaaggaaaaggtgtacaaaggttggcttccacctataaaggctagcctccacctacaaaggttggcc

SEQ ID NO: 25711 - DNA, 3281 bp, Cannabis sativa
tctctctctctctctatctatatatatatatatatatatcaactcaatttgatcattgtgtttgaaatgataagtgttggcagtatttataggcttacgatcaagatcccaaagtcaatgactgtaagaagttaggttgttaagttagttaggcaataagtaacttaaccaacagatctccacgttagcataagtaagagttcatctaggagcatgtatgaggacttccagaattatgaaccaatgcactccctgaaggaacttctggataggaaatagccagctggagtcgactatctgggactccctttcaagaggaacaactagccatttgaaactcctttctagaggaaggctagctttcttgaggactacacccagagtggacatgatggtcatccaagaactcccttccggatggcaaccatcattccacgagacttcttccagatgaataggttagttttccaggaacatacatttgagagacaaataacattctaggaataacttgttggagacctttttatttggaagaactataccacaaacttcaatcgtggaccaaaaattacaacttcaaccaagaagcgacaaatcaaccaaatagtcgaaacaataaggtgatcaaaaatttgaaacaaaaagcaactttacatttgcattgtgatcgacaattacagaattgtcattatcatcattgatgcttcatctctatcgttcttcttatcactttaaataataaccccacgaccaaaagcttcaaacatgagtcttccatcctatagcctaccaacatcactaccacgataaactgacaaaaataaactataacgtttgtatttacatactaatagtatttttatatagcctaccatcatatatgccaataaacctattagtttattttggcatattaaaataaatttttatttttgttttttacaaagtagcctatagttcatataacattcttcgtatggattcagcggcgcacaaaaattggcatctccaaacatacatatgcttgtacggacaagcctgacctcatgaatttaggcctcactcaagtggcccaaagtcaataactattatattttaccccatcaaaggataattgatccctaaaattcctaccgggtccgggtatgcccatacccagttatcccctataaatataacatcaccctttcatgcaaatggtggaaaatagaattcttggaagaagaactgagtattagggttcttcaactagggcacaaacatttgtaagaaataatttgaatattttttagctcaataatattaactcatggactagagttcattaatactcgaaccacgtaaaaagtttggtttgttctactttaatttccttctttcttaagcttatttattttataataagttttcaaaaatctcaataaataagtatatatataaatatatattattcatttaattaatctagttctttttttaaaattttaattatggtattattttttctttttcatctaagttacagtcttgtttattggctgattaagcaaattaataaattttactttgctttttatttttttaaaaaatgaaaaaaaaaaataatgtattgatttaattactttttttttaacgtggtgaacagagtcacacaagattaacaaagcagcaagccacaatcggcctcctcaaaccaggatagttcatcgtctaaccgaagggcatattttgccaaccatgagctgtagaaattaaatcgcgagccacatggaaacaaaattgcccctggaaatatagacaataaagttataccgtcttcaaacagcaaactccttctcataattaaaagttgtggctagagctagcaaatcttaaaaaacatcgcaacaccaaaccaaaaaaacacagttatattagaataacaatcttcaaaataaaaattaaaaaacaaaaatagaattaacacacaatacagttatattgatttaattacttggtttctatacaaaaataattagtatttttccctttgaacttttgacactacctaatcttgttccttaaaatatgcgaattattaataattctccctaaaatataactgttacattcgcatgtcccttctgtaaggttcaatttcttttatatttaaaaattagtatttttacctcctaaaatttgactaatattaaattttgtctcatttcatgaaaaaaaaaaaaaatttaagaattattattttttattaattctaaaaaaattaagaaaacctgataaaagtattaaattaataaaaaaaatatcaagtttactttaaaaatgtcaattatttctaagaaaattattttcaaattttattttatttataaacacatatcttaaaaaatcaaaccaaaattattaaaaatataataaataatttaaagaaattaatattttgcgaagagaaaatcatattttttattttttacaaattcatgtcttaaaaaataaagaaaaataattatacattcaataaaaatataaaatcatttaaaaaataaatagaaattaaagctaaaaaatattatattaacttaaacaattctagattgttagagaaaaaaatacacttgttttcgtaaaattttgtttttacaaaaattaaatttttaatatacttttttttttatatttaaatagattttttaataaaaaataattaataatcgcttatttagttttaaatttttatattttttgtttaatttttttaatcattcaaaatgattatttttttaagatctaaactaaaatttttaagatttactaaaaaaaatattgaatcttttttattttatttggagggagtacgatttgatagttgttaaaatttaggagggaaagtttcaaatttacaaagacacatcatcatttaaacaaaataatgagacaaaacttaacataatgactaaatttctataaatcactacaagaatgtcaacttttgccggtgcaattgctcaattgcaccggcaaatgttacccaatgctggcaaaagtcaacaaatgcgttgacaaaagaagtcaacaaaatttgtttacctccatgttttgccggcgcatattatcgtcgacaatagagaatattaactctaagttcgcaggtaaaagtggcaccccaaccgccaaaaggtgggaatttttggcggttcgagcctactttttgccggtgaacttacatgtgccggcaaaagttatttacttttttttttttttttaatttttttttttttttt

SEQ ID NO: 25712 - DNA, 4015 bp, Cannabis sativa
aagtcatcccaaggcccaagtgttgcaaaaaaacagttccgacagtgcaactgcaactagaaccagaatgatgatcatgaaatttccatggaatttgaataagattctctaaaacgcagaacaggttgcttgcggtggagcctcctcaaatgaggccaatcaggctccccgaagttacaatcggaatttctggatcgccggagatattctcccgtggaatccacggcgttatcaaacgtgccgtcatcataggaaacggcttcgccggtgccgagaatcagtgcatcggtttggttcgtggtcttggcctctcaggtcgccattctctttacgtgagtattttcattattataatatttatttatttttgtaacgagaattcgagccagtcaaagatcagtagaaacttgcacaaaatttgcgttttttttctttaataataataaaaaaaatatttgttaaatgcagcgtgtgagtagacctagaggaggaatcaacgattggcttcactggattccagttgctctacacaaaaaattagagcacttgttcaggaggattcatggaagcttgcggcttagaataccagctaaagggcacagagtaaatcccatttcgtttgggcaaaatggtattgtttttcttactgtttttattggaagaaataaaaggaagaatcttgaaatttttggtgattttttttttctttcttttcaaatgattgcatatactgaacatggtggtggactagagcaggcataactgatatcttagaggctgatgcaaatcatattgcaaatatggctcgtgaaaatttggataagtatgtttattttgctggcactgttcagaagattttgaagaattgtgttgtattttgttttttgtatatcatgcaatgttcttatgtttgtctccaattattgatagttttgttcttcagggatggtccgttgcttgtggtagcatctggaagggataccatttgtgtttcaagcactataaagcgtttagctccagaaagtgtttttgttgtacaggttttgcttaaatttgttctcaatttgatattttacttctgcttatataatttgtttctttgtagcttctgaggaggacctgatgtgctattgttatctgtttctgtttactgggcctaaatatttttttctttctgaagacttattgtttgttgagtgtttgcttattaaataatacattggaattatgttgggtcagttgcttgatagatttatctttctcttaattaagttgcaattgcagtcatttgattttctaacttagttttctttctcattttagcaatgtggttttgatgtataggaaaatggaaatatcagggcatctcaagcgcattcttttctttggcttttgtgtttcagattcaacatcctaggacgcatctgaataggtttgatttggtcataactccccgtcatgattattacccattgacacctcatgcacagaagcaaattccatggtttttacgaaggtggattactccacgtgaaccacctggtaggaatgtggtgggtaccttcgacagaagagctaaatgcctagtctagtttcagattagttttgtagtcatcatgcaagtatatatcgagatcatttttttgtcgattttgttcaggttctcacccttggagctcttcaccaagctgactctgctgcactaaagaaagctgcttctgcctggcatgatgagttggcattgcttcccaaacctttggttgtggttaacattggaggcccttcaagtaattagtttgcatatataaattaattacgacttatttcacagggcctctattttattggatgtcattttgttgttcttgagcatgggtcatctccttttagtatttttggattttgttgataggtagggagtctgttttaagtcattcaagtttaactttattgtagttctctgatgcggcttggagaaatttgacagtagggactgcattatttttttgctattatgtatatagtacgataacttagtattgtgaaaatagtttttttttttccacagaaattgtttgagagctgaatgatattgttagagccttgtagcaccagaattttgccatattctctagttaagaattttctttactatacaaagaacattagccatataattataaggtcttgtatgctaggctatttcatatttaaagttgcatattaggcttcatttatctttatttctcactgtttgatcttgtatccctttttatttgaataatgatccatgatattttaaataggaaattgtcgttatgatgtggatcttgctaatcagttagcatgtatgttacaaaatgtccttccgagttgtggaagtgtgagaatatctttctctagacgaactcctaagaaggtatgatacaaatgcaccccctatgattataggttttattatgtagtatggacttatatcctgaatgtgtttgtcaacaggtgtcaaaagtttttgttaaagagttaagtactaatccgaaagtatacatttggaatggtgaaggtacttatcatttgatgcatgaacatccttatttcctacacttttgtagatgtatacgtaagtagtgttgagattattaattcatattctatgctactgcttaggtccaaatccacacttggggcatctagcttgggctgatgcttttgtaatcacagctgataccgtcagtatgttgagtgaggcttgcactacggggtatgttacaagaatgatgatgaggctaattgttgtctctaactatgcatctgttcttgatattgataaaattttgatacactgtttttggtctcagcaagcctgtttatgtaattggtgctgaacggtgtacatggaagtttgcagacttccagaagtctttacaggaacgaggagcagctcgaccatttactgggaaagaggatgtaagttggcagttattttatttttcttgtatatgttgctaatttaaggatctacagtttttgtgaaatatttcttgaaaaaattgttcacttgttaatttttttttcttctaaatctatcaattggaaaggatggatcttaaagaactctctcgagcatgattaattgaatcatgcatcctttgcagtatcaatggttcaatgcagctctagtttacacacataggaagcttttctacaatcagtttttatcaaataaaatgaatctatctatggttgctttcgaatgaagaactctctttgttagaacacgagttgggctgtattttttttcatgatgcatatcttgtgtggcagggatcacatgtgttatttgttaatagttagcatttacaatatggcgtgtaataagcgttgttatttaagttacttacagtgaaagttatttgaagatgttttatcattgtctcgaccaacatttaagcgatataaatttgattgattttgttgatagatgtcccaaagctggagctatcctcctcttaatgacactgcagaagctgcccatgtggtaaaaatggcactctctgaacgtggatggagtatacttacatagtggctggtcttacgaagtttttgctcagtctttttgtgtaagatgttaaatcctttttcttctttttcatctttcctcccaagagtagttttcccagttttgtttagcttaggtatttttgtattgattgagagtgaggctcatgagtagaacaccagcagaactgagtgtctattgtatcattgtatgtataatagatgagacaagttttgatctttttctcttcccaaaagaaaagagtaatgacgtgcacaatctatgcttaaacattacattgatatgataggttttttaaccaataggacatatagttttcaaaagtagtatcacttatattaatgtttgagggcatattttaagtgcaagttcaagaaagggtttataaatagggattatttcacaaaaacataaaaacaacaaaaaaaaattaca

SEQ ID NO: 25713 - DNA, 1649 bp, Cannabis sativa
ttcttcctcctgcaatagaattcatagatgtaagattacaaagtaaatggtaaatggaaccaattaaataatacagagaagaagaaaaaaaaatgaggagtcgaccatgcattcatggagaattatgcaaaataataattaaatctcaaaagcctccaaaaatgtactcatctctcaaaggagaataagataataaaactaaaaaactgaaaacacctggggaaagcctacctccaatattgcatgaaactcctctttagctattacaagtctatcagtgtcactagaatcaacaacatagattatggcttgggtatttggaaaatagcatctccagtatggcctgcgacagtaagcttgtgcgcatgttaactaataatgtaacttcaatttagtaaacagcttgagaagtaaacaagtggaatagtgtagctaccataagacgtcttaaactaaacagaaagaaacaatgctttaacccttaggttcataacttcttaagaggctaaaagacaatatctaagacatgattcaacctttttaaaggactcggtaatcataaattgttaaattgtacttctacttagaattatcaactctccaaattttgaaaatttttagagataattcatccttctagaaaaaagcatatcaaatgccactcatttgcaaatctctactaaatgtaggaataccatacaataaatgaaatactccaatttttgccaggcactgtaactgtatgcctagaaccttaactcaaagtaatccactgtaatccagtccagccattagagcacaagttcaaaataaacaagacagtaataaaaatgaggacttcaacaaacaaaccttaaaattcaaaacaaacatattgcaactactactagtgaccaaggcacatgagaagtgatatttcaactcaaaactatttgtacacaattcctaacagatgcaactattgcacgttgataaattgaatgcttaaagatatcagtcaaagttttgatttcaaataccgtacatgcataaaactacaccttgaatcaaattataattcgataaaaatgtgttacataattattagctgagaaatattctatacccaatggtttatttgacaacattgtgaatcatgcagttttgatagcatagctagcgcttaagttcaattacacatcatccccatcacaatcaaaaacactaaattgactaaaaaataatacatacctgatacttgtttgtccacctgtataaagaaaaggacaagtatcattagataagagaacttacgttctacgttcaagaacaaaagctgaaacgaagaattgattaaaagtggcagtttaaaattctaaactaactagaagaaaatgataagatctactaataagataaacagcacaaaaacttggtcattaacaaaaccatcctcacttctaacaagaaacacatgcaatcattgttccacaaacttgatccaaatacatctctagtgattaggaatgagtgtataaagtaaattcaacccaaaccatatgactttaatgtgaattcatctcaaacccaggttgaagttgaattctacatataggtcaacatcctatatacactttaagtgcagtatcaatggtagattataaaatata

SEQ ID NO: 25714 - DNA, 1899 bp, Cannabis sativa
cccaagtttccttcgtaacaactgctatcaaatgtgatgagatgggactgtggtataggtccaaccagtttgttgtgtgaaacattgaagtactgaagaaaagatgatttgtccaattctcttgggatctctcctgaaagagcattttgagaaagatctaacgattcaagatttgttagactactcaatgatgatggaatgccacctttgaatcggttgttggacaaatcaagagaaatgagcccttttaagtttccaatggcttgtggaatgtctccatcaaatttattgttggagaaattgatgagtataagaattttttccattcttgaataccatattccaatgcctttgattgttgttgtaagctcgaaaaaatattgatacccaagcgtaccataacttgttgtgatgctaaaagttggtgatctcatataatcaaagtcttcatcaatattgcttgtacttgtcatggacttccaactttgtatatatttcaatggcaattttccagtgaagttattgttagagatatcaattacacgcaacttaggaaaatgaaggattgttctaggctcctctatagctccataaaatccatttccctgcaacttaagaacttctaactttggaagatttcccaaccaatatgggaaaacatcacttaatttgttaccttccaaattgaggtaaacaagcatctcactattggtaagcgatttaaatattttcccttcaaattgatttattgataaatcaatgtatcttatttggtttcctttgaattcaggagtgtttccacaaaaatggttatttctaagggtcactatcgataatgacttactaaaattacctaaacaaggaggaagctcaccacgcaaactattatctttaaggtcaagaaattgaagagaagtttggttgcatattgcagatgagagttctcctattaaagagtttccagcaagtgataaactcaccattgtttctctgcttacactcaacatccaatttggtatctgatcaccaatagggttatactcaatatacaaaagttgaagctttctttgatgcctaagaaaatgaggaaaagttgttaagttacagttggatagtactagtgaagtgaattgtggaaacgtttcattatttattctagtgttaacatttaatgagagttggtttatggaaagatcaaggcaagtgaggttcttaaggccaagaaacatgtcaaaatccactataccactcaaactattaccttctatgaaaagaatttctaaattgatgagatttgaaaatgacaatggaatcggaccactaagttgattaacagaaagatgtagttcactgagttgagttaggtttccaacagaagaagggatatttcctacaagattattttcagaaaggtcaagataaagtagttggctcaacatacctatggaatctggaatcactcctgaaatgttgcaatcacttgctgataactcagtcaaagaagaaaagttttgatttagtgatgatagatccccagataatggagtgtaactcaagaacaatgacttgagagagctcctttggttaagcaatggaggtattctcacattgagatcttcattaaaccgcaagctgagttcttgtaagtttggtagttgaaagatattagttgggagttcaccttttagttcacaatctttgagtaataaagatttcaaagttgtcaaattcgccaatgattttggaactattgaagatatgcttacataactgagacagagttcttcaaggcttgttaaattcaaaatcaagctctcaaagtttggctttttgagtttcaaaagattttcttgtgaaattggatctatgttggcacacaaagaaagttgcaacaatttg

SEQ ID NO: 25715 - DNA, 2763 bp, Cannabis sativa
  modified_base (1721)..(1733): a, c, t, g, unknown or other
tatattaaatatttaagtatcaacataaatgttattcatataatttaatcatcacacatcgtatatccatataattataataataatattgctttcgtataattatgtacaaacaaaaaatataataaacatattattgtaatattaaatgttgtagatatatgttttaaaataaaaaatgttatccatataattaaaactttaatcatttatttatgagagggtacataaggaaaaataatttctagttggtatgaaattgcttttcaaatcattttatttaggaaaagtaattatttagtttacatatatgaaatacaattcctatgaaatgagttttccaataacaataaacaaaccaaacacttgaatgatctttctttagaaatagcaattccattcctacactcattcatgtaatagtatgctaaatctggtgttgaattaaatttttgttaaaagttgtgctaaatttaatttatattaaaaattttactaaaattgacacaaagatataacatcatgccaaattttacacaaaataaatataactttttaattacaattttttccattagtcattaatgattagcttttttgatatgttaatgatattttacttttttgtcataatttgcatcataaaatattattatacattcaagtacaataacaaatataacatttgttaatttttttttgtacaaaatttaatacaatatttaaatcttacattaaagatagtctagatgttgtgatttgtaaattgtccaatgcttaaacatttaatgatacctaccactcaaacatattaaggtaatacatataattaaaattgctgtaaaaatatctacattttgcgtaaatttaatggcagtaattatttaaataagtttttatggttttttatttctaaattgaaaaggtaaaaatattttcaaaaatatgttaggtaaaattaatgtttgattttattttttaaaataaaaatcgaaacttgagaagcagaaacaaattattagcggcaaaactactgaaacttttttttttttttaatacgcaaccacataagctcaatttttgacgataaaacttgttgaattctcattccatttcgctctttacacttctgtttaaaaacttcagttaagtgctacagtggattgcccacgtgtacacaagtgtacatgtgataaattttttgtggtccacgtaatattaattattaaaatattataaaaattataaaaataatttaaaaattataaaaaataaataattatataaaaaatttattttattttatttcttttctttttcctttttccttccttttctctttcttttcttcttcttctaaactgaacaaaaaaaaaaaaaaaaccctaggtcatctccatctcattaatcccagtcccagctccagctgcctccccctctctctttgttcctctctctcggtacaggcggaaggccagtggatggctggacgcacggtcaaatcccagccacaatgattgaatatgatcacaaaattacgatcctcatccttagcttacactttctctctggcatctcccctatttctctttgtttctgtctctcaatccaggcgaacggctagatagacgactgagtcccgaccactgtggttggatatgaccatgaaatcacgatccccatccccacaaaaaacccaagatctctctctctctctctcnnnnnnnnnnnnnctctctctctctctctcgattaaccactcatatttttctctcgttagcggagaagacggtagtgctggcgactcagtcgcatagagagagggtaggggctagctctattttgttttgtgttcaatgatggacaggagtaggcacttccaatgtcgaaacccttcttcttctttttcaaacagtttccacttcactgcctccagatcctcaaatcttgctccgtctacccctaaatctagtcccaataccgacgataatactctccatggatgaagcggacctagatgctccgctcaacaaggaccaaatgatccaaatgacctttccaatctttccactattgttggctgtgttcgagtgaatggaaatccaaaagaaaaaaaaaaataaaaagaaaaaagaaaacaaagagaaaaacacaaaaaacaacaaaaaaattataaaaatacggtctgtacgaagttttcaatatttttacgggtttagattttatttacataaaatacgatctttttagtttatttttatgttgtactcttataattttattgttgattttttgttatttgcatattattatttttttttatgttgttttaatgttgttttgttgttatttttttgttactttcatgttgttttcttgtatttttatagaatatcgtaaaaatgtggaaaaaaaactttgaatattgtaaaaatgtaaaaattttttcaaaaattgatattttatgtaattattccttaaaaaaattaatcctagaattaattattttctcttcattgttctcctctcttattcttccacccacatctctttagggccgaccctgggtctaggtggcctaagaatgcgctaggtctcacccaaccaggggccttacaaacttttttcatttttaaaactacacatttttgtagtaattttgaaaataacacatttttataaggtaacaataagattttttttcctaaggtccatcgaatctcaagtttggccttgcattcatttgtcggtactttttttttt

SEQ ID NO: 25716 - DNA, 3156 bp, Cannabis sativa
atccacataattattaatatttataacatctataacttaaataataatttttggaaaatattgttaataaatcgtgaagtgtcacctctagatggtgttatgtattattagtaattaataataatattcttgtaaatatgtgcgcatcagcaaagtagtccaattcatatcttttttttttagtgtttttcaatgtatagatcgtgtgtattgacatgctaatttttttaaaagataggttcaaaaattttgtgtatgttcagattcatacacaaagatttcgaacttatatatcattcaaaaatattggcatgacaatacgcgcgatatatacattgaaaaatactaaagcggaccatttttttaagaaaataagctaacctattttttttatacgagttctaattcatgctctaattttttacattttttttacaattaacaaaaataattactaaactatatgtatttttttataactttaattatttatatatatttttttaacaatattttataaacaatcatataaaaaataatcattataatttaaatattattattaataaatactcatatttttaactcaccctctaaaaaaaattaatatatatatatagttttaattttatatgtttataataattttaattgtagaattataatagattctatgttatatttgagtcttattgtagaattataaataattaacaaatatatttattattattatcaaattataagtataaggttttttaacgtgtacttaagcccaaattttttatgtcgtgtcatgttaatttgtagcatcgtgtctaagctcatattttttgtgttagattgtactcgtattttccaaactcgtgctagtttcattctatctcaaaaagtgattgtatttacaacactacttatatatattcgaaaattatactgtatgaaagtactacttttggccctatcagtagaggtattttcaacactcagacaaagtataatttttttttcatatgaatgcttacaatatttttgttatagctttatttgttttcaaaaaatttagaataatttacctgtaaaaaataagttaaacacaatcaattgcatacttgtttgtatttttatcgacgtgcatgcaataattaattatatatatattttaaattttttttctggtataataattaattatttagatttttattaaaaatagatgagatggttattatataaatagaatgtagacaatcataaaaatataagttttaatttcttcaaatactaaaaatataaatagaagtgctcatcaaatcagtggtacaagcgctgtctgcttacactatgaatgttttcctcatatcggttggtatctgtcaagagattgaacgatcagttagcaagttttggtggcgatcaaatactaataaattcattggttgagttgggataaactctcgaagcacaagactacgggtgggatggggtttcgtgattttcgtgattttaaccttgctttactagctaagcaaggttggagactacttacttgtgagagcagtttggtggggaaacttttttaaagcaagatattttacaaatcgtaatttcctttcagcatctttaggaaataacccaagttacatttagaggagtatattggaatcccaagctttggttcgggcaggggctcgtagattggtgggaagtggctcacaagttaatatcctacatgatccttggttagttgatgatgctaatccgtatgttgagtctcggcaagattgtcttgtgggaaaaatggtgaatgctctcataaaagtgggagtgcgtgagtgggatgatgcagtgttgaaggatgttcttactgagaaggatcaagaaaaggtgtggaaaattcctttgattgatgaggccgagagtgatgattgctattggagaaaggaggctactggtctgtcctccgtccgaagtgcatatgctatattgcagcaggaaaaaaccagcaacttgcaaccaagtaattcgggtgcttggatgaagttatggcaacttaaacttccccgaaggtcaaagatttcctatggcgtgtgtgtactaatagtcttcctactcggtttcaactaacaacgaagcatgtgcccattaactcttgctgcccgatgtgtaatgctgctcctgaaacggcacttcatgtgcttgtccgatgtgatttcgcaaaaggatgctggaggcaggttcgggttccctctgttgctactgctgccatgaccttttgtagctggtgggaagaaggattgggtgtgtggaacatggctgaatgtcttgaggctgggatgattctatggtcaatttggagagttcgaaatgaggtggtttggaatgcgaaacatccttcgattgatgaagtgttactattggcaaaactaaactttgatgattggtataatgctcaaaaccaagaattaggtactcctaatgaatccaatcggattcgaaatgagcattggaccccccctatttttcctctattcaaagttaatgttgatggtgcacttttctcggatgttggcagttttggtattgggttggtggctcgaagtgcggttggtacggtcattcaagcgaaatcttttaagaaggccggtgcatttcaaccgcatgaggtggaggccattggaataaaagaagctctaagttggattaaaaataataattggtccggtatgatcgttgagtccgattgtcaaagatttattttggatcttcaaagtaataaaaatatgacctctccttatggtcatataattttagattgtaaggctcttttggccactcttgataatgtttcttttaattttgttaagcggtctgctaataaggttgtgcatgctttggcgcgatcttctcttacgaaggctgaccgtacttttttaggtgttgatttacctattgtaatttcttccttaattttggagaatttgagttaatgaagtttctactcaaaatataaatgactctattatttggacaaaagacccttatactacagttacctcctttatatatacattaaacataatttatgtatattaatacatgtaacaaatgagaggtattatgtgtagttatttgtagcgtagttattaaattaag

SEQ ID NO: 25717 - DNA, 4585 bp, Cannabis sativa
  modified_base (148)..(162): a, c, t, g, unknown or other
taaatatcatccatttgatcaaatctaatggtcaatagttaaatacacattcatgggtaatacccattaaaagtacacccatatatataaatatatggaatatttttcaatgagtactatctattaatagttactaaacaaatttaannnnnnnnnnnnnnnttaaaaatattaaattattagattttgatccaatgacatataataaaagagacatttgaatttctatgcttaatttagctacttaattaaaaaaaaaaagtaaaaaaatattttttttaacactatcaaaaatatgtttattttatctgtgttcctggcaagcgacacgtggaatccaagtcagcatcaaaggcccaccagtgggtctcaagaaagatagtgtgggccaaatccacattatctaggatcttccaaaaatatattttagctccatgaccaaatgatcttccgttagtgatagctcgtatccgaaaggagatccagtaccgtgataccagaagagtcaaacagtgtgttcttggaagatcagtctggtttctcttttattcctacgcacaaataagaaaataaatactcccagatctcgacagaagatcgtatcaagctaaaaggagaaacttcctaaacaaagatcaaacaattaattcacgattgattacccataattatagaacacgattttaactaattcaatcgtatctaatctacctagttagcatattatctccttcgtgggatggacttcacaagacagctcaagttatgtaattaagtattaactcccgaatagagtgaaaagagaaactaagtgtaatattataattactataaataccaaacgaattctacggattaagagttgaattctctggtaatatttgctcacggaaacttgagaacttatgctccttgtattcccaaaggcttttcaagctcaaagttacataataacactgactcgtggactaaggctagttaacaccccaaccacgtaaaaaatatttgtgtcgttcttactctttttcttttaattatttatttcttcggttctaattatttataattagtttttctaaaatattttggtacttttattgagctgaatgaagcagtgatactagctagagattacgttcagtaatcatggtactcacccgaacaaaatttgatctacactttactggtcctagcaccaaagtagggagcactagtgatccacatgaggcgactagccatcagaaacatcaatgtgatgaagatcagattcgagacgatctcataatcgaagatgtagagtcaagagagaatagttttgacgatgttgaggatgatccccatgatttacccaaggatgcacctgaagatgttcctcaggacaagactgctagagatgatgttggagggaaggaccgacctgaaaaattagaccacatggtcattatggccaaaaaagtttagttaacagaaagtacgttgtctcatcaagaacaattcaacgagatactggtcaaaaagttgacaagaattgaggccgtgatgacacccatgaccaaaggaactcctgatgtacaaacacctccaacaactgatgctcctaaaagagtttatccaaaagatcctggaacctcaaatcctcgcaaggataaagggaaatggatagccagtgaaacttcaaagaagactccttcagccaagcagcaaaaaaagtccaaaaatgtcaaccaacctcaatagaaaaaaaaaaggaaaccatgcttcagtacatggtgacaagactaattttagaggcagagtcacaaaagaataagactgatgccagagtcaagaagcctgaattctagaatgacaaaaatcaccctagtgatgatagcaatcaagatgatgatgtcgatgaagtatacccagtttcatatggcaattgtggaagtctctcacaaatgatcttcgaagaagattgagtaagaaaaagaaagagccaaagttgaaaaagctagaccccgtgagaacgatttgagaaatcatatagatgattgcattcgcggaagagtcttcaaatgacaaaacttaacacctggaatgcaaattcgaggagttgatgaaaatcacggagaagatctctagaaagcaaaacggtactgagtcaaattttgaggaggatgatacagaagcctgcgtgaatagaattataaatgcactactgccagagtgtttcagaatgccttagatggaactgtacgagttaggtaagtacaaccgcattatgcaagttgccaaggccagtgatgatgcaaaatacttttgcttcactaactttgagtaagtccgcgaaagataggtggaaaagactatctctaggatccatctacagttgcaaggacctggaagcaatgttcaaaaaacaatttgtggcaatgaaggagttcgatctaaaaagttagctccctgaccaatgtcaatcaacaactaggagagaacctgaagaagtacattcaaagtatgatggatgtagcagcaaaaataaaagttactgatgaaatgaaggtggtggccttaacattaggactagctactagatttttgttatgtgaagatctccaatgtaaaagagtagatactttgacttatttcctagcaagagcccaaggattcgtaaatttagaagatgcttatgcccacgcatacagagtacttccaacactttccaccgatataccaaatgcctaaacttcactgatgactgctccatcaatttttccttcggaaactacctttacgactccaacggtttacggaccaagtgcttttgcacagccagttgcacatgctagtttttctaggtttgaagttgtacaagctagatacagtgtcgctcccacacaaacaaaccaaaaggcagaagctccaaagtccaacgtaacacaaccatggagcaagaggagttcaaaaggtctaaactggagtgtttctgaaaagaaaggaaatacccaagggccaagatactccgagtacacaagtcttgtggatactcgagagaatgtttataaggctacttgttacatggtccattacaagaaggctccgccaatgtgtaagggcagaggataaaaatgagacccaaacaagaggtgtgaataccacaacgatataggacacaccaccaatgagtgtgactatctgaaggaataaattgtaggattggtacaaaacaaacgtctgtcctattaggtgagaattctagtcatttatccgagacagggggttgcacatggaaaaattttcattccgagatagcatggagccattaatcctcctcagtgtaggccatccacaaactcctagaattcaagcttcaaatgcacaagcccttcagtgggcacaaaatgctttagcagtgagaattgttatagcccccgatcctggagacccatatcctcctggagtagcctagcctacattagatggtcatgtagcaaccatttttggtggaccacatactgctagaagcactcgaaacacacaaaagaggtacttgaatgaattggatcaggatgacacatgtaacttggtacggtcacctgcacaacgtcctcgaatgatgaatttaccaatgaatttcaaagaagatgatgccaagcatgtgcatttccctcacaatgatctattggtgatagaagcatagatatcgaatagaagagtttctaggattctcgtagataatgtaagttctgtcaatatcatttttaaagatgccttcaaagccattggtctggtgacagccaatctgttaccttgtgcaattcaattgcaaggcctcaatggagacacgctggtcctaatgagaaaaatacaacttccaataacaataaatggagaagtctctggaagcaatgcaatatcctctttcaagtacaacacttttgtaatatttgattgtccaacagcttacaatgttattctaggatgaccatttctggttgattttggagagtgacgtccatccgccacttgtgcctaaagtttcccaacaataccggaagcattagaacaatttgaggtaattagaaaagtgccagaagctgctataacatttcaactaagatcattctcatggtccaggtcggaaatgtagcagaagctagaacatcttcccagctagcactggggtggtccaagaagaatatgtgttagatccacatgtaggcgtggaacgaacaataaaaactatggaagaggcaaaagaagtaggcatcaatgatgaagatcccactaaagttattagagtggggaagaacttaattctggcagtgaaagaaaagattatttccataatcaaggaaaatagtgatgtattagcttggagtcattctgatatgactggaattagtccccgagtgatttgtcatatactgaatatagatcccaaagctaatttagtttgaccaaagtagagacctttagacccagtgagattggaagcactgaatgctgggttgtctgccttaaataaaactcatttcaataaaatcatgtttactaattaataaaagatcaaaaatcgttttatgttgcatgattgacatga

SEQ ID NO: 25718 - DNA, 4612 bp, Cannabis sativa
ccgcctatccactggagaaggtaggatgccaaaatctaataatgtttatctgttatcatgtcttaggcatatcctcttatacttccatttatctatgtcatggtctaaatcgctttcataccatctctctttatgcttgcatattctacaatttgttttacacaattatggaaggaaagttatgctactaaagttcttacttttggcggagtaggacttgattcgttcagccagtgtttcaatctaagcatgaaatataatttgcttaattttgttgtaaatatagaggcattcttacgatctgtcctagcattagagtcgttaatgtcaccgctgttgaaaattcgtatcttgaacatcaagcatatagtcagttcatagctgttagtagtttgagttccacttgaattggatttacctgtatcagcaagtatgatgtatacactttaattagtcaggacttcggaatgtaccatcgaagtaagcacaacaagcctgtagagtacatatgtcgattatattagagacttgatgcttaattgaaaactttgcaggtgacagtggagagccttagttatcacaagtcttgcttcaagtgctctcatggtggctgtgccctttcaccatcaaactatgcggctttggaaggaattctgtactgcaaacaccatttctctcagctcttcaaggagaagggaaactacaaccatctgatcaagtctgcatcgattaaacgggctgccgctgcagcctccgttccagaagcagaagcagaagcataagctcatgaaagaaaaagaaaaaacgaataataaaagaaaagaaaaaaaaaaaagaaacaacaaaagagaacttgtggtgtggttacaatgactttctttctatcgatttgagagtgttttcattttattttattcatctcaacattatgatgctctatttttacatgatggaatgtaggagtggcaaaacttggctcttctctttttgtcatgtatggctaaaggggtctcactagtgttgggttgtggtgtttttttgatgttgttgtatgggaatgggatgttgaaatccaacggttgtaaaatgacaattcaggacctgagatgcaagtcgtgttgcctttttcataaagacatggaaacacccgagtcaagccactttattcttttatcacttctctcgactcaagacgtgaactccatacatatacatacgtgcttatgtattataatatttatagttcaaacaaaatcaatttttttagtcaaccaaataaatgggagatgaggctgtctcatgttttttaataaacaaaatcatatttttcatgaatagatgtgacattttttggtaggcataattaattggagaaatgtttgagattttttttcttaatttatttttgttacctattttttttttttggaagagtgacacatggcgtttaatggaggtccaataaatattggtttagttattaggaataagaagactagcatgatagttttcacccagctataagggtattcggatgacatgttttgattaggtttgagactccagttttgtaactctcaaatgtagcactgcgcacttagtaaaatcgactagacttacaaagatctcaaatcaaataggagtacccttagggctatccaggaaaggcgcactatgtaaaatcgactagacttacgaagttttcaaattaaatgggagtaccctcatcgactagacttacgaagttttcaaattaaatgggagtaccctcaggaccatccaggaaaggaagttggaaaggtgcacatgacaccctatgatcacaagaaatttagggatctgtcccctctactgacatttggaaaggcacacaactaaaataagataacctttttgaggattacacctcaactctgacatgttttttcaaagacaatatgcgacctcgtttctcactatcaacagtactacacactgtatggtggtttcttttaagaattgggtcttacctactcggcctaatagattaaaataatgttcaaataatgtcttttactttattagtgagcttttctcatagaaaaccctagttaggcatggatctgtccaactcaattagcacgactgcctataaataaggcattatttcttccatgcaaatggttcacaaccttgaaaattcacaaagaatattagagttgtaaaaactctattgctaaaagcttataaaattgcatcgaggattaaggctcgttaacgcttgaaccacgtaaaaattgtttgttattttcttttctaatcatttttctttagcttaatctcttgaaatatttagtttctaaaacattttgataaaaaattttgtagaatgatttttatttcatatctctccaaataacacttatgcaggctaagtgttgttagatatattttaaagggtggagctactacttatttatttatggaaaatatgtaaagtgtattaatttatatatatataatagtaaaaataccatttcaaatatttattagtatatttatacaatttctaaatatttgatcattaatataaataaatgtaagaaataattgtggcataagcacccaaaatttgagtttttttttttttttatgtttttttgttcattgcgtcatgaaatcatgaagaagctgcaataactcaaaaagagagcggtgtctattgtaactaacataaaattaatgatcttttaacgacataaatacccaatattagtaaaatttgattatattatttgataatataattaatagattaaattgtgacaaatattttagtatgaaattattatatataaaaatcttcagagattatattatatgatatataatgtaataaacacataaagttgtaacatgaggagttactaatctaattatgagttacataacttatgattcacggttgataaagatacaattaagttagtaattgaatatgggagttagaaaatcaaatagagatattttcaacaatttcaaactatcaaaatattcatttacattagttaaatgagttttggataattgagtgttgagttggttcaaagaagagctttgaagctcaaaatatttatgtgctgaaattgtcccaggcgacatgtcacttgttattaagagacatgcagcttaaacatgtgatagagggtttttcaacgttattcaatgtatctcgagggttatatggtttagctccaggcgacatgttgcttggagccatttctaagaaaaatattgcaaaacgttgagaatttatgggggcgtttctatcatcaatcacaaatattcttatctccatttaatgtcatactttgattggtaacatccatgtcatgtgtgatatcaaatgtgaatcctaaagactatataaggaggtctaaggtgcttatttgaaaacacaagtttttctatcaaaaaatcactttgttagaaaaccataaggcttgataattctcaaagctatttcttagagagttcccttaatgcttaaagataggaaaaataagtttttgaaaagaaaaagtgataatacattaaagtcatgatgatctccactaatcgacactcaaagttgtgcgtgagtgtatttcttcttctttttatattatatatacattgtgttatattacatgtgttataattctcttaatctacttttcttttgtatatatatatataatatatatagagtatatatgtgttgtaacatatatttattcaataaattatattaacatacaatagagttgtaatacatattaattttttctattataatgaaatttttaacaaaccgtaattttcattcaattttgttagtacagaccccattttaaattaattaaaagaagacttaaaaataactgatattatatatttctgtttgcattcaatgatttagaaaatgagtcttatatgttggtaattaggaggattttacaaaattcaacaatgaatttcacaaaatgagaataagcaatattatcaagagagttctcaaactattgacaatggaagattaaacataaacatacaaaaataaatattaaagataatcaaatttgattgaggaatcaaaaattaagaggcttaacacatttgaaatcaatgtgctattttatttaaatttttttactccaggcctcccatggatttataatggcttcttcttctttggaataatatttggaacttaaaaccttcattactataataaatataccattctcgttggtctccaaattagtatttttttgaacaaccgttactaaaaatttctaattattcaaaactgtcggctatagtgaagtattcctgacagttttgaacaggtggttaccattccaggcaatttagaacgattattgagaccggaattgaaaaaaaaaaagtgttaaggaaatctccgacagtttaaaacttttgggtatactatttccaacaatttgaaacagtttggaatagtatacctgatgattttaaaccgtcggtgattcccatttaaatataaaaaagcctaattattttagatctcatattttatatctaagatctctctctctctttctctctc

SEQ ID NO: 25719 - DNA, 3027 bp, Cannabis sativa
  modified_base (338)..(338): a, c, t, g, unknown or other
  modified_base (398)..(432): a, c, t, g, unknown or other
  modified_base (527)..(529): a, c, t, g, unknown or other
gttatcccaatttttgcactctgacgtggcatcacaagatggtgacacgtggactcgactctaagtatctgctcctagaatgtactccaaataggatgcctcatatgcatactcgaagcaaagcgatcagcaatccgcgcagagcgaccaacacttagcgaattcagcttttgcatcgtgagtcatcaaagaaatccctatagcttggggattagattgtagagatatggcaagctgtccaaatcccacgatcagtgtatgttgtatttattatgcaatctttctgcttatatccattgtaacgagaagggacatacttcctctccaagctcatagcnctataaatagtgatgcatgttcacagggcaaaagggtcgaaagattttacttaagagatnnnnnnnnnnnnnnnnnnnnnnnnnnnnnnnnnnnaagagctataagaaaaggaactttctacttgttcttgagttaatacaaataatgatgattaggctattatcgaactgctcggggctgaacctctnnnaaattcctgtgtctttatattgctttactatatatcaattgttataaactacttgttgcttactaaattagactcactgtcgttggctaaaagcgaggtcaacagatctctttgattccatttaaggattcggctagtagttggtggttggtttgctcatcgaatgtaagtcttcaatgagatggaggtgtgagctctataggtatcatagctttgtactcgtaggttagagagacggttgtgtgacctattactattttttctattgtcccataggcccatagtactttgagcagttgtttaggccaattccctttatcttgctccaagcatttatttaacgtatctttcagtgtttggttgactgtttccacttgtccattttcttttggataggcaaccactgagaaactcttaatgattccatgtctgatgcagaaatcaataaagaggttgctgtgaaactgtgttttgttgtctgacactatcatctgtgggagtccaaaccgacaaatgatgttcttgaccaaaaaatcaagaactttgtttgatgtgatggtatctaagggctctactttgacccatttggtgaagtagtcgaccaccaccactgaatattgaactcctcctttccccttagcttgtgatcatatgtggtcgattccccagattgtaaatggccagggtgtttgcatactattgagttcgtttggggcaactctaggtattttagagaacctctagcatttgtcacatttttgacataatccattgaatcttctatcattgtcgggcaaagtatccttgtctaaagatcttctttgagaggctttgcccctagcattgttgccacaaaagtcctcatgtaccttgaccatgaggagtttgtcttattcttttatgcacacctcagaagtggcattgagaaacttcttctgtgcattacttcgtccatgataatgaagcaagctatttttctcatcagtctcttagcttcatccgagtcagttagaagaataccttattctaagtactgtgcaattaggtcatccatgatggagagttgtcactcatcaagataggcttcaaatcttcatcaatgctccatttggtgagttattcgacgggaactacactaagaatgtcagaatctatagtgctagccagtttagctagtgagtctgcattggcattatgctcacgcgacacttgttggatggagtagggcttaagctaggctaataaatccttagtttttcttaagtatgaaatcatgtttcacccttgggcttgatactcgttgagaatctgattaacaactagctgtgaatcagtatagatctcaagtgattcagctttgattgttagtgccaatcatagtcctattaggaatgcctcatactctgctttattgttggttgtggtgaactcaaactgcaattcactgtgattttgaaatccctctggtgtaactaagatgagtccaacaccataaccatgcttgttggaggagccatctacatataatttttaggaaggtctagtgtcctcctgagctgcagtctcaagcgtgtggacctggtcttcacaaatcatgggatcatcttcttcgaggctagtgcattcaacaatgaagtatgctaatgcatatcctttgattgctctttaaggctagtaggtgatcttaaactgacctaattcaacaacccacttgagtaggcgccctgatgattttggcttcatcagaacttgtcgaagtggttaatcagttaacaccttgactgtgtgagcttggaagtatgaccttagctttttggaggctaggaaaaagcagtaggctagcttctcaatgggggatatcttgactcggccccagtgagacacttgccgatgtagtaaacaaaatgttgtgccccttcttcctcatgcaccaaagcagcactggctgcatgctcagtgactgacaagtagatgtatagttcttcaccatctatttgcttggataagatgggatgtttggctagatgatgtttgggggcttggaagacttgctcgtaatattagtccattcaaacgccttgttgcttcctttaagttaattaaagaagggaacacacttgtttgttgacttggagacaaacctgctaagtgtagcaattcatcctattaggcttttcacatgatgttgaagcacttctctagatctttgatgtagtcttcaaatcttttcgacttcactagtatatcatcgacgtagacttctatattgttttgaatttggtagtggaacatatagtttactagtctttgataagttgcacctgcattcttgagtcctaagggcattactttgtagtaataatgcccaatgtatatttggaaatagtatgttcttcgtctggttgtagccggaataaatagccatgaatgtgaggagttcatggccggtggtcacgtccacctgttgatcgatttgtggtagtgggaaataatcttta

SEQ ID NO: 25720 - DNA, 3185 bp, Cannabis sativa
  modified_base (3128)..(3154): a, c, t, g, unknown or other
tttcccaactgatagatttgaacttgtaaagtcaaatcccatttttccaatttaatttggtctgtaatttcatttggcattatgacaatttctttttttagtgcatttctttcaactaatttgtcaatttaattttagcagtattattatcccataagagtagctcaaatggtctgatatgatatgaggtttgagtcatactaatactgaaatcaatattctgctccagagagagagagagagagagagagagtaggtaatattatcacatctaaagtggacaactgaaatcaatcactctattctctatgtacattaaaactaataggaaatcataactaccaagtaggcattttcaaagacagagaactagtaagtgaaagaaattgacaaacaatgttacaaatcaaaataaatgtttccaagaactaagtttcctgtttattatgttggtactaggtaccaaattgaagagactcaagtctcaatgatcttgtggaagaaaacttcatctacgttttgaactacatagacaaaacaaatttatatttggttccaatagtagagtgtaatgtatatgaactcatgaaggtaataccaattaaaattttcaatttaatttgttttattatcacatctacaagtagaataaagaatggtcgaaaaagtactatgaaatcttgtaagtagctgtattaaagaaaccaaatggaccatagaaatcaattaatctatatacaccgtgaaaatgtatcaaatatgaatttgcttaaaactaaaaggaaatcatgactacaagtgaacattttcaaagcccaaaaactagtaagcaaaagaaattgaaaaacaaatgttttgtcacaaggtaaatgtcttcaatatacaatgttgggagagacaatgagcaattttggacatcgataacttggttgccaggaattaagaatacagtttgaacaagcttagacggttgaaacttcatagtatcagatattgacaatgaatcaatcgagtcaaaatcttccaccactatagtgagaacaccccattatcagatatccgttcccaatcactgcaaagaagagaaaatgttgacagtgaaattacgttgagtagaagcacagagatcaaagccttcaacaaacatttaaatggtgaaaaggtttactgtaatgtaatggttggcttcagtttaataaccaaaaaaattcttcactaattacatttcaaagcaattacattaatattttttattattattatttttctgaaactaggctcctgcctaacctacattatctgagaccaaaaagctaaagcaattgttatgaaggcgccctggaaagactagaacttcaaactttgtgggagcaaactattatagatactacaaatctgtttccttgatcacaaatgcatgaaaaggccaagtccttttcagataattgatctaacaaaatacaactgcccatgacccaaaaatgcaattttattctcacacaacttggtttcactacaaaaccttaatgagttactaaatttgtttcctcattaacatgactaataacatttcgaggcacaatcttgtgttcttgatcacaaaaacatgaaaagggattgcctattttcagataactaagggataaaaaatatgctgtgaccccaacatgctaattttcattcccatacaccttggtttctctaatacaaatcatgagaaacacaaaagagtgactacatgtttatcctcgttaactcaacaaataacatttcaagacacattcttgagttcttgaacacaaatacatgagaaggccaaacctattttagataattgtgatgaaaataaaactgcctgtgatctcaaaacgcaattgtattcccatacagcttggtttcactaatacaaaccaacagaagaaaaaaaaagtgtgaccaaacacgagttttttcagaattttttttttcctcattatcattgcaagacacaatctttgtgttcttcgtcacaatggcaagaaaaaggccaaatctttttaaggtaaagtgactaaaaagacaacatgcaatcgtattccgaaacatcttgattttactaatccaaaccaccagaaacatgaaaagagtaaccaagctcagttgggattttcaccaaaaacaaacaaataaataagaaagctcactaggaaaattagcattacaagttaaagaaatttatacaaaagaagaagaagaagactcacctcatataataaacaggtcaaacaattgtataggtaccaggagaatcatctgataactgtccataaggggattgttggtcatccatgactagatcgtccgtactcctaagcaaagcgtgcaacgacgccaaaccagctccaatagcaatcgaaacaaaaaagttgagccacacgtgggtcatgaacagagccaccaaactaaccaccccaagaaccgccacgacgattccatcatccacagtaacaccggcaacggtgagagggacgtcgcgagaaaagtagaggaagatccaggcgacgaagacgatcaagaagatgactagagaaaacgggtggaagattaggctgaggaagaggacggccaagaccgccatggcgtagttgaatcggaaatgagtcaggttctgggcgagcctggtggtggcgtccgagacgctggaagggaagctcagtgcggtcgggtcaaagaactctccccatggtcgccgcgtggccatcgctgactggccggcttctctcaattgggacgtgagtccggtggtttcgccggacattggagaatctctggggcgaagcaagggcagaatggtaatttgggcgtaatggaaaccctttttctgagagttattggtaatgccgttcgtcaaagtcaactattgtaaatttatttgataggcttgggccttcgtaacggaacgacgaaaacgacatgaaaagaaattgattaaacaaacgacatttcaatgaaaatataatacgacaatcttagtaaaacgagactttcaaaacggcaagcgtctcactattttactatagtatatttgatcatatagattttatattttggattgaaactatagtaataggaatggaatggaataaaannnnnnnnnnnnnnnnnnnnnnnnnnnaaaaatcattaaattttttttcttgttacat

SEQ ID NO: 25721 - DNA, 2103 bp, Cannabis sativa
tcttttgataaaccatatctttaaggaattgaaaagggttcccaagcccatggcaattccagctcaatatactcataatgattggcgaacccgatcaaacgagcccgccattgaatcgttttttgattgagcacccttttcttggcccaaaatcccactactttgctccttaggcccattcggcccaatagccacctctttacccattcttttccttttagtatcaagaaagagcatcccttccgcatcaatctccaaatcagccacctcattttgtcctttactacctattatatctactccatcatatccaccactattcattaatattcttgcatggccaccaaccgaatccctattcccatgcaacaaactttgacccataatattaggaaacaaaatctgccgactgccccgaatatcagggatatcaacatccctttctcctttcggctgtggcactactggagcaccaaaacccccagcaccaaccgaagccgaccggagccacttcgagcccatagcgtactgtgtcatccgagggaccgctttcatgaacgaaccatatgatttgacaatagaagcaatcggttggataaacaatctagaagaatattgatcggtgtggcctataataccacaaataaagcaaaatgtaagaacaaactcataacgaaaatttatccaaaaccactcaccgccggtcaattgtagcttcatctgcctcttcaatggcttctcaatatcgatccgaacccgtacccttagatactccctccaaacaccattgaaattattctcatcggctttaatgaaaattctgatgtagttcgcagcatccaaaaacaccctttccgtcttaaatcctgcctgaatgtcatgcaattgaacccagagttcaagctggtgcaatcgcaaagcccgcggaatatcaccagttttcagccgctcaaagatcaaaggagcgttcttgaacgtccaagggctccgatcaataaccctatgaatatctatctcatgatggaattaaaaaatatatctattgccacccaaatctttcacatacatgcccatacctggcttccaaagaacagccatcaagttttgcattgccataaaatcgatcgggttgtccgtaagaaaccgaccgactatactccatcgtgtatcaagctctgcatcatcgaccaagggccgatcatattgaaccgctggctcctcttcctcctcgagtgggatgatcgacagcctatcatcaacgtcctcagtaccatacgacgttgccatctgaatatacctccaaccagaactcaacaaaaccaccgaaaaaatagagacagaccacaataaaacaaccaatcaaaaatcaaacgaacaatctcaccatgtcaatagacaagacaatccaccatagcttctgtatatcaagaaaacgaaaatcgatataatccaaaaaaaaaaaatatctcttaaaaaaagtagagatttaatctaaacaattaggctaaaaaaaaaagagagaaagtccaattccaacaaccaatccaatacaaccattattaaagctacaactttcgcctaaataacagtgaaacttccttgagtccatcttaatctaaccaagaaagtaaaaattgctgctagaatagttgatacctagaccaaaaacaccaaataaataaatttagtaacttcataaataaacgttaaaataataaatttagaattatgtcatataaattaataatatagtaaaattttgaagaaagagaattgtaataaaacttattttttgaagttcttgcatcttgtctaagtaagtaattaaaataaaaatatacctatataaaatatataaaatttaattagtacactacttaatggtaatattaaaatgagaatttttatttaaacgaaaaataaataaataactatttaaataattattaaagagctcaacctaaatgtgttataaattcacacaaaatttatgattagtgacaaactgtgtacgtgtataaactagtgttgtgcatgagttgaattaggtacgttgaaggtattttaatggaccaatccaattgggaaatttacacccactac

SEQ ID NO: 25722 - DNA, 5265 bp, Cannabis sativa
  modified_base (4603)..(4608): a, c, t, g, unknown or other
aaaaaataaaaaaccataaaaatggacaaagttaaattcgccacatttaaatataaagtttttaaaatctcacattaagtgtggtttcctcattctttttcctgcaacaaatgaccaaatgcaattatatgtgggaaatttacacaaaagcacttaagaaattagtagtggcaaaacagatttggatacaatatataaatgtgaacatgacatgatttttatgggttaaggttgagaaaatcatacatgagttgacatggaataaaaacgatttcaacacgacacgactcgcttaacacaaatatgacacatttgacacaatttttttaatttaaacaaagtaaaaaattattaataataatataacttggtaaaaatgtatatttagttattcaatgtggatttaataaaaatttaactttaattttctttaaaaataaattgaaaatattttaaaatttaatttttattataaattaaaaaaactatatataaatagtgtattttctaataaaattctaaatctatcattttctcagtgagtcaacatgaacatgacataattttttacgggccaagttagggttaagaaaattagacgctgatcaaaaataaattgacacgcctgacacaaaatatagaagtaaatcaaataaaatataacacaaactcgacacgttttgccaccagtacttaagatcacatttattttcactttttcacagatttttttttacctttttatagattttttcttttatttcacatgcgtataaaataaaagagtctcgagtgctgttctatttgaactttatttttcagcgtgtcaaattttctcgaatctctcaaaattttacataatatcttaaataactacaacataaacgaccataaaaaaattagattaaaaaattgtcccaaatatcgaaacatataagggaacattatgaaagaatgctataacattttgtattgacaaggaaaaaaagtctttgctaagctaaattatctcattcgactataaacatttgagagagttcaacaacattgttagaattggtgttttataacttacacacacatatataaatcttcaccaaataaacatacccaaaagaagcatatcctataaacagagtgaacaagcaaacctcttcttctaagttgaattacacaatcatcattttgttggaggcaaattcttaacatttgagatctcggttcgcttttggagaaagccacctgcaaaagtaaagtactgctgataggaactcatatccgaaaatggctattaagccttctctattgatactcaaaaaccgaaaaatacagaaattctagaatcccttaagcctcccgatgaatttccacaattacaaaataattccacaccacaaaatataccccaactacactctagcataacccctctaattagcttagtctatcactaatcaacagagtagcacacagttctataatccacaacaaaagagtagcacataacttatcaatcaagagcaaccataccttataaaccaaacaaagtagtaaacaaccaacttttacgagttttaatcccaattagggaacaagatttatattaataaataaaaatcatgggttatgatctgtttaagcctaagcagtagaaagaaaaggctactccttaaataatttaacttaccttttcttgatataaggttgattcgagagacgggtccttcaaacatccagttatcgtcatctaaagacttcacctctttgttaagtgcagccattagatctgcttttataactgcaatacagaatatataaatcattcttcatactaaataaaacataagagagattgtagtacttttagggatagttataaagactcattggacaacactactcgatcccagagcagagaccaagctataatatactaatcaaactagtcaatagaactgaattctgtcaatgagaacctttacagaagcacccattcttccaacaaaactaaaatttcaccttagctttaacaaaaccagtgaagtaaaattcacacaaagtttgcaagaatttatttaagttcatgtaaaaggggtttatttgatcatcaaaatataaaacactcgaaagaacctagtaaatggctaaaacccaaaacccaaaatgaaattcgataagtaaagaaaagaggaaaggagtttgaaaaggaagctaaccaagcatggcttcatctttgcggtcttgaatggaaataagatcagaagggaagtagaattcgtcagtggacagagcagcattgctgctgcctccaccaccaccgacagttgctgttgtggaaatcgacgaattcgccggtgatgagctattcatctctctttccttctttctggagagactccaatcagataatctttcttcccttaatagtgcttctatttcttcttcaaagtctacactctagatattcaaatacgttgaagatgatcagttcattaattagttctaagactaatactcttgaaaagatcatgaaataattgataacatagaatgataaatacatcaaagatgatcataaattgtaacattctttttgtttcatgtttgaactagaactctaaatatcaaagatcatacgagaaagtgatttataaacatttccatacgaaatcatctttaataaaagttatacaacaaattatgatgaggaaataattacataattaaacaactcaaaattagggaaattcaatctcaaaataatcaaaattaaacacctgtttggatcttggaggagtgctcaaattgcaaataccaaatccttgctaatgattctgctttgaaatcaaaagtgcccaaaatgaactcaatcccaaaaactcttcaaaattcaaataggcagatcaaactcatagagactttctcaacaaattaaacacaaaataattaattatcgattcaaaggccttttgcaaaaattaaattaaccagattcaatacctggtaaagatttatgagaggagatggtggagatcgacgccggtgatgagcgagagagatccactgaggttgagagccgaagcaatcgctgatgagaggagactgaggcaaagagagagatggaacgattttgggctttttgggccattgatgggccacttttgggccttctaatttttatttatttttttgataaatgctagtattattaggaatattttcataaatacctaaaaatgataaatagtttacaaaaaatattttgaagatttatttgttttacaaaaatacgaatagttatttatacgttgttttaaaaagttaaaaacacattttctttagtgtcgtttattcacgtaagatcgttttcagtcatatttgatcagtctctcacttatccattcaatgtcgttttccacattcttcttctttttttttttttgtgcaaaacgtttattcatttaaggtcgtttactcagttgcagtttttcttatttattgtcgttttctcatatttttgtatgtcgtttattttaattcaagccagtaattaatcatatttttgatattgagatctcaattattttaaaaattgtacaataataacaaatagaaaaaagtgtgatcagagatttctcatcttcgttatgaggattacatttttagatccactagaagacaaattatgagtgatagttttagataatatatcttaatattattattattattattatttcagataggtttttatatatacatgcagaaaataatatatgatttgaaatattaaatactatgaaaataaagggtacgtgtacaatgcatgcatggacgaccagagggtcagaatatacaaacacatttcatgtagattcgagtataatcaattaattaaatatgatcatatatatatatatatattcacatggataataataaattagattaaacatatttatgagatcgcaatgattgaagataaaaatatacacacgcatacaatatacatacacaatacacatgcatatatatgattaagatttctcagttgtattattgtacaataatattgagtatcgattctgatcagaaatatataactagctttggtttttttggcattttacctaatagtatagtagatggtattctataattattagtgattttttatattatttatttaattaataaaaatacataacccaaaacattaaaaaaaaaatacagacaattattgtggtacttgtctgtttacttaagatgatctattaagataattctatatatttgtttttacactttattcttaatttgtttgctttacaaaattaaaatgtttatatggggctcccaagtcccaccatataaaatatgaggtacgtcaaatatatatgattaagtacaatctatattatataatgttgtgtgtagaaaataaaaaataaaggaagtgatatgatcaaactgtatagcagagaagagagaaaaaggaaaacgatatatataataaactaataaattatcaataattaatgctttgaagttatctttccttaaacgcatgtacatagatacaaatatataaaaaatatatatnnnnnnatgtgtgtgtatatatatataacagtctggggcatgttagtagggtctcgtatcatcacctcaataaaaaccatcaaagatactcttctaaaaatcaacctgccacatgctactaactggtcccatttttcttaattaattaattattaataattatagaattaatattatgaaaatatatattttataatcatcaagaacgtacccaactagggtttgcaagtaccagctttacttttttcttcaatatattcatcatctttatatgatctgattattattgtaacattattatgccaatatataaaatctaccaatatcaccatcattatgtgtgtgtatatatataacaaaaataaaaaagagaacaacttgcttatatatataattagagagcttacaagtacaactacccattaaggataaaattaatactactttagaacaatatatatatatataggtagatatataatatatatatcatatcatacgtacacacaatcatacaatacaagcaagtccaccttaattataataatatatatatatatttctagctgtctaaatcgtatattctcccagttacatattccttctctctaattttttttgtctttcttcatagtcaaatattaataatatctatatatatat

SEQ ID NO: 25723 - DNA, 2956 bp, Cannabis sativa
  modified_base (1190)..(1191): a, c, t, g, unknown or other
  modified_base (1989)..(1991): a, c, t, g, unknown or other
acaaaccagtttgggactatcgatctgtccagttttgacagttccctgctttctccttgagcagatggctgtttgtttgctttagtttagtttaagcttctttgtctagtctgttatcttagtttgattagttttagacctttgttttactgtgttctggtatgttccgctgggactttgctgtgttcttggctggttttctccagtctgttttcgttttgttgtctttcgtttttgtgctttcttgaaaagccagtaagtaatcaaaaaaaaaaaaaaaaccccatgatagggttttttagtaattggatcaatgctatatatgagtttgttaatgcagatttttgttaactaaaattaataaggctttcaataatcaatactttacagaaataaaataataaataattaaatttcaataactccagatatttttatgtggttttacagttaaatttgcatactccacgagtcttttttattaatgatattttttgggtacagaatacaatatcagaatgatcgcatttttctctctcattcttcatctctttttctgtggaatttgcccccatttataggagtataggttggcatttttttttggatcagttcaaatataaatgttcatgaaacgtggacatctccacatttcatttaatcacatgtgggataatatctaataactcgccaactactttttgtttttatcctttagacggttattgccgacttggaagatggtacctagcttgtcatgagttatttttcttgtccatcttagaatggaaaaaatgctaagtgttgacaagtaatttgactcgtcacatctcttcatttgagttaatattgcgaggtgactgtctcgctatatgaaatccgaggttgttgtatgtgcttatatttattctgctcgagtagatgaatatcctcttttggtctatgtatatcaaggtagacgtatgtctcgtcaatatcagttcaataattttttttatccttatctctcttaagactatatagtcagcgagttttgaatattttctattaaacctttatttaataataatgagttattttattctacatttaatgatataaaacgttattatatcattaaagttgattcatattctatttgtaggacatgtgtcagcttctgaagtgtagccaaattttgggtataacanntgccccttaaaaagtttttttttaattgaaaagagatttttaaatgattataagggtatttttgtcttaaaccaattttaaaaaattacatgctttgggttttggcaattcagaacttcgaggcacatcattagcattaaatgtctcgtcttttttaattttgtagtgttcccatcctttagatctaatttcttttaatctaacggtgattattctcagggtatgaaatttgaaagtaagtactcatttctccatttttgcctttcaaaccttcaagcccttctgcgaaaattcatctctgatttctcatcaccttgcatgccctcactgtcactgactttcttcctacgtgtttcatcaaattacttttttaacctcagaaacttccaaaacacgttgattcgctcatctcaatctcaatcacaaagttcttccttgcctgaaaatcttcctcagaacaatgagtagtttatacttttcctttcgatatttacagtctgattattgtgtttaattgtcttctttatctatttttgttcggatatttttttggttttgttttgttggataattttagggttaaggaaaaattttaagtttattagattcataggtttctggtttaggttgaatttactttattccagaaattgggattattcttttttgcaaatatgtcccaatctgattttgaaattccaaccctggatttcctagaaatagaatgtcctaaaaaattagcctttccatttgaacccaaaatccacaaacctaaatccaaacttgagataaatgatnnnaaaattagggatcatttaatagaaacctatcaagctgaaactggcagtcgttatagacagtttttgcaagaaattaccaagggtaatcgccattttctatgagatgcagcttggccagaatttcaaattgtaacttctatccatttagcgagacccttgtttttacctcgagtcactattgctttttcaccaggtgacctagatttcaaaatcatgaccacccaggctcgtaaatcaaagacccccaagatcctacagtcacttttgaggcaaagctcattgaatccaaagtaaggtctattggagactatgtcggcaatattctaaagtcttgtggtatcaagcaaaagcaaggatgtcacattaggttcgtcgctccaagggaatttagcttctttccactagacagagtaattggagaagaatgtggtgaagctaacactagtgcctcgttaggaattggcggttagagcctcgagcacatcaaggctggagcagtactccccttgagggaatattataaggagttttgtaactatctcaaaattgctcctttttagtttcagagttcttacagaatcttggcctgcctaaaggtcctataccacattttgggttgggagtgtcctactcccctcaaaattgtatatttttattctgtaaaagttgtttcacaaggaagcaatgttcaagaggtttttattacctcggtactcacacaagtgatcggaggatcattgtgaggttaccaaataagactgaattcaaggacgacttcttctggactactggtctctctcccatcaacacaacagcgtttcgcattatacataagtaccatctctttctcgaaagcttggttttgagtttttttttaatttataaaattggagtcacttacatattttacttattgtgttgacagcggtcactaaaaggccaattctgtaacaccctaactacct

SEQ ID NO: 25724 - DNA, 1578 bp, Cannabis sativa
  modified_base (192)..(192): a, c, t, g, unknown or other
gataagaacataatatacatatatgaaatcaataataaacatataaaaacatatatatacatatataatatatagatatatagataaaagaaaaagtaaaacaaacaattcttgaaattgtttcagttagatgagtatatatataaatatatatatatttagtgtattgtgactttgaaacaattcaagaantttaacaaaatacttacattagggcttgggcagagactcatgcttgaagctcgggcagagactcgtccaggcgtttgacagggattgaagatagcattcgtgaacgattgattattaattggttctagttcttttgtttaagttattctcttttggcgtcaaaaaaaatattctttattagtttttgttctcttattgtttaatcttatatctatattttactgtttttaggttaattccaatcggtgttttatggggttagaatctttagttttatgtgtttaaactaactaggttttctcattagtcttgtctactgacatggttttttagttttctctggtccgttttttgttggttcttgtttctttgttgcttttgggattctgctgctagtggtatgattatggaggacgatataggggtgcatattcctattaaggaggaggaggtggctatcttgtcttatgatgccagtgctacagatggtaatgactacgatgataggtggtgtattgttggaaggttcttgactgaaagacaaattgattttgaggtcatgcaacatatgatggcttcattgtgacagccggggaaggggatgtttgtcaagaaattggatactaatcgctacctctttcaattttatcatgaaattgacatccaaagtatgatgaatcgaagcccttggacttttaataggttcttgttaattttcagaagtctgcagcggggggaggatccaagattggttaccttgaatgaagttgatatgtgggtacaattgcatgacctcagatcgagatttaaaaccgctacggttgtcaaggatgtcacaaactatatcgggaagtttgttcaatcggatgaaaggaatttcatgggcttatggcgggattatcttcgtgttcgtgtgactttgaatgttatgaagccattaaagaggcgtatgaagcttcgcaatactaccgggattgagttctggactaactttaagtatgaacatcttcccactttctgctttatttgtgaaattatggggcattctgaaagcttttgtccaaggcagtttgaggttggagagggtcagataatcaagccgtatgaggaatggatgcgagtgagacctatacgtagaaaccacatgatcggagctaaatggcttaagcagtttaatgctgctttggacgatgtttctgcactaaaaaccgcggctcgtggtgaggtctctcggtcgacgatggcaatggttgaggggaatcaaggtgtgctggggtcgagttcgatgatagtggaggaaactttagttcaacacgaggtagggataggaacatcaaaggttgttaatggggaccctataattatggaagatattttaccagctgc

SEQ ID NO: 25725 - DNA, 1218 bp, Cannabis sativa
agaaaaaggccatgtgggcgctcggtgataatcacggggcttcgagagatatgattccaattctttgtcattttttcgatgaagttctttcggttaaaggacttgattgtgtgcactttggcaacaaggaaaaggggggcttgttgtatctcggtttcaggtgtagttgcaggagtgctttcatgaagtgtttgaatagtacactcggtctctgtgaggttgagtgcaacagagagagaatttgttagatcatccataggataggaagctaaaatgtagtaagaaacctcaaacaataaaggacctggcagtgtgtggaatatagaaagtgattgaatgaaaattaagaggcacaaaagtttgtatgggaaaaggattataaccgctcggttagtcaaggaagtgaattttctgggaagagaaaaagtatgaaagagaaacactgcttcagggaaagtagtaagaataaaccaagaaacaattccaaaaataacacacacactgaaaaggagattgcccgaaatggtactctgatagtataacaacttatgaagagaaagtagaactaaactagaattaggggtctacgggtggggaggataacgagaagacacgagaagattttgcaaaggggacaatcgattgatactcctattagaacataacctaaagatcaatgagttttgcaaagagggtaagctagatatgactaaatcgcacacatcaaagctcctcctaggcttaactatgtataggcaaacacccacggtagaagagtaatgcaaggcagtagcagtcaaatcgatagtattaaatactgggaagatttgctgcatcaaaaattgggatatagcaatagacagaacacatttgcaggccacattaaatggtaaattcaaactcaaaatagcaaaagggattaagaacctgctgtcgacagatttgggagagttcccattaccccaaatcctttgtaaggtacaaaattcagggtataatttaataggcaaaccaaacatatatttgtattgttctataaaaaaccatttcctctgaaatgatttgacagtgaatagggataaatgtaagaggaaatcagtacctgtaagaggctcattaaacacggtacgattcgaaggaaatgggagaaggccggagttaatggtgacgcaactggagtagttgggcacctgcagaggaagacggcttgctcggctc

SEQ ID NO: 25726 - DNA, 3075 bp, Cannabis sativa
aaaaaaaaaaagagagagaaaaattatatgttaaagaacgggatgataattgtagacctacgaagaaatgcgacctcagagaacagacgctaacgtcaaatgataccgtcaaattaatttcttctacagatggatactcaagacgatcaagtcttttttgaataacacatgcttgatcaattaaagaatctattgtagagttaagatccagtagtaaatgttgccttaaagatgtacaaaaaactaataggggtggtgcgtttgaatactcaggagtcataattcgaattagaagatgaatacagtaatggatatcgtgatctagaatggcttgatttgtagtcaatatcttctatatacgctcaaaagaaatttaaatttgggtaaacgtggttaatagaggtatttcacagtatttatactttggagagacaattcgggtgatttccaaatcaacctcttaaatttattttcaaaaaaaaaaaaaaacaaagtagatctaataattcaagaatgccatcagtcaagcatttaacataatatcaagaatcaaggaaatctgaatgatattctcttcgagactcgtgtcgaagtaaataattaccaaaatgataactctgctccacgcaccttgtcgatgaacgttaatcccacgaactacaaaagcgatgccacatatcacctcaattcaaaaaatgaaaagttattaaccacctttaaagctaatatggaattcctaaaggttttaccttttagccttcacctgtatatccatgcagtctaaagtaagccttcacaactcacagcgttccaaaagcttgggggtaaatgttatcttgttttgggaaagggacatgtgaagtcaaaataataaatatagcccatatattcaaggcccaacagtgggccctgataatatcactggagtttcagtccataaagtcgtgactcttttcgggtaaataactattaactcatccaagcgagagtctatccagcatggtcgacatttgaaaagacatataaccacgtaaccgaaagaagcatgcaacatatgtctaaaagctcagtgtagttacttcttttccactaaatcacaacaaatctgaaattactttcccaaaattttgggcaaagatcatatcttattaaataaggaaacatagtaattgatgatggggtaattaatatgatattattacccacaaagataggacacgattttgacaactagcatcgtgatatgacatccacatcaacatacacaaagtatctcatgagtcgagcttcaccatataagtccaaaatcaatgtattatttgtaaactcctcattagagggggaaaaggtaactagtatgatctttatgctctataaatactaagcaaaccctacatacaaagggttggaacttcttggctcatttgcttatgcaaaaattgagtgctcatactttattgtaatcccttaagcttttatagcttctctaaataatactgactcgtagactaagactaattaacgccccaaccacatagaaccttgcgtgtacttattttatttcctttgaattatatttattttgctcatatatttaaattattagtttttcaaaaatctttgtaaacaaatacgaactcgagggctacatggaaatgctaaaataagatcagtgagagattttgggaatgacccttatggtaataatatcacaatagtataatatttagcttacctaaaatcaaactgggttgttttgaagagatcgaagtgaagttgccattagagcttgtgaaaggaagaaattgagctcaattgaatttgtgagcgataagattaagctgagtgttctcaagtttaaagttgatgaagctacttgcctttgccgttgctgagaaatgttactgcaccactagacaaacacacacatatatacacaaaaattttagatctacaccctagatctcatatctatttccccaacaaatttgaaacagatctgagatccccacacccacaaacctaaaatctcgtcctcgtcgaacccacgaacccgtccccatccctgtcaaaccacgaaccatatccccttacctgtcaattacgaacctattatgcacaatcatcgcatcgtaaagtaagatcttagtgcagaggtcctcgggggtaaggctatacaagcaattgacattagtaaagtcattgagcagatcaagcccaaccacatcgagcttcccgacgacgaggattgtaagcttggtgtcaagatcagcagagccaatcaataccaagcgacgagactggtggcggcaaaggatagaggaagcttggacgagagagaaagggaggcatttctaagaggttaaagatggagggtttgagaagttcgggcaaccatgaaaaaaaaaagaaaaagaaaatatatttttttaatgatttattttttatttttaaatatttatttacgtgtgttaataatattatgttatgtgtatattgtgtccatgtggacaatactctatgtacatatagataaccaacttggcagttaattaccgaaaatagatagaaataactaaatgctaacaaaacacatattttgagggattttgccgttaaaattaacattttggcggttaattactagcaaagtgaaagtatgaaaaattatggcgtgatttactctaaattacatgaattttgatacttaattgcactaatagttatattgacatgtaagaagatgttagatactacaaccttttagcatttctcattaatttaagaaagagttgttgacacctaaaccctcttaattatcgtttcacttgtgtttaactctcttagctcaaattttagtagtaaaactctctaaattactaaatttttagcaaacttaaggtgttatctggttaactgtcacaaactgcttatgtgtacactcatgtacacataatacatttatattggaacatctaattctattatttaaaacttattttaaaatttatattaaaattatataaataaacaatatataatattttaaactatccccaagatggagaaccccac

SEQ ID NO: 25727 - DNA, 2561 bp, Cannabis sativa
  modified_base (2271)..(2271): a, c, t, g, unknown or other
  modified_base (2367)..(2381): a, c, t, g, unknown or other
actattgatagtattgattaaattttatcaaaaaaatttgaatttatggtaccaaatatgtatgattttaaaatacagggtaccaaataaactttattaaaaatacaaggtaccaaatttgtatttagataaaatacaaggtaccaaatatgtagacacccgttatttaattcattaaaatttatttaaataagttagaaatttaaaagttagttggatatttaatttgaattgatatattttacgatattgttagatttaatatttttttaatattgtataactatctaatttaaatttatgatactcatttttaataatatttatttaacaaacttttcttatttgttacatgtttattaattgttatcctaaattttgtcaacctaacgtggcatgtccacgtaagctaagaccaattacacatggaatacagccttaccaatagtaggacaaagtctccttacaaggtatggtaaaactgtcaagtagcaagcgaaaggagttaagcgagccatcaaggagttgtagcaccatgtctagccagccaaaaagggagcatataggtcgaccaaggagttaagcgagccgtcaaggagcggtatcactatgagctccaaagtgtatctcgcagagttacctcgctaggatagcaacaataaccctaacagcgagctgaagcttttcccatgtcaatctgaggtcgataatataaaaaccattgtttttgctattgaagacataacgcttcatctgacaatcacaattcttggtgacaaggtgaacttcagcagctaacgtcatttgaatgtcagcttctatctgagagagctgactcgacggcccattgaatctcattgaaagatgtctgaagctgattagtgaaggtaccatgagtatacctttctatagcgagatggatgcctcgttattcgttgttcaagttcattcaattgttatgcttagtttgtataatgtatactatacgctaagtgttctaacagtcaacatgtcttgtttatatctcttcatacgcagaaaggttggtgcctcactttgcattattaatgacgtcctaatgatcgtgtctccatatacaaaatggtttttcgtcaatatgtgaagtaatactttgtacatccgtgtctcgcctaagactttacagtcaacgagttatagatatattctatcagctctgcatttaatgagttattctattttaatatcttcgaatataataatcattatattcgttgattcgtattctcccaggttgacatgtgtcctcttttgaagtaccagccgaatttcaggtataacactagctaatcacttgtaatctgttactgacaattcaatgaattcagcttagttttctttcaattctctctgttttcctttctttggtttctcagctgacataaacgaattatttttttttatataaattatatataacaaacgaatatttcaatgttgcaatgcgaaggggacaattaaaagaagggatatttcacaatctgatcaatagtgtattgtaatatattcacccaacaactcaaattaaactgtgattttaaagtagatttggagagtttgtgtattgcggtggtcgcttgagaccactttaatgaggttgtctgggtcactacgactaggttgaactttgcggatgctctgtgtgacaaggtggttgcgtgttgcttagcccttgattcggcaaagctgaaaggatacaagttcattatcgtggagagcgactcaagtgtggtgatcaattctcttaatcgcatgacatcgtgttgggagattgacaactattcttcattttgttttaaactctctagttattttgatggctgtatttttacttgtatttctaaaatctgtaattttggtgccccataatatggctaaacgggcttttacctacaatcaatttagtagcttgtctgtaggagtgttcaaccaattcaattcgcactattttgctcatagtgcatccgatccgcactaagtgcgaatttcatattttggatccaattcaatccgcatagtagctcaaatctaatacaatccaatctgcaaaagtgcaaattggatcagttattttagattgattactttttaatatttatgaaaaaaaatatatttttttcacataactagcaacaaaataaaattaattattgttattttatgtcttcaataataaattaaaataaataaaataaaataacaaatttaaaagaagaaaatatatatatatanatatatatgtataaagaaatgttaaatttgttttaaattgtatgtagaaaaaaaaaataaattgcggcataaatacctaatgtttcagattttatnnnnnnnnnnnnnnnatgtttatttttggaggcaaaaaacctaatgttacaattctcttacaccgttactactatttccgttaactcataaatatagaaaagtggaggttcagatgcattatatttatttttattttattttaaaacataatattcttaacatcaaaaactaaatgctacttgttccaaaaaaaa

SEQ ID NO: 25728 - DNA, 2221 bp, Cannabis sativa
cttaattagtttgatttattgtaatacattttctgatttctaaaaaaatttattaaattatatttaattctttcacaaattgacccttaaaaattataacaaaccttctaaaataaaattctatgatattttattatatatttatttttcagagattcgaacttgagtcctcttctttcaataacagtaaattttgttatattataatattttataaaggaatattttatatatattatatgtttatttttgcaaataatatttatttatttatttatatatattaattaataaatatatattttaccttttacttttaccattaggagtgctcttacaccactcttcatcccaccacttaatcctcaatctttccaaacatacatatagcttaaagaaaaagtctaatttttcttaaaatgaatttctcctagcttttctatggttgttatgtttggacatatataagatataaatatacattatacatatatatatatatatttatataacatgaatagtcatatcaaaacttcctaatttgatatagctttaagtccacctcattcaaaggttgtccacccctaagattctaattagatagtataggacattattacacaaatatgaacataacttgaaatttggacttggtctttcttttctcttctaaagatttttcactatctaaaaaaaattaattatttatttatatatattatttctttttatagtgtgggcatagctatatatatataaatttatatagtggagataagaaatatatagtactcaacatgatcatctcttcacacacacagtgtaatccacttgctcaaaaataataataaaaaaaaaattatataatagcattttatgggttcacatatttatttgaatagtactattatcggggtcggtcctaaaactaatattatgccctaattcataacaaaattattagactactttctaagaaaaatgaaaaattactaaaagaatatagcgtgattaagatttttatcttctaaattttttttctatattaaaaattcttctgaactattaagattgttagatttaaggatatttgtctaattttattcaattgtactaattaaccaagaatctaattttattcaattattagatttttatcttaaatccaacaatcttaatagtcgaggagaatttttaaagaccttaaaagtttataggacatgattagtacatattaaaatttaagaacaaaaattataattaaccaagaatacatgtatttttttattttttttttagtcttgcgctaggtggaccctaagtaataagcgcgtatatagccttaactattatagatctaacacacatataacttgtggttatataacacaaaaaataatattttcttatataactatatactatagtttaaaacgacttaattaaaaattaattttgcctaattgcatcgtacaaaaggtcacactcatttattctcgagaggctgtgtatgagaattatcgttttatgctttaatgtatttatcttctacaatatttttttttttaaaaaaagaaatgtattgtttagaaaaaataatatataaaatttaaactcgatgtgagttttatacaatcgtgaaacaaattgttttgaaacatcttttcaccacaatgaaaatatttaataattacaatatacacagtcatataaaaaaataaatgtgatacataattttttggtattttttaaaatttttatattttcttcgaataagaacgcaattcaaatttatttatttccatagatcttaaacaataaaaatacatgctcccatcatataagctacttatatagaataataatttgaaaatataaaaagttgttttcaaacatcttcatattcaacttttcaaaataaaaaataaaaaaaaaatagcaagtgtaattatatatataaattaaattataatttctctaatacataattttttgatattttttaaaattactatattttaatttcttcaaataatataaggactcaaatttatttattttttctaaatcttaattaacaataaaaatacatgctagctcccaccatatataaattaactacttattatatagaattaaaaatttgaaaatttatgatatgaaattgaagaggagatgaatctatataatattgtgtaattaatgtacaattaaattataa

SEQ ID NO: 25729 - DNA, 4333 bp, Cannabis sativa
  modified_base (4299)..(4300): a, c, t, g, unknown or other
aattttgaacaaaaatactattatttttaaaacatgattaaaaaattaaatttaaatatttataccgcaaattaatcttttcaatatttacacataaatattttttagaatgaaagttatgtaaatgctacataattccttcaaaaacattaataattactacataattttatttatatataataaaaataaaacaaaacacaataatttattttatactgttttagattatctgtatcctacattttttaaaattctcttttagatctttgtgttttcttaaatattacaaataagattctaaggtcaaaatacttttaattatggccaaaataccctttattataaggaaattattgccacatatacgattatttctaattttgtattcaattttacgtttttatttttcttttctgtaacgccctattaatttaggcatgttactgtaattttttaattatcgtgctaacctttattaatcagatggtatggtagtataaaatcatacttaataaaaaatttactaaatatacaaagtttcaaatctcaggatcttgaatctactttttttttcaaacttatacaaaatacaacataataaaaatatcgcccaacgactaacaaaactgagcctatattgtctcgaagatccgaacactccaagtctaacaatccagatatgtacaatcttcattgagctccaaattcactgttgttcaaccctggtctttacctacatatgaaaacatatctgtgagtcgacaaactcagtaagaaatgcataaaatataaacatatatctgacttgtaattaggcgcccatacacctaattactacgagtctataacccgcgtccaacgcgtataactgagtcttgaacgttcttaactatagcatgattgaccatattatcagcctatactcaacactctagtcgtactgatgtgataacatcaatccatactataagtacaactaagcatataatatcacatgcattcagtactctaggtgtactagtgttgataacattagttcgtacttcctgtattgccaaacatatatctcgttgatatccaagttcaactctatgtacatcaataccgctcttacttatatattttctaattggcaaacataaaacttgtacattaaacatgtgcatatgtgcatctgttatactaatcttacctcaggtgtatcggtcaacgtgagtgaaaaactgatcgatgatcggaggccctaagtcacattaacgtaaaactggtaagtgtctcgttaaaaaactttcggggacttaaactcataatatgaactttctttatcgataaatagcgtgacaataccttaaatatcgagaaaacataaaaattggagtacccaaaaatcaccccaaacgggtaactggatccccaaatgggcaactgtttacccagggtcttcctggattaatgattaattgtttcttcagaaacgatgtgcagatttcaccaactcgatcttatcttccttatttctaccccaaattcgctcaaacttttcagaacaccctataatcatgttctaaacatattaaatgcatcaataaatcttagaattaaaatctaccatgttgagctaagtttgagttcttaaactcaaactacattttctatttctttttcaaaaataactacaaacaatttcaaaccaacccctaaataatttctaattcacatacacacagaactaaatttactaaaacacacataaagcacaaacttttcttacaaatttcaaagagaagagtataacttaggacttattttgatctagattctaataaccttttgaattgcaagctaaagttcttgttgaattgtagttgctcatgattttttctagggccgaaggtgagaaattagtagagagaaaatgacttagttttagttatgtttatcttatccttcattaattaaaataatccaattcagcatataaataaatccatcttctaataaattcactaatggtttctagaataagcttagatggaaaagacaataatatccttatttcatttttaagtaatctttaagctaaggggtaaaatggtcacaaccaaatgtctcgcataactccgatattctaattatctataaatcttgcccttactaaatcttagatactaaatcgtatcaaagtaatactattggccaatccgttaaattctcactgttactgggcataaaacatgaaaataccaaatttcatatataacatgtatgacacatgcacctagaattcaagaaaaaaaatctccgtaattgagaaattatatcactaatgtctatttttgacaataagacttaatttctactaatgcgcatataatggtaaatattaattttatcactaataatctgctaattctcatgtctaaatatgtgattattaccattattcttcgttaaaaggatttcgtcctcgaaatctaatctgaacaactctggatactgagccctcatatcgaactctaacttccaggtggcttcctgcaccttactgtttctccaaagtactttgactaaaactatggtcttatttcaaaggaccttattgttagggtacgtttatgttctaaaagtaagtatttaatggataatatattatagaatatatgaaatacaattataagataaatgaatatgttaattatagaagtataattaataaaagtatgaaaatttcatatttatatagagaaggtatgatcttgtaaggtagtacaagagaattaagatcatacaatatgaataaaataagtcggtagtatattaaagtgctaaatctttaatatataattactaagtgtaatttactatgcactatattagtgtgtgtgattttgattcggatcatatatgtggatagacatatggtaaaagtactgtgtataatttgattaaaaatgactggaccaatatgaaataatattttttattaacatatcgtttatcatgaaagaattatccatatcataacaatggtcattagtaaatcaatctgaatcatgagtatacatgaactcccatttatgttcattgagttttttgattcattcgttaaagtatctcagagaatgtgattcttacaacttctattttgggagattaataacgtattggctgggaatatgttatacaataatagaatccaagctttctgaagggatcaatattagttctcttatagtggtaattttgggagtgctaatagttggatctaaatctataattgaattatagtttaactgtacacattgaattaatggtacataaggaatgaagagataattagaagggtaaaacgataattttgacaaactctaattataaactaataattggaaggtgaactacttttattaattatattataccaatagactacaagaaagaattctgtaaatataattttatattagcaaagagtgcaattccatatttatagtggtgtaataatgaattcaataaattgaattattctattgaagagttcaataataattaagtatttattggagcttagaaatatagattcatgtcctcagatcacatctatatacaacattgtatagaggaatgtttgatttgatgaataaatagagaaacaataaatttctatgagaaataattcttatggagaaaatagtaattatatcgattatgaattgaataattaaagtgatatttaactatttagttttatttgatgaaactatattaattagttaaatatattattattcttaaataatattagagagagagagagagaaaatattattctagtgtaaaataatatttattttaatcctagtaaaataaaagattaatgagaattaatcaattattattttttataaaatatataataaatcttattaatgaaaaattaattttgagctttaaaatatggtccacacgtgttgggctaaaccccacacatgtatggtgacttataaaagcccaattagtttattttttattattttatttaataagataaattaaaaaaaatgataattatcttttaattatttaaattaaatatattataggataatgtatttaaattaaaagataatatttaataaaaatgtatatctgaattctgttatttagttatatgatatttattttgaaatttaatattctctttttattttataggattaaacgagttttaaatattaatatagatatctattctatataaagtgtgcttatataactgaaattcttggtttatgnnaaattcatgggtaactttttatttttatttaat

SEQ ID NO: 25730 - DNA, 3303 bp, Cannabis sativa
cccaaacaagtccccccattttccaaatcagaattgctaaaatgtactattaagtatttagtatcttttttttcatgttatattctttattattaaaaatcttacttttagtcacaacaaaagttgtggctaaagtaaaatagttgtgactaattataaattactatttatatgttgtgactaaaaagtccgtgactaaaaatattaatcacaaaaatcacaaattgtcatgactaaatatgtttttaatcacaatactttttatatgactaaaactaaattagtgacaacttgtctttaaatactatgttttagtcacaaataattttttattgtgactaaaagtcaagttacaaaaaatttgtgttgtaactaaaaaactgtcactaaaagtagctattttttgtagtagttattgatataattaagtatgaactcttacctaacttaaaaaaataacttttaaaaaatatcgataatcataaaacgctatttataaaaaaatttatttggtgtttaatagcaatttttttttttaaaattcaatagctaataagcctaaagcaacaatattacatggtttgacttgggcatggcaatcaacacaccagttgagctgaccaaatcacctgcaccacctgcccacgtacggtctctcactcactcactcagtactctttttttttttttttggttaaaaataattgagtgtttagtcaaagtttttgcttgtgtttagtcaatcagggttgggagttcaagtatacgggcttgtgctgagccgacacgcacacattagttaattggtacagttttctggccaatcatgatcactttctagatatttcttttctgctgatcaataatttctgctttttcacttttactatagtagatcttcattataattgagtcaacgattctttctagctaataaccatcacataattatcttgttactaaaaaagatgacatacgttatctttggatgttgttcattagttatcatcgtttgttctccacacgaaacaatatattcaccttcttaattaattaaaacttaagtacatgcgatgtgacaatctgaacctctattgggaaacttcactccaagttaacctacactcatcaattattatttttattaataacaagaagagaaaaagaaaaaaaaacaagtagaatcacgtcgaaaatactatatagaaaaaatccataatatattatatttttatgagttttgacattaaaaagagtatttatgattttttttattatgtatattgtatttagtattattgtggaatattattccacatgagaatatattaagcaatatataaaaatatggactattttttatttattaccaattagttttaagatgaaattttataatttttatcatggtattagagccatattacttaccctgtccaatactcacttatactcagttaaaactttctaattaatgtttctaagataagatatctaccaaaacactcatgttatacatatactacatacagactttctcaatactatgtaacttaaaacctagaacatgagtaggagaactcaatcccgatgaagttgtcaaacagtgcaagttttaggaagtttaatgaaataatacaaaagttattattttttttttcagaaatgttgtagttgattgaagtggaaaaagttgatgaaaaaaaataataattagagtggaattgaggcttttgaggcaaatgaatatggatttataaaaaataaaggtaaataatcttgggatcgttagaagcaaaatatggaaaggacacgtttcgtatgtatgtgaatgaagataacattaagttgggttggggtgaagaagttaagtaacaagacaaattcacctctagtagtgtagggacatgcatgcagcctttctctgtcacattcatacgtctgggactaaggctacacccatttttattttggatttcggtccaaacaaaacatttcatttttatatatttaataaaaacagggatattgtttacttcgaaaagggtatcatttatatgattaattttttttttaattctttgatgtgtatgttcctattatataaaggctatatatatatatagattattaaagaagagactgttgaagcatggtatcataacataataatgtaatgtaagtgagaggtagaaccaaaggaaaaaggtgtgtgggagaaacttgaattgaagtacagatagcagagtggagagaggtgtggataggattttggcactagtgaagcccgtgatagggggtgtaggttaggtgggtgagaggcaattcacattaagtggcccattttgtacactgacagaggtgggccttgtcccacccttcttctcaaagtcaacctcccaaccccaaccatactcaagtgggggctctgctctggaaattaccctcactctcaccatgttcttccaatccacttctcaatattggtttctggcctcgaacttttgagttgtagcccatttatgttcggtttaattttgattgaatgatccaagcattgagtaacttgggccgtcaaccttaatagcccaattttgggatatgaatatgatgaaaactcgtgctttttcttctactgattaggatgatttattttggattatttaccacgtactacaatttttaacttttttacatttttactgtggcgcagaattttttcaaaaatgccgtgtaagttttatattgtgtactgtgttcagttttcactattattttttagttgttccactgttgtttttaattgttctgttttgtgttgtgatgttattttataaaaacataatatttataaaaaaaaattcagtctggcagtatttttataaaaattaacttaaattcaagtatttttgcaagtttgctttattttagaggaattttcatttggaattcttttttttttttttttattttataaagggaatttggaattatatttttttaaaaaaaaagaaaatttgtaattatttcttcaatatacaaaaatgatttttttttgcatttttatggatctacaatttttttttctatattttttgcagattttagtttgttttttagaaaaatttgaagtgttattatctgttatttttgaaacaacgttgttttgacattgctactatgggaaagcaatttttttacaacgatacaaaatattatttttttgttatttcagaacaacgttacttttacgtagcctctatgagaaagcaatgtgaaagtaacctatttctctaaaaaaaa

SEQ ID NO: 25731 - DNA, 4778 bp, Cannabis sativa
atttttggtgaaaagaaaagataagttcttaaataaaatagtaaaattaaaaccctatagggcccacaataggtttagccataaggttcaatttaagctattattctatctttttaaattccatataattctaaacctaatcatagaagcaatccaataaatagaataagatgctctaatttttaaaacaattttatcacactactttgtcagacaacttagaaaataaagagagagcctctattctattttcaaatctttccccttcttcttcctttgatatttttgaaaccctatagtgaattgagaaattgtccacataattcgtcaatactcatgccattgtggaagattgtgtagaattccaataactgaagaagatctaggttttaaatcttaattatactctgcaatagaaaagattaattgttagagatctcaatggaaggagatactacattgtgctaccatcagtgtaaaattttttataactttatatgtgtttagttcattattttagaaattcatatttaggatgttagattatagtcttttaatcaacatacatgttagtaaatctatatcatggtaaaataagttccaataactggaattagagccatgatatgatttattttcatgaaatatagatttaaaacaatgtttggttaatttggatgtgttcatgttggtttatgagattattgaatgatttaatgtgaattacaaaattttctatccaaaataattttatttttgttctagaaatattatatttggaaatttggtgaaaaattaagcaagttaccttttacagtacttaatttcaattaaaattgaaaaagttatgacattttgaaaattagaaaaattggctagggttttccccatacctgttcgcgcaaatggtgtgaatcactcggtcaagacacgagtttcaaacaagcttttttgagatttcttagacgtgggcttgtctgaacaagcttctgcgtgcaaatgaggctgcattgcaacctgtccctcagccagccccccttgtgtctctgcgcagacagtatgcattgcatactgtccgtgttgctccaatttttcaattttttcaaattttgtcttttttttcgtagattttaattttgattatttggttgatttttgtgtagtttttaattttcaaattttaaatctaattatcagtaaaattaatttttattaatttaaattgattttagatattagtaggctttaaatttgaaaatttgatttttctacaaatttgctattatggttattttgaaatttaattattttttattttatttattaattttaattattgtagagggtgaaatctacaattacaaaatttgggcactaacaacctatcaagaacaaagagagagagagagagagaaaagttcaattgggagcaccagtgggtcgtcagccagagggacttcgacgcccaaattagtacgattgtagtaaaaaataacaataacgaaaaataaatgaaatgtaaatggtacccagatggatgagtggacaagcggacagacggactaaaggaacaactatggtggtgaggcttaagagaaaagtttagaaaggacgtttgtctgcttgagcaagtgagtagtgtgagtattgaatgttcgatgccatgcgtctatcgtatggtttcttttatcgtgtgtccttagtaccgttgccctccatccatgtcacccattagactcgttcaagttggttgcttccctctttttacgggaacggtaatcgtctttttgactggttcaatatctacttggttccacgcgtttggctgattggccgaactttgacccgattgcggggtgatctcttatggcccataggctcactcgtttgtctatttcaaggcctagtgagtccgtctgactgccttattaggcccaacattattggattcattattgatgggcttgtctgacttgcatattggacttctcaaaaatatcgcaaatattaagcaaatttttacctctacagtttttccctcactctctagctagaatttattttagctggagagttattaataccaaattaggtgctagccaagaggtctgtctaagtaagcagtgtatgcgtgtattgttgtttgagacaagaaaatagcctgaatggttcgagcatggtggttgagtagtccttggcgaatgcgtgtatgtggctatcttggctgagtaatatttttgtgatcaattagttcttcaaagggactcttatctagactgagtcgtcttgttggtctaatcagttagacatacacctggatataaattacttataaaagccatacattgggccttatttggctgtctatctcaaaatacgatatgagaggagtggatagacgtacatatatatgaggtgtaagaaaatagatattttttgcataaagtgatagatatatatacatatgttgtaaggagatagacatatgtatatgttgtaagaaggtagacgtatatatatggtgtaggaagatagacatatatatatacatatatatatattgtagggagatagacatatatatggtgtagggagatagacatgtatatacatgtatattgtaaggagataaacatatatatatatggtgtagggagatagacatttaaataaaaatgagaggaggtagacatacacacgttaaatgatgtgaggagatggacattaggtaaggagatagacagacataatatgtttgagatagacatgtatgtaaataatgagaggggatagacaaacataatatagcggagatagacatgtatataaataatgggaggagatagatagacataatatatttatgaatgtaataagtaggtagacatacacacacaaatggcatgaatagatcataccatatatatgttataaataaggcttgtgtccgtctgtctagctcaagttcttgttttttgtacctggcatcatctagcttgtaggttgctctaaaattgaaatgatgtgtgcttcttgttctttttgtctaatggacgtttgaagaaaccatatatatataaatggtcactttgtctttatttattaagatgagtaggtgaacacacttattgtgtgataggtggcgtgagatgccataaagagttgtttgagaggtcatgtcaaggtactatggtgctagatggtatatatacatataagagattttacttgcttggatacattttgtcatagatagatattatagagtgttatgtactcttccatacctattcacatcaaagccaaaagaaagtgagattcacccatacttattagtcacatcaatgccaaaaagataatttattggatgtgtggccaataaatgggtccaaatagttttctctctaactcctacacatatatcaattgacatatatatattattataaccaagggagcaccaccatcaatgaattgtatgtcaagtgaacatacattaagtatagatgaatatactatttgacaattaaagatagtaccttgtacccaatatttaattttaccctcatatatattactattactatcactttctagatgagtgacatttatcattcatccactatttttttggctataaatatggagagttagtatcattcttgctcacatttgttggagctcctgataaagtgaggcttgaagtcttagaaggagactttcaagaggtaagttttctaaatcctctcccttgaatgttcttgagtttgttcttcatgttcttgtgcatgctcatacttattttagtgatgtagatgagtaaatatattttacttgttgtatggttgtgtttgatctttctgggtagtaaaaatctatgtttttactatttgtctttgcatagtagtaagtgtgatttgagttatgattgtttggctagctagaatatgatcttcctttagttaattagaggaccataactggtggtttatatagaacacgtatatccagttggtgagcattattatggctctacatttttttgtctagttatttttagcaccttgagcttcgatatatatatttttgttttgtctagctgacatttttctttctaaatgtttttgtttttggtgaacttgctcttagtccaatacttttgttctaggtggggtttttgttatgcctatcacaaccatggtatctaataagacgacaagttcatctaataaaacttcatacattactactggtgtggtacgttatgtattggatgattagtgtgaggatatggatgtccataactatgcatctggggttggagtagacaccaattgccctatgagtgatagtgagtcgggcaatattcttttgggtattattcctaggtcagaaataaccttgaacgacttgccaaaattcgtcctcattacaatattcccatacacattagtttgtatgctccgactagtggggaacgggctgactggaagatatcgggttggacgtgtttgtacgagcttccattcaagtatggttttagatttcctcttcctagtttaatgtctgaactatgctcctatcatggtatctctcctagtcagttaatgcccaatgcttggcgtgttcttatggctatacaagtgttgactgaaaagcataacattacatttacggttgccaaagtcttgcacatctactacttgaaagagcatatacatgataagggtaagtatcattgatggaaggaggattttttctttgttccttttgatgct

SEQ ID NO: 25732 - DNA, 1868 bp, Cannabis sativa
  modified_base (1829)..(1831): a, c, t, g, unknown or other
cactttatatgatgagtgtctttaaactctcgtcaacaacttgtgaaaattaaagtctattgtagacaattttggtggggttcatcttgtgatcaagggaagattccctgggagaaatggaaaactgcatgttagcctaaggcgatgggcgggttttgattttgggattttcaactttttaatcaagctctgttagctaagcaagtatggagattatttctatatctagattcattgcctgctcaaattttgaaatataaatatttcccaaattgctctatccttgaggccactaaaaaagatggttcttctcatctttggtcgagtttgatctaggacatggaattgcttaaatgtggtcctcaaaggtccattggagatggaatacaagttaggactttcaaggatccatggctcccgcatccgaggtcttttcagcccatcacaagagggcttaatgataattgccaggtgagtgaatttatccttccatctggtacttggaatgtgggaaagcttcaacaagtttttttgccaatggatgtgcacataattttctctattccattagcgaggcgtggggtagaagatggttggtgctggcactatgatagagacagggtttataatgtcaagagtggctacgctttggcgtggtcgctctaggttgaggagggagttgcagattcatctggttatctcgttggtggaatggggtttgattcttaatataccaccaaaggtgaaagtattttttggcttatcgcaaacttcaaagtccttctcagatgaagaaaacttagaaaatgcaaagaaattttgagagttcgaaattcagaggagagaaaaggggaaaacaaaaatgagagggaaatgaataaatatcatttcgtattagggagtttaaatactaatatctctcatttattcggatggagacacgtggcaaaagaatgcctaaagtctctcaatccaatggttaccaataatcacgcctgcacaaacctcgaagggttctgatgatgtggcacctcaaaggattaaaagtaataattagagctgtcttttcgaaatcctcgacaagacaatcaaaggtcaccacctcgtgacaaccttttgcccgtctctctctctctctctcatagtttccctcacgacatagctgtcaatcgtgaaactagggacatgtgttatagtgtgaatttttcacctaaaaactcgagaccaggctctcataaagatgacacgtggacttgctctcctcgaggagtgttgagctgtcaaaaggagaccactcgagtataaacctcgcctaaaccagactcagcgagatgatgtgaccctaacagagtctagtcgtattattacgcctcacatggtgcaggaacaagaaggtcaggtttaaggctcgtctatatatcttgatgtctataaagatttttctataaatcagtaaagatcgattctttactttgcgagctggtccggatgacctaaacgcgctcgatgacccagtaaggacttgcacatcctaagtcatcgagttttacaagatatccatatatgcggctcggataggacgtagatatcttaacacatagactcgttagtcctttacgcatcctaggcccgcgagcttatgcaagaatatgaacagacaactcgcaccattaaggtcgcatacgttgttgtatttagtgaattgagtcgaaactgttcttcatttattccatttacgttttcattgatttaatgttgatattaaatgtaaaacggtttgataattaattaacttttgtataatcaaatgacacttgctttgtatatannngagtgatccaatatgaaatggacagacagaaaaatcc

SEQ ID NO: 25733 - DNA, 6082 bp, Cannabis sativa
  modified_base (1889)..(1902): a, c, t, g, unknown or other
tttttgtgccaaatatagtacaatctcctattggaaatggtcttatactgggttaaactagtttaaatttaacacgtcaattaacttaatttatattaactatttttgttgactcaattaaaaatttaattttttaataaataaaaaattaattgatatgtgaaacttaaattaaattaactgagataccacttttaatggagatcttgattccaagcttattaatacatacaggtgaaaaaaggaaaatcctagctatctatatatctttcaccattaattatagtaatcaaaactgaaatattgagtcaaagctagctaatacacttattatgatgcctttattggaaagaagccagagtgaatataaacctacaagcactaatattaatttagaacctttattggtgtatatgctcttggtccatatttcacaatcataaaaagttcatatatgattaaacgattttgcgtcactaattataactaaccttttatatttgtatgttaatagttcaaattattatatgaccaattatatattatattaaatgattgatgagatatattatatagactaaatatgacgtaattataatacatcatcaatcaattgaaacacatattaattgattaaaatataactaagtgaccagtataatatatgctgttcacgttgtggaaagaataacaaataataaaacaattgcattaaagctcaatgggaacttcattaaaaattcttataaagtcagtgcccacaaaatcattataaaaattattcaaatcatacaattccatcaaaaactaatcgattaatatgtttgacataaactacaaaaaaaaaataaataaataaactttcagtcataacaaaataatttatgaataatgttgttttggttaattaaaacttaattatgaaaaataaaatttggtcacaataaattatttgtaacaattaatatagtgaaccttatttaatcacaaccattacttaattagaaaacaatcggcgtgcgattaatattttatttaatgatatatattaaattttaaattttgatatttcttttaataatatgagtaactgttttactaatttttttattcaaaaatgtaaaaataaaataaaaatcatcatcatacaatttcttatttaataaataaaaaaaataaaaatatatctgaaaaagaaaatttgaaaaatccttacacaaaattgaggcctaaaaaataatcaataaatctataaaaaaaaaatgatcatatatatatgatcccaaaattattgtatcaatattgtcttgtagtcgagattatgttaattcaaaaccgttgtcatcaccgtatcttacttatatattcaaagtcattgttgtcatcatcgtatttcactttactatttataaacaggttacataaatcgtatttggattttattttttgacacaatattaaacgagttgtgttcagcatatacttgtaatacatgtgttgacacgaacatgacccatgaacacaaactgccactctttttaatgagaccgaattatcttccaactatttgtatcattattttagtcggtaaaaaaagaatactttatgaaaaaaagagaaatattttttttttgaaaagtacttgagtttaggagaattaaaaaaattacaaaataaatatgaaatagtatgaaattatgaggggtagactttttttttatttatttttaacttaattttagggatagacttaattagatagatttttaaaaattaaattataatatattatttattacttaattagttagatgtatttttctaatacttccaaataaattttttttactatacatatatatatatatattatttttaataataataannnnnnnnnnnnnnataataataataaaaatattttttcattcctacctatccttttttttttaagagaaatggtaactttatttaagataaactttcacccattacaatagaaagaagatcagcgagaatagtactctcgctgaatatacgttctgtatacaaacaagagctacgagcaagacaatgtgcagctttgtttacagaacgtttaacaaaattaatcatgactaaaggtaaagaggccaataaggaacgacaagcagccacatgttgaccaaaaggagaaggaatggtaatcgagccttggattgcctgaacagcaaccaaagaatcaatctcaacttcaaccgaaccccattgtttacgctttatccagctcaaagcctccttaacccccactatttcagccatagccgtgtccacacgcccctctaatagaaccgtgaagccttcaacaaactgaccgtgatggtcccgagctacaccagccgcttcatattttctgtcatttgcaaagattgcgacatcaacatttaccttaatctttcctataaccggtttcacccaatgctccaaatccatactcgaacccgaaggaacaaataaataccccattctcctttgttgagcatttctccattgattaaggactactcttgctaatagaataacctccgctgctaacaatgattttttcctccaaaccagctcattacgggcatgccaaatcgcccaaataaccattaacaattcctcctgggccatggttgagtgctgaagtagcatctggctaaaccaatccgaaaacgttaccaaagacacagtacccatatttaatatcgacctctgccagcttgaacttgcaaaggggcattgcaccaataaatggatgatggtctctgcatttggttacacataggacacatttggtcaagagggatatgcttggtagtaacttgaatttttgtggccaaacaaccagtcagagcaagccacataagttggtgtacttttggagggacatgtagcttccaagcaattttccaaatcttcatctcaaagtcactagtattagtaacatcagcaaggtgcatcaaacgataagcctccttcacagtgtaagcaccatgaagatccaaatgccaataccaagtatcaatactagcctcctgatcaatagtggtctttaaaattagctccttatctctttcattgaaaatatcagaaactactttcaaatcccatgttctttcgcccggcaccatgagattgttagccttccaatgctccattccattagcagtagtggtaacccacggatgagagacatttttgagccaagggtcaaacgtacctgaacacttataatattcgtacctggaccaacaacctgacgagcaccttgcttgatcaaagcttgtgtttcgaagatgcttttccaaataaatctaggattcggaccaagagaagcaatcaaaaacgaaccatgtgagtaatatcgggctttgtaaacccgactaacaagagagtgctcattcgtgactaacctccaggcttgttttcctagcatggctaagttgaaatccctcaggtgacgaaaaccaagcccaccatgatgtttatgacgacacaacttcttctaactagaccaacttaccccacattttttattggaacccgaactccaccaatatttgctcatcattccttccaacttattacaggtttccacaggcaacaagaagacggacatagcataagtggggagagcttgggcgacagttttgatcaacacctccttgcccgtttttgaaagcaagcgaccttcccagctcagaattcttttatgcattttatctttcaaaataccaaggatggcattcttgttccgacccataatacaagggaggccgagatacatactattgtcaggagcttcgatcatgcgtaataaattgcacaaatcttgtctagtagctgaggtgatggttaagctaaaaaggatagtagacttagaataattaatacactgaccagaggcttgttcgaaaagctgtagtaagaggaggacactacgagcctccctatcaatagctttgcaataaatgtagcaatcatccgcaaacaacatatgagaaatgattggggcaccattacaaacacgacacccatgaagaacacccctagcttcaaatctccttataagagaagaaaatccttcaacacacagaagaaacataaggggagagaggatcaccttgtcgaatacctcttcccggaataatcggccccatctctctacccccatgaataattgtgtatgtaaccgttgaaacacaatgccgaataagatccaccacacggtcattaaagcccattttaagcatcatatttcgaagcaaaagccattacacccgatcgtaagctttgctcatatcaagcttaagagccatataaccttccttaccgacccgctttcacttaagataatgcattacctcaaatgaaatcataatgttatcagttataagacgacccgagataaaagcactttgattttcagagatcacaaaaggaagaacaagcttcaaacgattatctagcactttagagcacaccttataaagaacattccagagagcaataggacgcaggtctcccatagtggtggcatttttcttcttagggatcaacaccaaattagtatgattaagaccggttggcaactgaccaaataagaaaaaagagcgaacctattttataacgtcagcgcccacaattgcccaaaacttctggtagaaacccggagtcataccatcaggtttcggggatttatctgggtgcatctgaaaaagagtcgctttcacttcttcatcagtcagtggttgcaaaagagagttattctgacccgatgaaactgaagttgaaatgccatcaagaacatcatccatagtacaatcagaactagtaaacaggtcttgaaaataagaacacataacctcagacaaacgcgaatctcagtcaacccatcttccgtcttcacattgaagcttatcaatagcattcattcgacgccgagaggacggcgtagcatgaaagaatttgctatttttatctcccttttgcagccacaactgtttcgagcgttgacgccaaaaaacctccttctgagtaagaacttcaaaaagtttttcctcggcctctttgtatttagcaataacatcaagatcacgaccattcttccaccgtttcacctcatttttccaatgtttaatacgagaagcaaaattttcggagtaatctttgccccgatccgagaggatctcctcacaccgttggattttctcttggatgcccgccaactgagactcgtcccaacactccttaaccacttgaaaacaaagtggttcacgaagccaacaattttcaaaatgaaacttgcatttaacagagacaatatttttaacagccacatcaagtaaaataggacagtgattagaagaagaaacctcaagattaataagcttagctgaagagaagcgttgaagccaactttaagtcaccaaagcacgatctaaacaaacctcgatccagttatccataccatgacttttctcccaggtaaactgatgcccaacaatgtttaaatcggtcaagccacatgcctggatagtgtcacgaaagccatcaagcaaccagttgggataggggtgtccccttcatttatcttcctgagagagaacattgttcatatcaccaatcacacaccaagggagagtattatcattagctaaagtccggagttgttcccaagatgaccaacgaagacttttctttttgactccccataaaatcgcgagtaaggcgccacgccccaacatcactagacatgatctccacataaacaaaatttgtagcaaaattcagcaccttgacatcctccttattcctccataataaagcaaccccccacttctaccacaagcatctaccgcaaacaccccaccaaacttcaattttatacgaacccgctccaacacatctttacgacacaaagtttcacataaaaagataaaatcaggtttcaattcattagtttgaatatattagatattcatttgtagtgaagtaggttctgagatatactatactgtggtgaacgaagaattaatatatacatgctatatattat

SEQ ID NO: 25734 - DNA, 1797 bp, Cannabis sativa
tactactactactcattaacaaaaacactactttctatagtctttatatttttgtaatttcttttttgattaattgtttgatattatcttttgcaggccaagtttgtcattgatttatcccttgtaagttttcttattaaatcatttttttttctttagtaaattaatgattttgatatatggggtttgtgttttgtacttaaaattatataggtatgcatcggttttagcattggagagtacatcaaaactagatgatgaacaatggcttgcttattggattttatactcttttctcactcttgttgaaatggtcatgcaacctgctttagagttgtaagttttttcttaaaaacaattcaccattatatatctacaaaaaaatataatatataatattgaatattgagttaatttgttgttttgtagtatacctatttggtatgatgtgaagttgttatttgtgggttggttggttcttccccaattcaaaggagcagctttcttgtatgagagatttgtaagagaacaactcaagaagtatagaggcacatcatcatcttcatcatcatcatcacaaactcacaagggtaaaactgcaaagtttgtggatttcataatcccaagtaaagtgagtttttaattaattagtttttgttgatattttcaatttatacatctttctaggacttgaattaattatttattaattgtgttcttggacagggagagcatgagactcattaaagaaagggaagcaaaagtgcatataatcttgccattgaagtctttcattccactacacttaactttactttctttgtttttatttttcttaggtttgtgttaattaagttgtcggttgtactaaatctttaatctttgtacaagttattactccttattagaaggcttttgttttgtgacctttcttttgaaaacttcccccatgtagaagggcacaaattgtcttattttgtagtaaaatcttgtggtttgtggtacaatgtattattcactatctaatttaactttgatatttcaaaaaagggtgtctaaaagtgtacagatttaataacttagttcactttaattaattaaccacctaattacccgaatagacttttgactagttgcactattttataactttgtagtgataatctatatcagataagggatgatatatagttacttattttctaaacttacattttcttttggacacaactaaactcaaaatctttctattcataacgtcattctataatatactgtgtaagtatcatcacaaaaataaaatccagtgaaaacagtacataataaaagcttacatccagttgagcaaaaatatcaacagcttagctgatttcttgagagttgagactcaactgaaccagttttttaattctaggcacatttaataaatttaattctaggttaattaccagtttttcacaaaattaaattaatatattataatcacccataattttaagaaaaacaaattcttattaaaatacttttgaggttttttccttttaatgaatgctccactattctttcatgatcacatacaatttttttttttggggagcccatgctcgtttgagttgttgggtttggactcttcattttgtaaaaataccacaatagtttatttttaagagaaacttacaaaaatattgaaatttgggttaattttaataaaaatacgaaaatctttttaaaaatactgtgtttttataaaacactaataaaacacaaaacagatcaactcaaaacaacagtagaaca

SEQ ID NO: 25735 - DNA, 4841 bp, Cannabis sativa
  modified_base (2918)..(2918): a, c, t, g, unknown or other
  modified_base (3716)..(3730): a, c, t, g, unknown or other
  modified_base (4803)..(4814): a, c, t, g, unknown or other
tcacatcaatcataacataggtaagtgacacgctaaatcactttccggggacatagacttgaaactaaaagttttcctctcgataaataacatagagataccctaaacatcacaaaactgggaaaaactagtgttcccaaaattgcccaaccggtagaccggttcccaaccggaattctggttctgcggggttttttggggaccaactggaattccagttcctacaggtccctaggaactggaattgcggttcagtgcaagaatcactcaaaattccattaaaacttcaattcatccccaaactctaccaaactttccagacctattatttagaccataaagaacatatcccaagcaataaaaccacctatcatgctcagattcaagattcaccatgtgagagaaaagtttgagctcttaagctcaaaacttgaacaaacctcacaaaaagccaccaaaacacatcaatctaacttagataacctcaaattaacttcagaaacaaacttaaacaacagcagtagctacaaaactcaaacttacgatttcatgcaaaatcacaacttaaagctctttaaaccaaagaaagagaagctagaaatcttaccatgacttggatactcttaaagcttgctaaaatctccttgaattgctgaagatcaatctcaaaccctagctgttctatggagctcgagagagagagggttttggagagagaaaggcatcttggtctaattcttattttttaaactaagtgagtaaataaaaatgacttttattaaactaatatgaacatagtaaaatagaaaataagctcaataattactactaaatccccactaaaagaaaaagactcaataggcaaaaagcccataatgcccttgcccacactaaaagtcatacaaatcactgaggggtattttcgtaaactctaaaatctcgactaatcccgacattctcaatgtctaactatatttccccactatactaaaaacactaggatgtgattcttatagccgaacaccgcattccaatgttcccgggcacaaaatatgcaaaattataaaatttcgtaaatgacatataaaatgcatcctgaattcaaatagatcattataaattaataatttaaaaataataatcaaatttaataattaaaccataattatctgctaattcccaaattaaagctaagcggtctttacataatgccacaatattactcaattaactagttatggttttgctaatccattctctgaactctagggtattacatccgtagtctggtaaagctctatttcaagcatctcgacacgttgaacacctctgtgttgagcagcaaaggacaaaatagatgcctacaaggaataaaaccaaaagagtaagagaaagtataaaggaaataatgaaaaataaaagaaaaagtaaagaaagcactaactaattgcataagatcatagatcttctttaccaaactctcgaagctccctttattaattaaatcctagtcgctggactcgaaggtctgatagtgctgccaattattggtagcattcagcgagcagagaatttgacctggtgaacagacccaaggggctattcactggtgcttgccacagtaggagcaacctttttaggaaattttccaggctcggtagtgagttggtttgaagatttcttcttatttttagttgtttttgttcttttgggttctttggaagaaccgcaggcatcattttcctgggcagcatgttttttggatctgtttttgaagagagggggctattaagcatatcttgtaagttgagatccatatctgcgaggcaaaagaggtacatcaaatacttactgtgaaacaaataatagaaaaatggggaataaactctcacttaaaggaagttaccataattatcagaagattgcgaggaacaactataataattactaaagtctctagaccctgtgatcatgtacatatcgtaagggtttattggagataaatcccaatttaaattttgatggctcgccctatccaagttggtaccatactactcaataatcctgtaatatgagacagaaattacttacgtataatgcgaaatacaatcgtgttgataggagaaagaccagtagtccagaagaagtcgtccttgaactcaatcttgtttggtaacctcacaatgatcctgcgatcatttttttgggtaccgagatcataaaatcccccatgaacactgcttcctcgcaagaacagctctgacgaaataaaaataaactatctcaaggggagtgggacactcccagcctaacatatggtacaaacctttaaacctactagaatcttgtatgaacttggaatcaactgaaaatgggcatttccaagataattatagaattctttgtagtactctcttaaggggagaaatgctccagccttgatgtgctcgaggctccaagcgcatatcccagacgagccacttttactggcgccaccgcactcctcgcggattactctttctagttaaaagtagttgaattccactggagcagcagatttaatgcggcatcctcgccttttcttgatgccgcaagactttaacacaccaccaacatattctataatggcccttgccttggaatcaataagctcagctttgaaagtgacattaggatcttgggggtgtttaatttaccaggcttggtgtggacataattttaaaatcaaggtcacctgatgaaaaagcaacagtgacttgaggtaaaagcaagggtcttgctaagagaatagaaggtttatgccaagcggcatctcgcagataacgacgtttatactcagttatctcttgtaaaaattgcccatagcaactagaaatttcatcttgattggtttttattagatgatccctaattttggnatcattaatctcaagtttggatttaggtttctggattttggatttgaatggaacggctaattcttgaggacgttcaatttcgaggaaatctgcagttcaaatctcaaaaccaaattggaacatattgacaaaaaactaaataataatcccaattcctggaaggatttaatttgactgaaacaagaaatctaggaatttaataaacctaagttcaatacttaaagccctaaaaattaccgaaaaaaaaaatcgaaaaccaaacacagtaaaacaagatacaattgaaagcaaaaatcaaagtatcaactcaggaaaaagggaataacatagagtaagaaataaaccacttacaacgtttcagaagatttctgggtattgaataacttcgtgattgaaatcgtgatgaatgcaatgatgggcgctgagaatttctaagattagaggtgaaatatgaagaaatacacagaaaataggtcaaggacaaagaggacaagcaaggtaatgaaaaacgacgatggttttctcaaaaggtttctaagatttgaaaagcaaaagtggcagataagtggtttctcttgagtttacactttaagaatgattatcgtaagattaaaagaataaagatctaatgagtgagaactagagagagttggaaaagatgggcatttaatgctaacgacttgcctcaaaatcatgaactgccaaaactcaaagcatgaaatttttcaaactgggattaagataaaaatgcccttgtaatcatttaaaaaaggtcttttattaaaaaagaactttttnnnnnnnnnnnnnnnacccaaaatttggctacacttcagagagtgacacgtgtcttgcaatggaatatgaaccacctgatataattaaattatatcatttaatgcaaagaaaaaaaataattcggtaataaaagattaaaggaaccattcataactcgctgactacatagccttaagcgagataacgataagagcttattggaacttatattgacgagatacacacctctctcgtggtgtacaagcccaagaagataatttagttatttaaaagagtggatatagttatgcacaacagccttaggattacgaatagcgagacaaccaccttgctaatctaaagagacttgacaaggtgaatcatctgttaatacttagcattttttccacattataataaacaaggataataactcagagataatcgagatacaattgtccaaattaacattaaccatctataaggataagaagaaaaagaagcaattattctatattatcccacatgcatttaattgaaacatgagaattttccatgttttgtgaacggttatatttcaaataaatccatgtaaataactatcaacctacattcctctaaagtggggcagatttcacagaaaaaagggatgaagaatttgagagagaaaaaagagatatgatcaattgtatcttgcattcaaaaaatatattgaataagatagacttctggagtttgcagatttaattgcaaaactacgtaaaaatatttcgtgtcacatatatatttattatttctcattatattcattacgaaaaggcttagtatttttagttaacgaaaatttgcgttaacaatatccgtgtaacaattgtgaaataagatatttatataattaaataatcatttaactaaccaattaaattataaaaatttagttaaatatcttttcaaaatttaaaatttaaaaagaaactaattttaaaatatctagtttatgtaaattattctatcatattaaagtaaatatctaacaagataaatgttttgaaaatatccaattagatattttcaatatcattttataatcttataatttaataaaatnnnnnnnnnnnnataaaccaattttaaaataaatatggt

SEQ ID NO: 25736 - DNA, 4930 bp, Cannabis sativa
aaactattttttggttgaatcataataccaacacaaaatatatcttaacaatatgtacatgtcaattaaataagtccatgctgttttaaattctattattttgtatatatagagaaatattaaagagcatctatagtgcctaatacaacactattggtgtattttaatatcagatcttatttagttttatagaaaactgttaactaattataaggcgttatcttttagtagtgttaagcactttagtgatgtctaattttgatgaataatttgtgttgtgcttcattgattaattaagcttataaattataccattgactttatatcccaaaaaacatggagttgatcatgaaggattttgtggaaattggttggttttttattataattgttttttttcaaaaaaaaaaaaaagtccttttaacaaggatatcatattaaggaagatatgaaatcatgtttaggattttcattacaagaaaataaaaaagaagttgaaaaaatgttatgaaatgaagaaaataataaaaatcaataaattgaaatgaaggatagaagtttaaaatgccaaatagacctttaatttgagttttgcctaacagagcttttagtcaattctaaggtgaactaacaagaagacccttttggataagaaattaaatgagtttgttttgaaagtgaaatgaactaaactacaaaattaagtttgaaaaatctatcattttctatggattaatttttgttatgggatatctaaaagtggaaaagggtctaactgagaaaaaataaaagggaacattctttggtggttgaattatttcaatcaaaaaaaagaccactgactaaattcggtaaccaagattttactatgtgaaaacaaaaccatgtgttgttctgtttcttacttcaaatacttaacaaaggatcatatattcatgtcatcattatatatatttaagggtatttctacactgcttttatagtgcctttttatgggtatatttgtttcgatatttaagaaaaaaatttagtcgaaatatttttttatactcatatacattaagaataatatacaatatatataaaacaaatcatacatgcatctaataaattgttaaatttttatttttaatgtattaatttattttttattttttaaaattttacatgatgtcttaactaactacaatatacataatcataaaataaaattgacaatttttttttttcaaaaaaagtgcactaatagaattttcatatatttaatgtcttgtttggttctgaaaaagtctgttctaaaaatcaaatctttcagcctttcccaccgaaaaacggctagaaatccttgaccaaccatgtgaagctcatattacactattacatgacccaaaaatcacatgaaacaatagtgattatagttagaaattttttaggtatttttattttcttttcttttcttttctttatagtcactcccacctcctcgtgtaataaattcatagacataataataataatagcctttgaaagttgaaactttactaatttatttattttatttattgttttgacatgtgacactttactatacatgtgtccgtgactaatttgttccttataggtacaaattagatacatttctatgtgccatgaattatgctatcaaaactattattaaaaaaaaacacttgcctaataatctcattttcactcacgtaaattacgctttttttttatgactttttttgattagtgaaagcccatgaaattagagaatattagagattatgacatgtttgatagatatactattagtattatccaactgcagaagaagcaccaattgtatggtatggttaggttggttaaagaattcattgattaagactttaacaacaatgtagcatgattattatatgatcacttatcaaaaaaaagtaataatattgttaataataagcttaatttaacttaataatagtattattaggcatcactagtattcaatattcactattaatttaatattattaatgcgtgaaatttaaaattaggctaaattaagacgaactaaaaatatggttagagcccactcaaccctgcgatttagataccaaatttatttttgaaaatgagtaaataatttgttacaacttaagactcaattagtgtggggaccaatcttggtgacacctctaggaatatttagcaatatgtataatatggtactaataaataattgtaacaatatcatatctcgtggcgttaatttgaaatagagacttatactaaatattgagtatcaatatttgagaatgttaaaaggtattagtagtgtctaagacttccttacgtattaatattactattaatgtaattaaatatcgagttctatataatttaatataataattttagggagtattgttaaccaattacaagagacacatttaaattattttcacacttttcactctctcttatgattgtcaccttctcaatctcatatccaataaaatggataaactttgcttcttcttgtccccactaaatctctggtttgccgcaactgatctcgtgaatatcatcacctctctctctctctataaaaggcagagtactacaacacagagcttaacatcctttcttctaagttctaagccctttagcttcattgcaactaataacagaataaacaaagaaacaaaatgacaccctctttcaaattctccctaaagattcagattctaactttatacttaacttcattgctttcactacattcctatgcatttacatcgaaagactacacttcagcacttgagaaatccattctgtttttcgaaggacagcggtccgggaagttatccggtggctcaaaccaaaggctcacttggagaggagactctgccttgtccgatggctcttcttatcatgtatgtacttaattagtacttatcatcatcaccaaatcaaacatgttatggttaataaatgacatgtttttgttttggtataggttgatcttagtggtggatactatgatgctggagacaatgttaaatttggtttgccaatggcttttacaaccacattattgtcatggagtgtcatcgagttcggggacgaaatggggaaccaaattgagcatgctagagacgccattcgttgggggacggattatcttcttaaagcggctacatccacacccgaaacattatacgttcaggtgagtaattaccaaaactctatcgtgaggttaaggctcatttataagaatatgagttactctgctcgttttttaggtaggtgatcctaacatggatcaccggtgttgggaaaggcctgaagatatggacacaccgcgaaatgtatacaaagttactactcaacatccgggatcagatgttgcagccgaaactgcagctgcattggctgcagcttcgattgtgttcaagagttctgacccttcttactcgaacaaattgcttcaaaccgcgaaaaaagtgtttgatttcgccgataagcatcgcggttcttatagcgattcgcttaattcagttgtttgcccattttactgctcctattcaggataccatgtatgctaacaacactacaagattttttggtttgatctttctttttattattttttttctcaccatattacttgttattaggatgagcttctttggggtgcttcttggattcatagagcctctggggatagtttatacttagattacattaaatccaatggccatacaatgggctcagatgatgatagctactcatttagctgggatgacaagagaccaggaaccaaaattctcctttcaaaggtatatatataaatataaattcaccttctcaatcttgtgtaaaattttagagttcgttactgtattgtattgtattgtataatattatattttatgtaaaattatatgtgtgagcacataaatatataatattttagtataaattaaaatttaaaatagtattatataaaaatatgatatataatctaatttaatacaatacaatacaacctaatacgacgtaaaaacttactcttgtttttactcttttcaataggatttctttgacaaaaaagttggcgaattccaaccattcaaagcagactcagataactacatatgttctctaattcctggcacatcaagttttcaagctcaatacacaccaggtaaaaaaaaaaattacactaaaaaatcatcgatttcccttttgtcatttctaaccaacaatattatttggttttgttaaatttacaggaggacttttctataaaggaagtgaaagtaatcttcaatatgttacaacctcagctttcttactcttaacatatgcaaagtaccttaatttaaatggtggagttaccacttgtggaggctcaacaatcacagttgaaaaccttgtttcacatgcaaagaaacaagttgattacatattaggagataatccatcaaaaatgtcttatatggttggatttggtgaaaaatatcctcaacatgttcaccatagaggctcttctctcccgtcaattcattcacacccctctcgcatttcttgcaatgacggctttcaatacttgaattctggatccccgaaccctaatgtacttgttggtgctgtcgtcggtggccctgatagccgagataacttctcggatgatcggaataattatcaacaatctgagcctgctacttacattaatgcaccttttgttggtgctcttgcttatttctcagccaaaagttagtgattctagctaagttaccaagcttagcatttttagtaacaaaaaagttaccaaaaattagtgtgtgtatgggcttgaagtgaaaatatatgaatatttcctctttcccaaaattaaaatgaatattctatcaatttccatata

SEQ ID NO: 25737 - DNA, 2059 bp, Cannabis sativa
aatatacctaaatctacattttgatgattcagattagtgtatgccgtagctgtgttttcactaatgcagtgtagcaattatttgtaatgattacaggtgagggtctaggcagctccagaagtggtattgcgactccaattatggccggtgatgtgaagaccaacaatttgggggttggtgctcaaaatcctggggaggtaactcctgaggatgacatatatgaacagtacaagaagcggatgatgcttggttatcgttaccgcccaaatcctctggtaagcacttgttccttccatccttcattcattacacaatacatttgattattttttaaacatgaactgctcatgctgatgcttatttttgattgatatattcttccagggcaatccaagaaaagcatattactgactcacctgcaagtcatttatttgtttaatgtgctttgcaagaggaaaaatatgttgctgggaaagttgttgttggatttatgtaattcattgtttgtgagtttatgcctatcttcttttggtttgaatttgcacaattattgtatatttttgggtattccccgtctcaaattggtctctttctccgtgtacgttaatgacattgtctctcaatataatatgctctcagagctttctggcttccactaatctattaatctaaaatctcaccttttctacaatttatatatttttttcggaattttcaaagaaaaacttttaccctccttgaattattatttatataaaaaatttctctagagctatagaaacaattacaaattgcatttcgttcatatattgagatagtgtattgacgtataaaccatgcctaaaattataggagtctatttaactaattttaagctagttggaactaatatatgaatgtgagggaccataatgattaggggtgtttataaaataattaatttaaattaatttgtatgattcaatctaatacaatctgcaaagtgcgaatatttatacttgtgcagattaaattggattagaaaatttaaaattagtacttgtgcggattggatgttgattgacatgtaaaaataatcggtctaatttaatttatatatatttattataaaaatggtaaatagcgacataagtacacaaagttttaagtttgtaagcgacataaatccaatgtttattttcagcggcataaatacttaatatttgtaaatttgtaaaactgtaattgtaaaactgtaatttttctctaattttatcagtacacactagggttgaacataaaatctagaaaactgaaaaaatcgttcaaactgacctactgaacactgttagaaccaaaactgtcagaactgaaaaccgaaaaaatcaataacggttaaactgacattgaacggttggttattttattgtaataaactgaccgaaaaaatcgaaatcgaccattatacatatatatatattaatttattaagtttttgttttttgctttatgtattgtagttactaataatatgttattattttattaatattaaaattaaaagagtaagataattagtttttgaacaattaatttgtatgtttgtagttgtaaaatgtagaacaatgtgtttatagaataaattggattatattttaaagaaaaaaaagaagttcggtttaggcagtttaaaccgaccaaaccgaggttcaaaacggtcggttttaatataggttatggatttgtcggtcggtttttggattgcaccaatccagactgaaaaatgaattctagattttttttatagaaaagaactggccaaaccgatcgatgctcaggcgtagtacagactctgttattgtcttaaacaggacacatataaaatccaaattctagatcattgggtttagatagaaatatgtagtatcagttacttttacatgtttttttaataaatttaaaacagaatctgtactgatgaagttggaaaaaaattatagttttacaaacattgggtacttatgccgctaaaaataaacaaaaataaacattgagtttatgccgcttacaaagttaaaac

SEQ ID NO: 25738 - DNA, 1228 bp, Cannabis sativa
aaaaaaaaaatccaaactttgactaaatttccattcaaagcaacacaaaaacaaaattcatcaaattaaaaaattgtgaaaacataccctggaagaaacgggagactcaacctttttctgctgtgtctcttcaaccacttcagggggttcagttgtggcggttgttgagtcattagaagtggcggtggtggtcttgttatcttctccgccattgtcattgccattattagtactgaaacacctaaacctatcgaaatttctcaaggagagttgaggtctgtcagttggaaaggttaagtatcgattcctgggtcgtttgaagtgattaattgtagggatttggcggtgtttgaaggtgaaatcgactgtgttgaagcagaaaccggtgagagtagccattgattccgaagctttaagagctcgttttcacagttatatccaaagctttcatttttatttttttatcaaatatcttttcttttattttttatttatatcaagataggtcctcaaactctctctaaatatcacttatgtccctcaaactttattatatgtcatttaagtactaattacaaccacttatttaactttcacatcagaaattagaatattttttttataatggtatttgttatagatataatatcatttttctaaatttttaaaaaaattgaataagttatcgtactaaaaacaaagttgttgatattttaatttaacataggtgtttaaaatacttcaaatttatttttcgctattcaaaaattttcaaaaatttacaaagatggtattataattataacgaacacaatgaaaaattaaaaaatattctaacttgtgtttccgggtacagaaattgtaataagaaattatctatttttcatattaatcgtaatttaattatttatgttcataaattaaattagtatgtacattgattaaacaatgatcatttcatatttaactctgttacaatgcatttttaataaaatattatatgcttcaaaaaaaaaatatttaatttgaataatttccaaaacatccattttaatttttatttttatgaaatataaatattataaagtaaaaagaaaaattataattaaaaaaaataataaaccatcgactaaaagataaaacatatatttcatttaaaaaaataaaacttatatctattttaaattataaactttgtatcactaatctaatataattataaataaat

SEQ ID NO: 25739 - DNA, 2969 bp, Cannabis sativa
cttccacttatcttaacaaagactaggcgctagagagagagagagagagagcaaaaggaaggaaaaaaattattacttcgtcagaggcagctgttccttctaacatctgataatacttcaatgcagagtcataatgcccaagattcattagtgaatcagcaacttcagtaaccaagtcaatatgatgagcagcattctccccttccagagcaccaaaaaaagcctatacaaaagatgcaccaatcttcagtaacacacgggaataaattaaatataacctcactttacttcttgaaaagaaattagtgtgttaataatggagaaaaaaatagagatgaaagcaagatcagggaaagatctcaggaagcaaaactatagtttgatttaaaaacagtatataggtgattaaaacactctaaatctgcagataaagctcttaaacaatcactaaagccttgtagggttgcttagtttcaaacattattatcaggttttgtttgctaacttttcccgaaatcatattgaagtctctttttagtccattgttgactgatcttcccaatatttcattatgatattaaagcttgtttaacaatttgtttgcccagtctcttagcattgtattacactaaactcttgatctgtacactaggatttcatgttgcattaacttttccttaactttcaattacttacaattctcttatattccagaaaatggaaaggccatcattatcattaatattcgatcgacttaatatcgtcattttccttgttactactagtttaacagaattcacatcagcaatagataaatgaaacaactatctatttagccaagcaagcacaaacctttgctctatccagatttcccaagtgcacatggcaaagccccattttaatcgtcaaattcaaaggcagctcttttcccaaactgcagacttcccgagcatgttcaatgtgatgaagagctttgttatgatcattggtctccattaatgtggaagccagcaaatcaattacacttaaatcagccttagtacgatgacatttaagatagtcctctagtatgtcgatggaatgttcaagctggccacaccttctgtacaactgaaagagaaaccaagtgacatcaatttgattaaaaaaatcataagaaggaacaatgacaaggcaatgacctaactatgaactttgaaagcaactcgtaccggattgtggcaacttacaaaaagaaaaaccgttctactaataatagctaaaacttttgcaacttttggtgcaatatgattagggtagatatttatggaaaaaaaaagaagaagatgatataattttatctaaaataaaacaatgttgaggataataacttgtgcaatctctgtagtttcatttcttccctatctatgtattatattaagaaaaaaaatctaaaataaaaagcagagtttcaacttccatagaatttacagaattctctgtgttagaaagatctaaggtagcctttgcttttgttatgtgatggcatcttgtacttttagttttaatttcttacaaaatataaagacaataaagttaagaacataattatataactaaaagccatgagatgtgaaggaaagatttttaggagattaaataactatataccaagacaacaaataattattaaagctctatagttctacttaaataaacaaatttaatttgacacaaagacaagtttatatagcatattacccttttcaatttaagaaagaacctgttaaccctacttcaatgaagtcaaatcttaaaaaaaaaaaaaagcatggcatctaagtggataaaagaaaaacaaaagggatgaggtaaaaaacctttgcacttgttttcaatgcttcgatattttcaggagagagttgatgtatctgatcataagattcagcagcccttttatagtctttaagttcaagatagagtgatgcacgatgcagtcttaattgaatgtctttagggtctgctgtaattgctttagaaagacaataatttgcttgatcaatatctcctctttctctgaaattgataacaaatagaaagtaagttttgttcagataatttgtcaacttataatctttttaatggaataataaacagaaaaaaaacacattagctagagagaggaaaaaatattacaaaagaacaatgatcctagaacaaaaacttgaatatggagcttaaataattaattaaaacaaatttttaaccccctctgtaagtggacacgtctttccttactctcatatcaaacgcaacacgtctttcttaggaagacactgaaggtaaatcgtttcagtaaaaagtccagctcttcctattcataactatttgaaaatcattatctatctagccataaatcaaaaacacaacatatatctcactctgctccaactcactgtttagtactctactctgtaaataatataatagagtaactcatgacaggaaagcacaagttgaaatcagttccctttataaaaattgctacactcccaccacaataaaactatcacacgtagtcatggaaatcgaccatatgcatggatgaactcatcatattgacatacaaatataccacaaagaaaaaaggtaatctcaaacaatgctaacgacaacaacaaaaccttacattgaccaataaacaagcattttccagagggatgaatctttgggcattaaatgtgcagcaagcaagtagaaacccaaggctcttttcttatcacccaatgcatcatgggcaagtcctagtgtgtgatatgcatcaggcgtaactggtgcttgtaaaacaacctgatgcaacacagatatggcctgcaaaagtgtatgtgaaatagcttagcgaggaaaaaataccaaataaatattatatatatatagatgtacatgttaatacaacaatcacataagattgaaacataaaattacaatcc

SEQ ID NO: 25740 - DNA, 3458 bp, Cannabis sativa
  modified_base (1476)..(1488): a, c, t, g, unknown or other
  modified_base (3074)..(3082): a, c, t, g, unknown or other
  modified_base (3141)..(3142): a, c, t, g, unknown or other
gaaatttgaaaaactgcatgtgcgagttggtttgaaaaaatagtcaaaaaccgtaccacccgcaccgcgaacacccctagtctcacgtgtgtcataggttttggttctctgaaaatgacttcctgttcatgtgcgaggtagatacttttccaagtttcattaagctcggtatagacagtataaatgggtacatatttatcgtgtttcttctgtttcttatctttggacaactttttagagtcgtcttttctttttgatccaaaagccttcgactcgaatgcttcaatagactcgcatcccaattgttttcctgtttcctcgacttaatgcctcctgaacttgttctccaactcgtctattcgcaatggattgaatccctttgctttggaccaagttgttgacaaagatcaggtttttcctgttcaagcgttcttgtaggtccaaatggccatgacaattggctaatctcgttccacctgtagaccatattttgcctttttgatcattgctgcgacgagtgttctcttctcatcacattaatcgattacgagttaccgtgtacctcgtggtagctctcgcctcttcacgtcatgctcttcttcctagggtttgattcgtttcgttccctctatagggatttgtacgacctcctttcctatgagcttggagagaaggttggcgatcctcgactgatgatacatatatcccaggttgtgtccccaaatttcctttattcctatggggaatttccggtttcttggttcctagtggattatagggcatgtcacattcaaggtatccctcagtttcctcagtttgtctctcctgagagttctggggatacctttgggttgtctcctaccccctggtttgcgagtcacgagtttttcctcgtagatctctttctccaaggttaggttgattttgggaactattctcccgtgccaccctgactgcagctacctcacgctctaattcagcattacgccagttttcttcctccaatcgacgcctaagatggtggttttccaactcaacgataggtgtgtagctggttgggttataggctccatttttgtcaacttgattaggaagagactgcccgttgcttatcctaggcccttcgagtctgagtacccaatactttgtttttccggagctagtggcatgttcagatgataaatcaaatgatccttggggactcagtggctcttttccatgacgatgattggttcctttatgaggattattttctttgttgtcatccataagaggaatattattttttatgtaaggaggcttttttctgagctttttcatgaaggctctcaatgaaagcaccaaactgttaatgcagattttcgttaaccaatatttgagcctaatagtgataatctcagatagaaaaataaaaacaataatggaaaaagtatgaacataaaggattttttacatgattttgcagttaaaattctnnnnnnnnnnnnngtcaatcttattagatttctaatgattcttttagggctcctctcttatgatttttttgtcctttttttagtctaacttacctctatttaaattcacatagtaggcagttaattacagggttgactgatattcttacaacgattgtcccctgaaatcttggggtctgattacatatcacgttgaataaatgcaattattattttaatatcacacagctgtgaatatcccgcttttactgggtcaaaataaacatgtattaaatatgctgtaaactgtattgtattggaatgtctcgctgggaatagagtagagtcaatcttcatagcaagctagagtttgtcatatttctttccaaggttgataatacaaatctcgtcgcttttactctgaaaacattacattctatctgacaaccgcagtttttgacgacgagatgatgttttttgtgtgcatgtcttcctatggcgaggtggacgcctcgctatcacttgctttggttcactcgtctgttatacttagtttgtatactgtacattatatgctaagtgtcttcacagacaatatatcttatccacgtaatccaggttattgcctcgtcttgcacacttgaagttacatggtttctcatcgaggcacaaggcaacagtttgttcatttttgtctcgcataagactattcagtcaaccgagttgtaaatatactctgttaattatgcttttaacgagtttttccatctcaagtataattataattacgtgccttagtttgtgttcttcccagcttgacacgtgtttttctctgatgtgctagccaaattttgagtataacattaagtaatttaattaaataggaaaattatatttgtgttgaaaagtaatttatttaattttagatcaacataaattagaataatttttttagttttattttattttatattttttaatgaattttaaaaatgtattttttttataatacatttaatttcaaattctatcatatatatatatagaaacttaaatttgaattgaaaaataattttaattaattgtggaccaaattaaatttagtaattttcataatatttattggaaaataaatttttattttttcagatcttctaggttataattttataaatattaaataaaaatttatatttagagttatctaaattagtaattttaattaaataaatatataaataaataaatagattaaaataagtatcaaatgaaaatatactatttaaaataatgagtattagttttaaggttattcgatctccattgttggttctacacagttcttattttagtgagattcatccctaatacatggacatttattagcaatttaatgccgtagaatctcaaaagataagtattattgtaagtgttttattcttagtaatgtccatctgaatagtggctgctaagaataagacttacaaggtatgaaacaacggtgaaagctcataaatagaaatgaccttgactctcgactaaaatgaagcaacgacgaattctcttttcgatcgaataaaaggttgctataatggtttctattttagatgagttgactannnnnnnnnatgaatgatatctttgactcttgactcaaaatgaagcactgtatcagtttgttggaaannttggaaattatttaagatgtgtttgttttatattttcacatatctttcttacttgctaaatgcttaataatttttaaattgtgtgtgaaatcatattgaacaatgttgttttctgctgttaattgtagttttaaattttgagtcttcattgttggtctaaatcaactaaagtaaaaccaagctcatcaatttttactccataccggcccacacgaccttgcttctctcactagatgaaccattaaatgtatcatgatgtcgaaaaaagatggcagaaaaaactttttcaggttgcacaatgttttgactacatgtt

SEQ ID NO: 25741 - DNA, 16068 bp, Cannabis sativa
  modified_base (10953)..(10961): a, c, t, g, unknown or other
ttggatatccaactttttgtaattggattggattggatcggttcggttcaattggattggattggatgatgcccagccctacaaatgcctaatggaagttacggccctaaaattgactaagattgggcgtcctagtatagcattgtattttgtgtcaaaatctacaaccacgaaggtgtagtgcttgaaagagcatatgtggttatcccctttcaatgtgtcaggcgctgaatccttcccatgggcaagagttcatctccattgaacccttggagttggatgggataaggtgacaaatcaaccttcgttagcccaatttcctgaaatgcaaacttgaacagcatgtttacagagctcccattgtccaccaagactcgggaaacccttttattggtaatttgggcttctatgaccaaagggtcattgtgggggaaatgaacatgtatggtatcgtcctttgtgaatgtaataggtaagttcattgtatgcggacgttgcgatagtgactgcactaaggcgcacatttccccttcactatcccattccctcagatatcttttttggaaatttctcgtgcttcctgcaatatgggggcatcctaagatagtggccacatgtccatcaacacggggtggagctagagccagatgatacgagttccccgatcccaaagctaacactgttatcgcagcctgaggtggcagagcaagtagggctagaagttgtgatctagtgttttagggtggcctactccttgcgaagagtttatagctcgcttctgtcttagaacaagcgattttccatgaataacccctacctgagatatataaatgggatccggatccactggcccaagtgtccggctctgactagagtttcaatttcatcttttaagtagtcacactcattaatggtgtgccctacatcctcgtgatatttgcactttttgttttgatcactcttgtgctttcccctggaggcatccttgggggtttttgatagtggaccatattgcatgttaccttatacatgttttctcgagtattcactaagctagtgtactcggtgaactttggttcaaaatcattcctgggtttcttcaaagttttgcttcaactttggtttcttctgcttctcttggtttgggaatggctcacattacattatgttccagaacctccgcttgttcctcgtctgttttggagcgataatatatctggcttgtgctactctgtacgcaaaaaaatgggtttgggtaggcacctgcccggatgtagaaggtccatagatggtcggtgtactgagtactggggactgggacttgcgggacaaagcttgttaaggacgcaaaaggagttggagcatgaaggactcctaaggcttgcgtataagtatcttctaggttgatgataccttgtgctcttgacataaactaggacaaagtcttagccctctttctttgcatttcgccctatagcaaggagccgcctatacatcctctttgtagggctacgagtttcatgtcatcgctcacctttgtcttcattcatgcctccatcatttgttgaatgaagtcatttaggctttcacctgtttattgtttgacattggtgatcgacccaacttccatgtcatagtcttgggcagctatgaactacttccggaaagtagattgtaagtctttccagctatgaatagatccgggagccaaccttttccaccaatcctctgcaaacttggtaagtgttagtgagaagcacaagcacttagcaacatcacttactcttaccacctgcatcattttgttatacattgacaggtgggttcttgggtctgtacgaccatcgtacaactcaatctggggcatcttaaagttttccaggagtaaggcttccgtgatttgcctgacgcacggctctagatcttcgtcttcttaattctaaagggttccattctgctactgaacaggtttggttaaggcagtaatctgctcctctaacctccttgtgtcactattcgagaggtcgcgtctacgagccatatcattgaaatggttcttaaggtcattttcacatggcctctcctttttcctttagctttttcgtacttagcgtcaagacatcttcggaggtccatggtgttgtcctggttaacggaatcattgcggtggtttttccatcccctggacctgggtacttttgcactagtccctttttgcgcaataggacttttcaaaatagaatggtgtccaagcccaatggcgtcggtggccttctatgtgtgcaaaggtctgttggttgtcctgacgctttttctaggaggtacagcagcatcgggttttgagggtcacctaccttcaccttccccttgtcctttgcagaagctgagatttcagcgttagtagggttttcctattgtttctttcgtgtagttccactaagggatcctcttcggagtcctcttccagatctccaaacttttcttggaggcgagccatcatcttctccatcttttgagaaaacctcttttgacgggctaacttttcctgggtcatgcagctctttggacactcgaactacttatgggtcttgttcataatactacccatctttatagtacccgcccttgacgtatccatcattatcctcctccttgtcttcggcgtcatggtcttctcaacttacttaccatggtttcagcaacaccatggcttaaatctttcctcatctctcaatgaaagcaccaaaatgtttaccgagattttcggaaactaaataaaagagagcttaagaaataataaatatgataagtaaaatagacagagagttttacgtggttcaggggttaatgagccctagtccacgagtcagtatattggccttaaaggcttgtataatattttacaatggtgtttacaagaaaatcctaactctgctctttctgcttctcttgaggaagaagaaagcttaaagtaatttcagcagaacttcgactatctttttttttatcccccttttatgtggaaatgaaggggtatttataggctaaattgcaggtatgaacatgcccatgacccgcctagggtttctgtaaaaagcccattgtttggggtaaaatacatgtaaataactgactgttgggccccgaagaaggtttttgctcgtgtggagaggcaactggacaattgggaccattgttggtatatgacacatgtcgccaaaaggtttcaccttgaaaagaagatgcctagacaaaccttcaagcaaaaaggtatattcaaaggtggggagcgtgcactaccatggtataatacaggagacaagatctgatcatgtgtcagaaaatgtataactgtcgttggggcaatttgggtctctcctcatggtagacgtctggcatcctctgagcgattggtgtccgtgttagactctttgagtgccttccaagtgtctcttggagatatgttaagcttgctcttctctaggttccggagagatggtaaggcctccgggtctcggatggcggtatgctgtgggacaagtctccatgtagctatcgagcttagtcttttcctggaattgcatagcttctccgtgatcctggctaattatgggaacttaattagtgattgtttaatctagtgcttctcactttatgccacgtgtccttttttcgaaaacacggataacacatactaatacaatcgtgatatttcaggccaatcaatcgggtttccactgttgtcggacctaaaagtatgtttttcacaaatagcatgcatatcattcatatttctaataaaatctccataattaataaatgacgcttaatttgcccatttcttaaaataagcaaattttcacagattaacttagtaagattataatgtcactcaatttattctcctgatacacatatacacatatttcgtaaaatatgctttaattaattataattaatttctaggatattacaccctaagtactaagggaactctttacgaaatagttttaagaattatcaagtcttgtaatttctagcaagtgcttgttgatagaaacctaggttacataaatgagcgttttagacctcttaatatagtgtttatgattccacatttggtatcacacactcaatggttgttacaagtcataatttagcagtaaatggagattagaacgttggccttgacactagaaacgcccctattgaacttccaacgttatgtaacatttttacccaaaaagattcttgctccaagcaacaagcaataacattttttttttttgataaacaacaagcaataacattgaacctctcgagatacgtcacataacgtcaaaaaactccatgcattgatttaggtaacaagtcgcccagtacttgaagacatgtcgcctcggacaaagtacttgaagacatgtcgcctcggacaaatttcgcacaccaactttaagttttaactcccctcttctaaccaactcaatctcaaacatcccaatgatcatttaaacaatataaatgaatattgtaacaatttctaacacatagaaacgacaccatttgattttataactcccacatataatttattcacataattacatattatcaaatatgatattataatcccttacaaatcttctattcaaatttgtaacttctcttgttataatttttatttgtttattacattatatctcatataagattaacatccaaacattttaatatatattattctcataaaaatatattaaactatctattatattatcaaataatataacaccttccagaccagagcttccataagtagccatccaaacgtttcattccagagttaagcacaccgaacatatacctctggagacacctagagcatacctttccgaaggtggcatgtgtcctcatgggatgtccttacagacatagccctcaggggggtgtccttctgcacgaagcctttggtagactgtccttccaaacgcctttaacttgcttctcaacatttgctaaattttatggataacaatagaaaattgatctaaaagtgaagatccgtcattgcagacataatgcatgcattgaagagaataagagtttacagtaggattaaaaaatgggttttaataatgtatctaactcaatttattgtccaaatacagtataatttttttaactaattaaaaaatatttttcaaatttaagttaattgacttttagtaaataataattcagctcctaaaatttataaattgctcaccatgaatactagaatcaattatacatcgaagaatgaattcgaagagaagtggaactcaagaaatgaagattggatgagtttagaagaatgattttcagcgttttcgaaacaataaaattaaaattatatatagaaagaaaggtttatatatcatacatatcccttaagataattaccctcttagagaaactaaccatctcgacactctaattttgacttacaagcaatcatcaccgtttgagttaccattacctcctctccgacttgccgttgtattcttcaatatctgcatacaaaacatttacagtaattttattgcatcttcttataaatatttaatgtaagtagtatgtaaaataattgaataattttttaattaaaactgacaatctgacacgcttactcacacggtttatctaaaaggctaaaacctagttgagcttttcctttattttctttcggggactagaagcaaataatagtaactttttatgttttgagggggtacccacgagaagtttgatataatcatttgatccatatgattataaggctcgtaaaaatgtaaactaactttaagaattgctactagcagtaacgaattcagaatttttgatctgggggcttaagtgttataaaaatatttaatatttattttacattaaaattataactattttatgggagctttttactattttgttgtataattatttaactaaatagaagatatttaattttttttcactgcactcttattactgtgtccgtctctggctactaatgtaccaccttaaagtatatctcattgtaatttgatgaccattaaaagatatcgctaacaattcataaaatgttacaagtagtggtactagatactattaatgtataacaatatgcagggctggccagaagccgtccagagagtgaatcaacggggcctaagccttagacatcacaattttggagttctcaaacaaattaaaattgatatatatacatatacaagaggtataatatataaatatttaatttaattaattgcatgaaaaatatatagcacaagtgataagtgaattgtttgttgacattggggtaagggtttgatccctcccttcatcacccttcagttattttgttccataaaaaaagaaaaaaaggtaaaaggccttgtagcatttcaaaattataattaaaagaagaaattataaagataataataaataaattaaatattttaaaaataaataatagtattataacttaaatatttgtattaaatgtattaaagttttttttatttttaaaatattaacgatagtacttttcataatgaataaaatatatatttattatatgttttttaagatatatatatatattaaaaaaatataattttaacacattaattttttttttaaaatatactaaaatacataacattttaatcgagacacttctaataataaaatgttattttatcgagttagcttccattacaaaataattatttattacttataattaaaattaatattatattaaaatttaattaatatatatttttaattttttattaaaaaaataaagacctcctttcaaatttagtcttaggactcttatcacttttaaaacgccctgacaatctgcgtcgactttagacaagtaacgatgatataaatcataggaataattacataaggtactatttatttattcacttttaaaataaataatttatatataatataaggaagatacaaaaaattaatatctaatgtaatgtaaatcaatttttaaaactacattttaattgcgcgcctcactttgaggcgggaaaaaacacactattgtgtgtgcctcagcatgaagaagagaggtgtacgcctcaactgtgagaggcggtcaaaaatggtgtgaggcacacacctcaaataaaaaaccaattttagggtttttcttagcccattttccttcagcaatttaaaagaaagcctaataatacttaacttaaaaaaggtccaataaaacacattaaaaaccctataacacccaaacgaataactaaaaaaatgtcaactgaaaactaaacctagacaatttaaaattaaagaacaaagaagacatattttctaggttgatatttcaggagtaactggaaaaagaagatttatgcttatcttgagtgtaattattgcaagcaagttattaagggtggtgtgacaagattgaaacaacaccttgctcaaactaggaaagatattaaaccatgtctcgaggttcccaaagaagtaaatgatgaatttgtggagcacttgaaacaaaaaaaaaaattatcaaagcatgtgagtcaaatgaatttttaaaaaatagttgggtcgggtaattactattctcaaaaagattttgcccccatgcctattagaggtgtaagaagcccaatggataggtttatgggtagtgataatggagggacaacaactgaacaaactcaaataactcccaaaaatgagaaaaaaattgcataataaagtttgcatggacattgggaggtgtttctttaagaatgctttgcctttttacttggctaagagtccttctttcatcaatatgtgtcgctcaattggagattttgcgaggggattgaaaactcctagtatgtatgagcttagaacatggatattgaaggagaggatgaatacttcaaaagctatagttgaggatattaagcagccatggtcactaacgggagtttcaataatgttagatgttggtcagacattagaaaccgaagcataatcaacattttagttaataatctcaaaggcactatgcttcttaaaagtattgatggttcttcatttagtaaggatgcacaaagattatttaaaatggtggataatgtcaatgaaaaaattagagagtatctagttgttcaagtggtcactgaaaatgctagtgcctacaaaacggcaggcaaattgttaatggagaaaagaaagcatctatattagaatccatgtccagcacattatcttggtttgatgcttgaaagaattggtgaattgccacaacacctaaatgccttgtccaaaggaaaaacatcgagcaagttctttcacaataatcaatgggtgttaaacttgacaagataatattacaaaagagatattataagacctactactacaagatttgcatctgcatttcttacattacaaaagatacatcaagttgaagagtaggcaacttgtccttgggcatctacagctaatggagaagaggcaagatacatggttttgaaagtcacatgtttttgggcaagtgcgtcttatgtcatatttaagaccacaaaagctttagttgaactgttaaggttagttgaaggtgataaagaatcaactatgggttatctctacaatgttgttgatgctgaaaagtggtcaacaccagctccctaaattagcgagatgaataatgactgtaagtacataatttaaagagacaaaatttatagtatttcactccccatgtcacgatggtaacggacctacgtctactttgatatttttttctcatgggatagaattacagaaaaatagctaaatgcttaagctctaattgtaagagagaaaaattaaagagaagtgctctaaccttaagactacttttttaaatatgaaaaatgagctagatgaactctccttattttataggtgaaagaagcccttaaatataggaaaaaataattcaaaatatgaaaaaatttaaattggctaattttgaccgtagatgatagtctaacggtcaaaattaacttctaaggttaataatcaattttttgagcccgagtcacagcgggagaacccactttgagtaagtcaaagcttatttttgtaacgccccttggggtgaaatttgaggttgataacttcaaaattgcgattgaagtgtgagacatgacttgatagagcgttgaaatagcttcgaaacgcaagttgaatggcgtcaatcagatcaatatggagtgagttataatcgttttacagaagacagttcataaatcagcactcaggttgacattcagcccccaggttgacgtcatatgtcaacctggacgttgtgtaagtgaaaaaaacttctaggggatgtactttatgatgcctaagtgatatttagacatcacttagacgatttttatgctttggcaaagctagtcaccatttctcagagatgttgctattctgctcaattgagagtctcagatctcttcatttccgaatggttttcccatgttggaaatgagaaatgcaaagttgtgaatttgccttcttaacttcatggatctcaattattgtgaaaaactagacggacggtcgagacggaattaaaatcaaataagcagtatccaacgcatcatgccatttgtcaacctgggtgttgggtgcttatttcgaagctttcgggatgtcgttttgatacttccaaggatacttccaaggttctagaacttaaggttctagaacttaaggacaaggtctcttaatcggaagggatggcgatttggaatagctttagttggactttatcattaaataaacgtttatacctaaaagtatgggcggacctatatagaaacgagaggaataaaaactgtgaaaaaatatatatgtattttaattaattataatatatatttgtattaaatgtgataaatataatcataatattaacttaagattcattaacttattttacatatattataaaagtgtaagttcaaatcttagtaaaagtatctttatttttaaaatttactttactttttatcaaaaaaaaaaaaaaaacaacatgccaaaaagcccttggtcacaaaacataagaaaaatatgaatgaggaagataatcgtaataatggggatggatggacatacatgtctaagcatctgattctcattctgcagagttgagagcttctcttcaagctctgagttctttttctccaaatctttcactctggtttctaaatcgctcaagtatgccttcttcctctctcttgcttgttgagctgaaaccctgtttctcagcaatcttaacaagcacaaaatcaaaatgagaaatcgttatatccaaaatgtcaccgactttatattaatagattagtgaattttaaatagaatgggtttacttagtttagttacctcttaagcctcttgctttctttgtcagctgggtttcttcctctcttcctctggccctctccagtgacttgaacccggtctgaaccggccactgaacccgtgtcccgacccgaagccgacgttccagccgactcaccgccgatttccgggactctcctgatctcctcatcactttccatagctaaaaatgttgaagccagccaataaagcatgagctaattttctctagaaatgcgattatcagaaataatttttattttttttcttttctgaaatgataatggatttcagttatttgatctatggtaacacttaataagatttacctattattctttaacaaatagaaaaatcgtaccttctttaacttcaacatgaagagcagagcttgaagatctttcactactcgaaggtagagagctagctgccattgaactcgtcgcctgttcttgcatttcgctaaaaactagagagagagagagagannnnnnnnnagagagagagagagagagagtcacggcggattttggaaacgaaaatgttaaaaaagggcgggatatcagtgttggggatagttaagatcggagagagtgtgccgttgatttgttttgtagatcgatggttcggcaagtggggaacgtggaagaatacgagccataaaaagtgggctgaatcaaaggctacgaggtaaagatcgtggttgatttttgattgttcgatgtgtctcaatctaacggttagaatttagatacaatagactgggaccacagtatgtgctggctgaaagtaatactgtttttgggttttcggaaactattatattgacgacattgccaccatgcaatttctaatctctattctctatccatctatcgtgcacgtgcaatccttcgtgtgtttattgtgatatgcgccttgttgaaaatatatatcagttgtagaaatttgaataattagtatttttttactttaaattatgacactatcaaatgatacactctataatatggagtttgttaaaaatattccttagtataatatagttggataaatttgtctattttattaagttttgttacacattactataagtgttatatttcaggtagtatttttaataaacggtatagaagtaaaaatattaattattttgaataaatataatctttttaaagaatgtgttgacctcgcttttagccaacgacagtgagtcaattaataagcgataaagaatataacagagcaaaaatcagtaagcaataaagaacacaagattttaaagaggttcggcggctttagttcagtaatagtctactccccttgaattgtattgacttgagaacaaagaatacagggtttcctctctcaaaactctcacaatgaaacctatgagcattttctcttagatctctctaaagcaattctttcgatccaatttacagtgaggatggatcactatttatagggctaaatgcatgaaggaaggtttccattttgcttacaatatctataattggtaagaacatacattacatatttagaatacataaaatgagggattcgaacatcttaccatatcgctttgatacgatcccatgattgtagggattgcttgtgtgcttgagcttcacgatatcaatcctgaagtagctaagtcttgatacactgctcggagaaatgacttcgtttgttgtccggatcatctgcccttgccctgctcggcaggcagactttgtccgtacagatgtatggctgaggtctgttcggaatatctctccagccaaatgtaaagaatagcagacacgtgtcaccggtatgcgttgccatgtcatggtgcaaaaaataagataacatttgccccccaagtctacacgggacttctgaagtcgcgcgtagacttcactcagcttaagttcgtatctgaacgggtggcacgtgttcgatgcgcctgttggtgatccgatatgattctgaccaaaaatctcttcattattcggctaataaatgctctgatcaattcgtacctcaaaacactccaatcgattcgcatgctttcacggttgcccttctccaggtacttgattacttttgatttcccaacgtttacttttggggggaaatcgagtcgtttaaaatttgaaatgattacaacctttcactaatctgcttataaatagggcaaaaaagtcctaataaaccacttttagcattttcttgtttaataatctcaaagcaagaacaccttttttctctcaaattctttgaggaatttccagaaagtgtcgatcagtgtcatccgaacaacctaaagcttcggacagtgagtaagttccttatcttttccttttttaatgtttgaatctccaattttttgggtttctattgtagaaaattcaataaccttgaacttgttctaggaaaactgtagagaatctgggtttagaaaagtgaaactttgcttgtaattgaccatataacttgactgttgtggctttttgactttaatttcacgatattcggttatcactttgcccattcggggtttagtaaggattaacccttaatttgaggttttgaaattctgggttatgaacctaaatcacgtgaaattttcctttttaatcttttgattggacctggtcggtatactttgttgttttttgttcgatatcccagccaaatactcatcttgtgtcttatcttttgtagatgaaccctggtgagttttggggaggagaacatcatatcgaccaggatcttctccaactcttgtatgaggatcaacctcatctttacgctagtccatcctcatcaagcgacgaactttctaattcgagttttgaggattgggaggtgagcagtgaaggtacagcgtccccagaacccgaggtgcatcaccatttttactctgaccagatcgcaggttaaggctacggacgcttcatttgggaactcaagaaggggtggagacgttacttgtcgtccaactggtcatacattgtccggccagacgtagttgataccatccctgtgggtcatccatgttccggtgcctttggcattccttttgccactttttccgtaattgttgctaggcaaaccaaccaaccaccgtccagggataggatgatggcccgcacaaaagaaactatgcgaagaattgctgccactgatcctcacgtggctcggcttgccacactaccgagagctgaataggcccgaccttttgttgaagaggaggagagtgaagggacgttgaagtctaagaaatagaggaccagggcgaggtccatcctaatagtccctctgaagtcgaggaggaaggagttgctcggccattgcgcttcgggggttacaatgaagcaggggaaccggtgtccgaggtcggtgatgtcctagtaaagggtgatgattacgtcattgaggagtacgccgaggaagttcttcaaaggaggcaaggtgccttaggagctcggtgggtgtctcctccatctatagtaacccaggctaagttgaggagtttggagaaggatggatacctgggcggtgtcgattgcttcttcccttctccaaatcattaggcaactaatccaagagtgggatttgtgcctggtcgggggcccatactaagcagggcgccatagggcccttgcttccgtactttaggaggattgtagattactaccatttctatccgacccaatttacaccaaagggcatcaagtacttatcccccctatttatcccctacgattcccaaggatggggtgagccgtctccgcacgacaccaattggcttttcgacttgaagtcaactcccaagcggagcagggatggggtatttctacttctcctaattgaacgagaaatggctaaagggtattgtggactccaatgtcagcaaaatagggcattttgtggacgagtactacttcgtgcagggcatggatatcgcccacactcggttccagcagattccctcgtactgccgccctcttttcacattaggactcagggagagggcacaaaaaaattctccaactgctaaaggatgctcgaaatatcactttgttgaccattgaggccaactttgtgaagtacaagctcttcccaaatgattttatgccaaagcccgtgaaagagaagaagaagaagaagtccaagccgaaccgagctgatgatgccaagccggagaaagagctcattcaactcaagagtgaggctaagttgaagggaggtgctgcggccaagtagtatgctcaagaatattcagagcaggagtagtatgcttaagaatatttagggaacctggtatgcttgctcagccatctacccctgtagagggaaaaggacaagtcgtcctggtggagcaagaagactcttcagatgatgatgctccatctgtaattgttcgggaaaatgcccctgcccgcgtgcagggtactttaacttgcatttacttctcttattctatgcttttcacatattttatgtctgcttctgactgcattgttttatctgtgcagaaatgtcttagaagatgatccaggccttaaataagagagtgggagatagctcgggccagtctcctccggccaagaagtctaaatgtggtgagactccatctaaggagaaggcaccagttgatgaggtcattgacctttccgaggagtgacccgtggtcgaccttccagtttagagggtcttgaaatccaagcgttccagaggagggagctcggacgggtctgaaaaagctaggaccccttcaacaaccatggcgttgtgcacgaaggccaagaggggcaaatacatgttccaatattatctgaaccggtcacttctcgatgtgagtgatcagctgttcggagcggacagtgagctatccttggaactggtcctaggaggagtcttgaggaagctacttgggaaaatatctttcttttttatttcgttatcttttatgtagctcgaactttaactcgcttgtcgtgcaggtcaacatgaagatgtcttatgcctattcccgagccaaattagctgctaccaagaaccttgccaccaccaacacactacaaagggaggtggatgtggccagaaaggaaactgaggacatgaggaaccagctcggggaagtgaggaatgagcttggagaggtgaacaagaagcttcttgctgctaataccaaggttgaggagctgaccaaagagctgcaagatatgccttcgaccgagcagctggaggctgacaatgtttccttatccatggaagtcaataatctcaaggatgagagggagagtctccgtactcctctttccaatctagaagaggatgtcaagaacaaacagaccagggaggaggagctcgagaaggagatcagagataagcggcccaaggaggaggagctcgaaagggaggtggacgtcctagagacagctgctcttgaggttttttatgatttctggaaggctaatcctgaaggaaactttgtttaccttggcgattccaagagcgtgtatcttaatttttgcgcgactcaggtggccaaggaaaaccccgaggcagctacctctacagcccctaccgaccagagcactgaagttc

SEQ ID NO: 25742 - DNA, 3919 bp, Cannabis sativa
tgcgtgaactctgaattgcagagtttagatgaagcagagaaaggagcagaggaaggaagatggagaagatagaatgaatgaatggaaaaagaagctcaatcaaagattggcttagtcattgcattatatagcagcttgagtacaagatacaattaacagaaacatcataacagacttgtaacagacctaaccaactaacaatcagttattaactaactttgtaacaaccattgtatcaggttctctaatatccccctcaagtgacactggtctaaaccaagtgttaacttgtcatacaaaaattgaaaagatgtagttggaagtggcttagtaaataggtctgctaattggtattcggaggcaacataacgaacatcaagctgttgagcaatgactctatctcggacaaagtgaatgtcaacttcgatgtgcttcgttctagcatggaaaaccgggttggaagccaaggatcctgcccccatattgtcgcaccaaaggatggggcattgagggagagaaatgcttaattctgtcagaagggactgcagccagatgagctcagatgtggccaaggctaaagctcgatattcagattctgtacttgagcgagcaacaacagtttgctttttcgaacaccagctgatcaagtttcctccgagaaagatacaatatccagaagtggatttgcggtcatcatgacaccccgcccaatcagcatccgtaaagccttggagatcaaaaattgttgctggtttgaagagtaatccaacatctgttgtaccagcaagatatcgcaacattcgtttacaagctgcccaatgttcagaggtaggggactgcataaattggctcaatctgttgacagcaaaggcaatgtcaggccttgtcattgtgaggtattggagagcaccgatgacactcctatacactgttggattggtcataggggttcctgatgcagcagtgagtttggtagtggcacacattggggtcggttggggcttggagtcaagaagctgagtcttggatagaaggtcacgaatgtatttttgctgtgttaaatgtatagcagtggcagttctttttacttcaaatccaaggaagtattgaacaaggccaaggtgtttaagagcaaaaactttgttgagattagtgatcaagctttggacatgtgaggagtcggctcctgtgatgagaatatcatcaacgtagaccaagattagtatcaagtggccatttatggtagtaaagaaaaggcttgaatcagctttgctattcttgtaaccccactgaagtaatttatcttttagagtgtcaaaccaagcccgaggggcttgttttaaaccatatattgctttgtgcaatttgcatacatggtttagatattcggtgctaacaaatccttgcggttgagccatgtatacatcctcttgaagatctccatttagaaaggcattattgatgtctatttgttgaatgtcccaaccataagtgacagccatagtgaacatgatgcgtatagtgcatggctttataacaggactgtaagtctcaaagaaatcaatacctggtgtttgttgaaaaccttttgcaactaatcttgccttgagtctttccacagaaccatcagcattatattttattcggtacacccatttgttttgaatcacaaccatgtcacttgtacgaggcaccaaagtccatgttttctttctttttgaagcaacaatttcatgacccatggcagcattccattttggatttgcaagggcagccttgagagtagtaggttcttgttcttgagtggtgtaggcagcaaaggtttttggtttaaaaactccaagtttggaccgggttatcataggatgttggttgtgagttggagcaggtaaaccagtggttgatgtggggtctgtggtactggtttggggaatatgagagatgggggaagtgcggatggcagcagtgttgttgggagagggctgggatgttggagattgaggtgtaggctctaaatgagtaactgggggtgttagagtaggttggacagtgggaactctaaaggcattactgtctataattggggaaggagtgctgttggtgtggtgaacagggaataatgtgttgtgagtaaattcttcctcattaagggtaacatttctagacacatagatacgaccagaaggatgtagacatctatatccttttgaggagatactatacccaatgaaaagacacttggatgatctaaaggcaactttatgttgttcatatggtcttaaaagaggaaagcaagcacaaccaaacactttgagcatgttataatcaggtgtttggtgaaaaagcttctcataaggggagatgtagttgagaataggtgtgaggagcctattaatgagataggatgcagaagcaaaggcttcccaccaaaaatgtaaaggcatagcagcttgtgcaagtagagttaagcctatttcaactacatgtctatgctttctttcaattcttccttgttgttgatgagtgtgggggcaagaatttctttggacaatccctaaagatcgaaaaagagcatatagaggttcaaattctttgccaagatcagattggatgctttttatttttgttaggaaaaacctgtcaacaaatttattaaactgaagaaataagccatgtacttcagattttgctttcataggaaatatccaaacaaatttagtgaaatcatccatgaaactaacatagtatttgaaaccatcattggaagaatagaaagagggaccccacacatcagttaagatcaactcgaaaggctgagttgttttattggctgttcttttaaaactcaattggtgaagcttgccaatttgacaagcatcacaaaaataaaagtgtttacatctttcattaggtacaacagtagataaaattttgctcaaaataggggaagaggggtgcccaagtcgacagtgccaaatattggcagtcttggatttggtgtagactaggttactggttgttgtatgattaaaagctgctggtttgttgacttcaaaggactgtggggagcttgaaaatttagaggaagagacttggagtttgtagaggccttcattgagatggccctgaagaagaacttgcttggttctcttgtccttaataagacaacaagaatcatcaaattcaagaataacattgttatcttttgtaaattgtgatatgctgagcaagtttttggtgatgttaggaacatgaagaatatcttgtaaaagtaaagattgatgtgggaaattggtaagaatggaactatggcctatatgatgaatgggaagagtggaaccattacctacaaccactttggctttacccttataatcagctgcagaattgacattggaagtgtcattggtcatgtggtgcgtggcaccggtatcaagataccaagcagtagagagatctggtgttgccgcattattggaattggattcagtcaaaaaggcttgaggattgtcattattggaggaactggagttttgacctggtgtagtgccattgaatgtgacatcgaagcgatgataacaatttactgctgtgtgtccaacccttccacacaactaacacattggtctttggcctcttccacctcgattcccattgttgaatctgcctccccttgttgaaccacgatatcctctggtgtaattcgatcctcttgtgctgctgtttgggtttgcattggcaagattggcttggacattgtgaagagtctcagttgtgaattgttggattctcatttcttgactttgcaacatgaactgaacctcttgaagagtgagggattcagttcttgtaacgcccttacttacgtaaaataagatgccataaataaactggcgttaagatactaatgttgccttta

SEQ ID NO: 25743 - DNA, 1779 bp, Cannabis sativa
atatatgaaatgacataaatcatagaaaaggagaagaaacaccaatggaagacatctatgattgtatatacagacaaatcaattgaaagatcgatggagtgattcttactatatataacaaaattattgtgatagcatctagctgctatacataataatatagctcactttatttatttattttgaatttttgaaaggaaaaaataaaagtatggaaatgtgtggatatataaacttagaggcccaaattcctttcaagaaagtaaaaaaaaaaaaatgaaaaatttagaggacaaattaattttgcaaacaagacaaaagtccatccccatttcccacctttgctttacttatttatgaagtatatgtagctagctagcaacataaaccggttagagaaaaggtacaaaagaaaattagtcagtccacaatcgatcgagatcggctttgtactattcatcagtacttgtttttaagagattatatatatgtatatatgttttgaacattcactttaaaaatagaaaaaaaaaaaaaaaaaacccaataattaataaggtactacatgaatataaaagttcttataggatcatccaaatgtaatggttccaaagtttggaattaatcaaaatttgtttatgtttggattagaattctagcttattacaatgtttcacattattaatatatttacatgactattaaattattaatgtcttatttaattttacatttatttacatttattatttacatccaagaagtaagacactgtagttgttcttaaaataaaaatcgagaaaaaaatgtatatatattttaattagttacgacatatatttataataaaagattatatttataaaaataatattagtacttttaatgtaatatttaagttatagggaaattattctatatactatttttttaatttacagtttgagttgttctatagttggtctagtaattttatgtgagttgttgctatgtgagtttctacatgaatttttgtaaaattaaaaagaaaaatttattttaaagtataaaaataaaaaatttcttaaactatattacacatgtgggattgaggtcaacttggttattggccattggttgtatcttaacttggttattggttgtatcttaatcaataactaaaaaattcatacaaataatatatgtagtcgttttccaatcaacaaatctaatagtgaactagtggagtagcatgtttgacaaagaataattaattatgtgtagttgatgttattacaataatttatttatgaaattacatttatattattcatatatatataattaattaagcattaatttcaattagtaaaagtgggttgattattagctttacgacatatatatatatatgcaatatttttaagttttatttaaatatgtacatatgtaatatttttaatacaatattatatgtccacgcgaagaacaataatataattgaaatttataattatccactatgattatatcatagacccaattacatatatatggttagatcaaagacccaattacaagagtttgctggaaaaatcaagttaggcctaaatttgaccagctggcattggattggccgccacttggtcgacatatatacagtcaatttataaattattattggacatttttcataattaattaataattagtgatattttttacaaactatttttttaaattataatggtctcaatcacactaataacccgaatataagtaccagtaatatcttttagt

SEQ ID NO: 25744 - DNA, 2182 bp, Cannabis sativa
atctaatttaatccaattataaataatagtagttcgatatctaactttgattagatatgaatagttaaattctaattaaaatggatcggttactgaatgatattttcaaaatctaattacatataatgtatattaaaagaatattatgtttatttatatataataaaataatatttaaattttatttttaattgttgttatataaatttacatcaaaagatccatataaattttgggacgcatcccaagtaaaaatgtcatacacaacatgattaggtcatctccaactcaacactataatgttatatatagtgtaattttttccactttttactccaaccgaactctattattcaacttattttcatggggatctacagtatcccactaataatagtgggcactatagaccacgataaatcttttttttttttaatttttaatttttaataattaaataatagttttaagaaaaaataaataattatatgtattaaaatattttattatattgataaaataatataataataaataatatatttttagtgtaattttcagtgttatgattggaattgaaaaaaaaataatgttaaaatagtagtcttttagtgttgatttaacactaaatttacattttaccattagagatggccttagtaagtctaggaatccaaaaaatctaagagaatgagcttctcccaccacatccaacagcaactcgaagaggaaggacaatgtcagacttctaaagccttaatcagcacttggcagtccaagaggagattagcctcattacaaccatttttcctgcaaagagaagtcgcgaaagggagggcatatgcttcagcttataaagaataagaagcggggacttttatagaaaaagcttcaacaaacgaccctcccggtccaccgccaagatagcaataaaggcaaaggagccacacatcgccgcatcagagtaaactgagacaccattcctagggggagctatggaacaagcagagggggcttaggagcaagctgcaaagccaaccacaccctacacaaatcttgcacatctgccagagactgacacagaatggaagtcgaggattcaatagaatcctcatggaaagccacattatgagccttccacaaagctaaacagagagttgaagccacctacgtaaacctctctcactcagtatcagaaatcataccagctaaaggatccaaaatccacctaaccatgtccctggtagaattaaaaactaaagcctctcttctaatgccccactgagtagaaaaataacacttccgagccacaatacatttgaaaaacacatgggaaagagaatcttcattatggtcacacaaggcacagtgcataccaaaatcaaaaatagcatggaatttctagctaataggaagaatattcggggcagtcttccaaatgaatagttttgttctttcatgaactggagcaccccaaagactctttaaaaggtcgttctaaggactcaatctctgcttgatcaatgaggaataaatattattaatatatattgtgaattctaaagtcttaataatctttcatctaccatttaatcatcaaatcccttttaccttgtttattttaaattttatttattttattttattttatgaaacaaatctcatcaattatttggagctaggttagagtttaattaattttgagtttaaaaagtctctcttagatataaatcgactcctttgggttcgacctcgtacttatatgaacactatattccatatccgattcgtgcacttgcgagtataaatatttaaaacacacaccataattaagtgtacgacaccaaccttgttctaaagataatggtaggcgcctataaccattatcctatccctatgaagtttatctttttagattaattaattatttaattaacttaattaggtaaatatctaatttgaaaagtagttatagatatttcaagtttgttaaaatattaactcaattagttgagaaattccctcataaatatcaataaccgaatttggttatagatatttatttatttaaacaattaaatatgatttaattaaaagtatttaactactataaataggagtctaatttgagaaatcagaacagtcttcatgaacttaaattttcaaaatttagagagaaaaa

SEQ ID NO: 25745 - DNA, 1274 bp, Cannabis sativa
aaaatgtgtggaatgggaaaataaataataagaaaagaagtatcctttaattattacatggtgactgggatgaaggaaaattgatgcaaatatgatttgacaatcaattttaaatttaccaaattatcagttagtggatagaatacagaaggaaactggcccaggaacatggtgtaaatggtgatggtaaaagatttcttgtatgttatatggttaaatgtttttcttcctgtcctgtatttgtacacagctaaagtacgtgtgtcaatggtttaaacacaattttatattgccgttgagttaacatcttttatccacagtttctctctgcaggttatgccaatatctagtgtttttcattgagataattttcagagttcttctgcctgagattttttttgttgcactttgcaggctcaaataaagcaggtagggtcttctcacacagctgatcatttgagcccaggatctgttctggaggcctcgttctcttgtagcagcctggatgaaagctcaggtacataaaattacatggtagataagtaactcaatttcttcattcttgtctaagacttgttcgttgtttgctgctaattccaggacatatgttgttctcagaatctatggactgctccagtgatcaattgcgttgcttgggtcaagattctgatctctcagattctgctacctcgttaagtaaagagagaacttgttgcgagaggatgacaacccttgtcaacaatgtttctcgaatattagatagcatcaactttgacgggggaagattgacagaaagcaatctggctcatgcgaaggatgttattgtgaatgctggattattgtttggaaatgtgacattgtattgcctagagggaacagaaggtttgttcattggtcctgtacttcttgatctggaaaaggttgccaatgctgcgtggacaaatatcaacatttttactggtacagatgccaacaaaacggaaaaccaatacagagtattgctttttgactgtctgatagaatgtttagaatccaagtatggagaatacaccaactcaaaactcaaagcatggacaagattcgcttcttgcatgaaccgggagatgataattggagaccttgaaaaggagatgaacaaatggacatctttggctgggatgcttcctgaggatattgtagaatgggaaatgagtcatggtcttgggaaatggatagattttgatattgaagcatttgagggtggtgatgaagtttgcagcaacatttttcaagat

SEQ ID NO: 25746 - DNA, 3767 bp, Cannabis sativa
ttgtgagtttggtacaaaacagtggaaagttgtgactagaaataggcttcgtgagaccatcagcaatttgatctgtagcaggaacgtgtttaacttgaacttgtgtccgaagaaccttctcacgaacaaagtatagatcaagttctatgtgtttggtacgcgcatgtagaaccggattagcagccagtagaacagtgctaagattatcgcaccaaacagtaggaggtgtaggttgaggtatctgaagctcagaaaagaaagattgcagccaagtgagttcagatacacagttagctaaacttctatattcagcttcggtactggaacggctgatggtctgttgctttttacactgccaagtgatcagatttccacctagaaaaatgacaaaaccagaagtggaacgtcgatcatctgggtcggaagcccaatcaacgtcacaaaatgttgtgagatcagtggagagggacttgtgaagatgtaggccatggtcaattgttccactgagatagcgaagaatccgtttggcagcttgctagtgcggttgtaagggagttttcatgaactgacacactttgttaacactaaatgcaagctctggccgagtgatcaaaaggtattgtaaggcacctacaatcgacctgtatagttgtggattatcaaacggttcatgaccacgtgcagaaagttttaagccactgatcataggagtgggaaggggctttgcatcctgcatttgagccttgacaagaagatctctaatatatttcgactgtgataagtgtagaccgagtgatgtagtttggacttcaattccaagaaagtagctcaaatctctaagatctttgagggagaattgtgaattcagcgattgaacaattttggcaatgagagtcgaatcacttccagtgatgataatatcatctacatatactaatatgaaagtagtagatgtagatgtgtgtaggatgaatagagacctgtcagactttgaagaagaaaatccaagagcaagtagactagtatgcaacttatcaaaccaagcccgaggggcttgtttgagaccatataaggctttatgtaatttgcacactaggtgaggggcagagggaagaataaaccccgggggttgttgcatgtaaacctcctcatgcaaatcaccattgagaaatgcattattaacatctaattgttttatatcccagccccttgatattgctaaagagatgaacactcgtatagtaaccggtttgacaactggactaaaagtttcagtgaagtcaaagccgggttgttgatgaaaccccttggccacaagccgagccttgtacttggaagtagttccatcaagattttccttcttttgatatacccatttgcaacctatggcttctcttccttcgggtagaaccacataagtccatgttttatttttcttgagagccaccatttcagtagacatggcattgttccaatgagcactttggagagcttgcttgacacttagaggctcttgagaaaccagatatgctttcaattttctgatgccagactttgcacgagtctgcatctggtgtgagttaacaggaaccgtggaggttgttgacattgcaggagcagctggttgggtaggtatatcactagcagatgtggttggcacaacatcagtaggagagacagtaatgtcactcattccagcaactgtaggatcaggtcgaggagaacaaattgcaaattctggtgtatgttgcagaggcaatgtaagagaacctggagctgctgtagtcaatggtacattttgaatatcaagcacagtaaccggttcctgcataggaagagaagaactacacatagtgttagagttgggaattgatgagtgcttactttgtgtgtgagcagtgggaataatagcagagggataaaaagaagacatgatatcggcagtaataggtgaatgattttgtgaagcataaggaaatgtgcactcatcaaatataacgtctcttgaaatgtacactcgacccgattgatctaggcatttatatcctttattattgagactatacccaataaaggtataaggagaggatcgaaattgaagtttgtgcctattgtagggtcttatgttaggataacaagagcagccaaaggttttgaatgtggtgtaatcaggtgggatgtcaaagagagtttctataggtgatttatgattaagcacaggtgtaggtagcctattatgaatgtatacaattgttctaaaggcttcatcccaatattgtaaaggcatggaggcttgggcaagtaaggtgagaccattttcaactatgtgtctatgttttcgttcagctaggccattttgttcatgtgtggttggacatggatgtctatgaactataccagcctcttgaagagttttggtaaaggatctatattccccaccccaatcggtttgaagaaccttgattttggtgccaagttgtaattcagattcaactttgaaatggtgaaaggtttttaatgcctcatctttggttttgagcatgtagatccatgtaaacctagaataagcatcaacaaagtgaatatagtacttatatccattagtgggaggaatataagagggtccccataaatccgagacaactaattcaagaggagtggtgtatgtggtttaagatgcctttggaaaagggaatttgtgaattttgcctaagcaacaagctgaacatacagaattagacattttattggcattatgaatattacgagcttggagcacagacttgacaaccttttcagaaggatgtccaagtctattgtgccaaatatcaaaaagagacatattattcatagtgtgtacatatgtaacagctgtgtttgggaatgaagttcttgttgtagcagtaagaatttggggctgcatagactgtgaaagagtggggctgctggaaccagatttggaaggagatgaattcagcaaggtcagttgtgatgaatcaaatgaatacaggccattctggtatctcccagtcagcagtatattgtgagagacttgatctttgacaaaacaaacatcggggtgaaactcaaaatatacattgttatccctagtaaatttagacacacttaataaattctttgttagtgtaggaacatgtaataaattgctcaatataagaggagaagtaatagaagcattagagaggagggagtgaccaatgtgcttgatagacaaacctgtaccatcgccaacaaacaactgttcagacccctcatagttggagcttgaggccaagttttgagcatcgggagtacaatgattggtagccccagaatcggggtaccaattgctatcattctgaggtgaagtgtgcattaggttggcttgaagagaaggagaagcatggtttgtttgggcaccagtaaagcttttatcgaatcgataaaaacaatccacaactgtatggcctattttgtgacaaagttgacactgcgggcggccagaagcagtagcagctcggcctcctctggtagtactgctgcggttgggttggggattgtactgaggctgctggtagtgatatccccttggaacaaatccatttggatagtactgtggagctcctcgagagatgcctcttggactagaaaaatttggtgcaaacgtaccaaactgcaagggatatctgggtggaaaaccaggaggatagctggttttgaatcgattttggtaagccagattggcttcaggctgttggtcagtctca

SEQ ID NO: 25747 - DNA, 1879 bp, Cannabis sativa
ggtaaaataatttctaacagtatctatccccaaaactcatgaccttcgaccaaaatttctttttcgcatggaagtaagaatacattattaattattatatatatttgttggattgcatttgatttggaacatgcaataaaacagaaacatattttaaggaaaacaagaaaggtgagcatgtttgtttccttttcttttttattcaagttatacaactgtagcagtgaaaattcagagaataaccttgtaactgtaaattggcatgcctactgctgtggcacgcttgaagtcaaaacccgtatgaaataaacgggtttgagttttctttaaattaattgagttatttttggaatgatacagctaacctgtttattaaatgagtaacttttaggctgacacgcctaacgcacaacaacatatttaatatatacggtattatatttattacatataattttttttagtgttagttaaataagacataaatttattaaatatgtcaatgggttgtaaacatgttaaacttgttataaatatgtcaatgggttggtaagttgacaaaaatgaaacatgatcttttatataaatgggttacacgggttggatcagataaaagggttgggtttgtgttttagttttgacacgattaataaataattcgggtttggatttactatttgtttgtaatacttaattcttgacacgacacaaacacgaattgctacccttaatttgtacttgtttaaggagggatatttttatccgtgttgactagaaaattaatttgtttttagccctttatgttttgagatctagaaaatggagttttgatcaaaggaggcaagaagaagactttggagagcaatttttagagatcacatcttgttttttttttttttttatcggtttattttgtcattctttatgttaatttctattttgatggatgttttatcataattatgaactgatctttaattagggtttgtaattaaatctcttgaatatttgctgtgaataaatgtaaagttgatttcattcttccatcttaagatattttaaatttgtttttattatatatgaatgcttagtgactgtcttacataatctatatgagtttgagtaaaaatttaaaaagtgagatttgagtttgagtaaaagtttaagaagtgagatttttttttttgaatggagacgtgagatttaagcaagctataatttattatacaaacatttaatcttgaacaagagcattatgattgtttgtgtagtttttgagttgttaatcttaaaattttttaataataattttatcatagaaatataaaaattcttatttagtttgtaaactttatattagtgaacattttagagtggatcgtagatattaaaatccctaattccctttatcttgaatcaagtttttgtgttattattttcgagtttacattattttacaaattctaagaaataaatattttgtttattgaatagaaactaaaaattaattgtttggtaattagtaattaagtattcgagagacaataattgttttactgaatattactatgtatgcaataattatgtatacttgaatagcatatttatctcgtctcacgattcatctttaaaatagcaatatctatattggtgtgtgtgaaagtcatttttaagtaagttagaactatataactaaaattatgtagaagatacaatatcattgaaagaggataccatcaatgtaatgtgaaagcgtctatgttgggtacttcttgtaaattgtgaagggctaaaaattaacacaaagggcaacgtcccatgctttcacatccacacacaatgcttgataaatatttaagtggtaagacatatattatta

SEQ ID NO: 25748 - DNA, 5128 bp, Cannabis sativa
  modified_base (1567)..(1569): a, c, t, g, unknown or other
tttaaattttattccatttcattcctattcttattccaattcccatactcattcctattcttatgttttcattccttccaaccaaacgaccaccttagggtttgcacatgggacaatcccctaatttggtgggatttagtgtcagagggctaccacatcatccttctggggtgcctcttagaatgtccagccggatgtaccccaaatgctcatctagagagtcttagttgcttcttaccaattaagatatgagagcaccaaaatatttaccaaaatttttggaaactgattacaataagagtgagaaaataagagtacataccattttagaccatgtgttttgcaaaagttacaaattggaccttctgttttgaaaaatgacaaaatggaccctctgttttgttaaatggtaaaaataagaccctaagctcaatttttaacaattttatttttaaatataatcaactttaagacaatttctaatacgaacaaatacagaaaatataactagttttgtcataacatctttagataagattattataaaattttattttgacaaaaaattagtacagggtcctatttgtataattttagaaaatattgagttcattttgtcgtttaacaaaatagagggtctaattggtaacttttacaaaacacaggtccaaaatggtatttacccagaaattaaataaagcaatagaaagtagtgttagggtttatgccctgaaaagtatataaagacatttctgattataaataagagttgaacattttcatatatacttgattattaaattattaatatttaatattgaataatttatatataatccgaaaattccttattcatacatgagtttatgacttgtattgtatggagaattaagatcacttagccatgaataaaatagtcagcagcatattaaacttttggaagttttaatcaacggttgatagtgcggtttactaatgcccgttattcagtgcaagtaatcttgattcagattactaatgtagcatgacatctaagtgaaggtattgtatatgatagatattatatataacaaccgatatgtaactaagttatctttatcaatgtcgtttactataaagacctaatttatatcataatgatgaccaatgatatatagacataaatcttaagtaagcatgaactcctattcatgttattagtttttttaattcactcgttaaagtttttcagagaagatgattctttcaatttttgttttgggaatctaataatgtggatggatgagaacataatctacaattatggaatctgactttcttaacagatcgaatattagttctctttatgtgttaattctagaactaaaaagttacacgtagattttagattagatcttaattatacttttactagtgaattaatggaactaaaggataaagaaataattagaaaggtaaaacggtaatttgaccaaaggtaattatgaaccgacacaaagagggctaatcactgaagttgattatatcaataaacactctagtctcagtaaatataattctataattnnnaagagttcaattccatatttataggggagtaatcatggaattaataaatataattatttagttgatgagattcaataattaatttagtttattggatcttagagttataggtccatggtcctcagattgccaccttaaaattttgtcaagggaagggataaaaaaatgtatatggaagttcgaaaaaatctattttgaattgtcaaaatagtagttatttattttttcaaattaattaattaaataaattaggaaaagatacatccttcgtcttaattaagatagagggaggcgccacctacattgtgtctatatagggtgatttgttttggggttaattaattaattcaaaagataaatactatttaaattttaatttggaacgtagttgagatattctctcaagtggttgagagattctctcaatcgattatagaatataaatatctataacaacattcagttattattttattcaaataattaaatatgatttaataataaattttgaataattaaataaaacttgagtttatttgacagactatgtaaaccaaattcagtgacagaatttgaacgtgacttttatgaaagcctaaaatgattaagcaattaatctttttctctcaatcactacaataaaattgttcttgcttatgtgttgagaatacaagaactttatatacacttttattctactagcccacattagtccttgtgtgtggtggaagatctagaagatcaaggtgtgagttatgacatcactattctgaggatacaataaacgaaaagactcgatgataccctgataggctttgagaggtatatattcttctcatccatttactttcagatttaatatatacacatgtggtaatcttggacatatggtacaatgataatcaataataattattcgattgtgtaccagatttagtaccataaaactaacaagtagagatagatatttttacgtggtttgggtgttactgaaccttagtctataagtcaatcatatttgactaagtcaccttgatgtattacaatggagttcttacaagcttacaaaccctagcttcctgctatagtgtttacacaataaatttccaactatttccatgagggcataatgttttatttattggggtttgagtataataactcaaaaatttagactagacttctaagccacactcgcttgctagattggtgagaataaaaaagtagaaaataattataagagacacagcagatttatagtatttcactctttatatcgcgatagtaatcaggctacatctacatctacttcgagtttttatttctcacgagatggtaattacaacaatagactaagtattagaaactttaaactctagagagagaagctctcaccttgtgggtagttttctgattatgaaaacgagctaagggggctctccttttaaagatgaagggggcctacaaaaataggagaaagatacaaataatttactttccattgttgatgatgatttaacggtgaaaattagcttctggtggtgatggccaatttttggtgcccggcgggtcccatcgcgaattactcggagcttatttttgtaactttattgagagtgacatttgacgatgatagcttcaaaattacacctatagtgtgagacatgacttgatggagcatttaaatatcttaaagactcaagtttaatcgcatcaatcagataaaaattaagtgagttatagctattttactgaaggtagttcaggtcccagcgcccaggttgacatctgacatcaacctagacgttgtataagtgtaggatcgtctaaggggtgtccttttagatacctaagtgatagtttgacacctcttagtccatttataggttctagcaaagctggtcactagttgtcagagatgttgatgttttgcagaaattaacagaagactcaaaactttcgatttccgagtgagttaatttgccaaaaaattgaaaatgtgaatttgattgttctaacttcatggatcattgtacttgtgaaaaactagatggatggttgaaatgacatctgatttagataagcaaaactcagcaaactaggccaattgttaacatgtgtgttaggccttttataccgaacttttaggattctatttttgatacttccaaggattttgaactcgagggtggggtctcctccctcatttttgaccattctggattcaatggtcatattagatttggcatttgagtaattgaaggcaccgtccaaggttaattgtcaacctgggcgctgggcctagcactaggtcaacctaggcagtgggccctatttccaaggactcgagtttgtggttttctcatcgaatttacttgaatttatattagttctaatgaatgtgaaaatttctagagcatttttgctgaactgaattggaaacaacccgggttgataaaatgtcaaaacttgggtgctgggcccagccctaggtgtcaacctgagcactgggacctagtttttccccttcagaaattctgtttggtccccggaaatagttgaatcttaatattttctaaagacgaagatgatgctcagaaaaattcctaaaaaactccattttttgtggcccaggttggcaaattatcaacctgggcactgggcgcaaggctagccccaagtgtcagtttgggcgttgggccatattatttatgcttaagaattgttgtttttcctccagaaggacctatttcctcattttttatgaagacagattcaaagccaaattcaaatatttgactggacacttggaaggtgcctagattgacagattgtcagccttgacgctaagtgctcgggtccccgacgctctgggtgcccaataataaaattgctttgaatctaattttgatacctcaaatatgtcattagtatgtctagttgatgtcccattgcaagtttcagccactttgcactaagatggtcccagaaattgaaaccctagttgaggatgtcagcttaggcgccgagtggaaaccttaggtgcccatgttggcttctgggatgtaggttcgtctaatttcagctcttggaccttggattaggttgctccatgtcttcatggtgtagaatactgaaatatagtgggttggattcgagttattgaagtccgaacttccatcccagatatcctagagtcaacttgggcacaacgctaaggttccctcccaggtcgactgctatgactcaagtctactcaactttgtgatacaatctttatgccatgtgtcaaacattgatgtccacgtctccagtgaaagtttctgggttaacatttgcccccaagtcaatttcacacttgtgtagagttgacttgatgatgtgaaccaagcccgttttgctcaaaactactagagggcattaattttgaaattcttatgcactcgtatctgttctttaagcactcccaagttaattaatattttgaacactttttattagtccttgcgaatttaaaaaattcattagcaaagaaaaaaaggaaaaagtcttatctttt

SEQ ID NO: 25749 - DNA, 1337 bp, Cannabis sativa
  modified_base (822)..(831): a, c, t, g, unknown or other
  modified_base (1291)..(1299): a, c, t, g, unknown or other
aaaaagggcaaatgacaaatgataatttttatttaataaaaaaatggaagtttattaatttgattattctctctaaacaataggaacaaattaggaggtacatcaatcattcataaatagcgtcctgccataacagggtgttcttgtaagacaataaacaacactattatgcttgacaaatgttagttttaataaactttttcaccacaagaaaaatcaaaatggaacatttaattaccaaaactaaattacccattaattttgtaactaaaaaacgaaaacatattgttaaaaatagtaaaacaatatacgagcattgtgatccacatcaattaaattgatcacaataatgctcatgaaaaataatttaagattaaaatatttatttagagcattaatgataataagacatacctcccatagcaattttttctatttgtgtcatataacactatgaatttctaatattaatggaagaactaaatttaggagtgattacaaaagagaaaccaatgagcaacccctctttctattactataccatcaattaaacacccatttcatcttaatatacatcacaccaatctaatcctaattggttattggagtacttattaggctaatacacattattataatttaatggaccaattatatgttagaacatatttattaggagtatgtttggttataatctataatctaacattctaaatatgaattttctaaaataatgaaataaacacataaaagattaagaaatcctaatggtggcagaataataatgactttttctatccagatctctaacccttgattccnnnnnnnnnnagagcattatcaagatctgaatctagatattctctccatcagtttggttagacacaatcttccacactatgctagatattgttttgacatgagtgggcataatctcaattcactatggacttcgaattatatattcagtatagaagaagaataattttgaaaaatagaataagaagaagaagaaaaagttctctctttattttctaattgtctgacaaaagagactgatgtatgttatgaaaataagagtcattatattctatttataggattctttccaggattagtttaaaatttaaatagaattaaaaaaaaatagctttattagacttaagtggccagccatattatgggccccacaagtttcaattttgttatttatttagctcatctttcttttcacaaatgtcatattttaatgctaattctacaaatgtcaattctatctatttaataattnnnnnnnnntatcaaataaaattatcatttaacttatttattaatta

SEQ ID NO: 25750 - DNA, 4895 bp, Cannabis sativa
attaattaaaatttttaaattacatatttttttaaatcctatgatattaatttatagctattttcgcataatactaaatataatgtataacatatataaatttactcattgagccttttattttattaaaaaatagtttagaccttatatttttaaaaataaaacacaatactactccagctaattttagtcaaactttttttttagtagaactaagatataacaaatttagaatcagttccaatcacaaaaacagtgcaaaaaatgtagtaaatttggtcataagacttgcaaatcatggtattatattctattttgactaaagttgggctcctagtattattatattcgattttaaaaaatataaattatttgacaaaacagatggtgcagtaggtaatttttaaaatgcaagattcaaaataatatttacttaatattccattttggacatcttgaaaattcaatacattaatatattttgtttaatttcattatattaatactaaattttgaaaaaatatttatgcttaaagaactctgctaaatacaataaattaatcgttaaagaaaataaaaattaatttattatctcttttataatttaaatttttttgatataaaattcaaaacttataaattagtcattaaaataattattatatgatatgtaattaaattgataataataaaaagcttatcttaacaaattttatgtttgtattctataattctattagtaaatatattttggtttaaatatatgcattaatggttaaaaataaatacacaaattaggaattgtaaaaaaagagaatgaataccaaaaaaaattattgttgataaataaataatttagaaattttaaactgggaagaaaatgagtgattatagacttattaactataataattaaaaattttaaaattcatttcaattttcaatagaaaaaaaattataataaaaagtagactcacttggacacgtaaatgaaaattatatatgttaagaaaaaaattaagatggacttttattttattaaaagataccgcatagaaatttttttaaacctcttcgatacaagttaaactaattgtgagaaaacaagaacccaaagagaaagaagcagagcaaaagactctgttgttgtaaattgtattgaatgaataacaaaggttttttacagaggccttatataggcgatacagctaagtagtcttagctaaaaattacaaccctaactaaactctaacaatatgccttaatagaataacagaataacaaactaatattaagtagtctaatagcccccctcaagatggagtgtagatgttaagtacacccatcttggagactaaggtagaaaagtgatttggaagtaaaggcttgttgaagatgtctgctaagttctattgagaaggcacatggataagtttgagagatccttgctgaactttttcctgtatgaagtgacagtctatttccacatatttcgtgcgttcatgatacaccggattttcactgatgttgatggctgcagtgttgtcgcaatacatgttggctggtatggtgtgggagacgccaaagtctttgagtaaggcaaggagccatgtgagttcagaggttgcatttgccatagcgcggtattcggcttcaacagaggagcgggagactacctgttgtttttttgatttccatgaaaccagagatttgccaaaaaagatgcaatatctagagattgatctttgggtatcttggcagctaccccaatcggcatcagcaaagaaggaaacttgaacatttgctggagataagctagtttttgcatatgccgtgagggtggggactgcattagaaggaaagaataacccttgtccgtgagtctttttgagatattgcaaaatacgatttgtggcatgtaagtgaggaagccgaggacaagccaaaaattgactgagatgattcactgcataagagatgtcgggtctagtaatggtaaggtaaataagcttaccaattagactacggtaaagagttggatcgggtaaaggggtccctttgtctttgctaagttttaagttgacatccatgggggtagaggcaggtttagtgccagaatgctcggtgtcatttagtaattgcaaagtgaaatttctttgtgagacgaatatgccttctttagttcggcccacttcaagaccaaggaaaaaatgaagttttccaagatcttttaatttgaactgggtgtctaagttgtgtttgaagttggttattgtagtagcattgttgctagcaataatcatgtcatcaacgtagacaaggacaaccataaaaaacgaggaagagcgtttaataaagagggaattgtcagattgagattgttgaaagccatccttaatgagggtggtactaagtttggcgtaccattgtcgggaggcttgtttaagaccataaatgctcttatttaacttgcaaatggtgtttggaggagcattgtatcccgaaggtatcttcatgtagacttcttcgtgaagatctccatgaagaaaagcattgttgatatctaattggtgaatggtccaattattgatagctgctaaggcaaggaaagttttcagagtattgaatttagcaacgggtgcataggtttgtgagaaaccaattccttctctttggttaaagcccttagcaactacccgggctttgaacctcacaacttcaccaacttcattgtatttaactttgtatacccactcacaaccgatggctttgtggccaaggggtagcttttttataatccaagttttacattttcaagggcttgtgtctcacaatccatgcctgaagccaatgtcttaattgagatgcctcttcataattttttggttcattctgtgtgtatgcggctaagacagcagcacgaaactgagggttcagttttatatatgataaaaaagattcaattggataggctgtggaagacacatgacatacataatcctttaaatgagatggttttgtgagtatgcggcctttggttgaggtagtgagacttggatttttgttagctaccttttgagatggtttagagatactcagattagagacaatgattggtgttttggctttttcagaagcggttgttggagccttagcagtaggtgtttttactgcatcagtaaaggggttgtttgctgcatcagtatccattgttggtgctgtagcagtaggtgttttttttttgcagcagggatgttgttggctgcatcagtggctagtgtgggtgctgtagcagtaggtatgttgattgcatcagcggttttttgttggctgcatcagtagccattgtgtttatcacagcaggatgttgatcctgtatggtagggaaatcatcaagaaaatgagtcttgtaaatatttgcagcatttggctgtgtttgtgttaatggtttcttgtttggtaacacggatggggagaaaaaattgtttatttcctgagatgatgtggtgttagtaaaagggaaaatttgttcatgaaacacaacatcacgggaaatataaatttgtttggatgcaatgtccaatagagtgtaagctttcattcccataggatatccaatgaatatagattcccgactcctaggagaaaatttatggtgtttggactctaatgtggatccatatgccaagcaaccaaatgatctaaggtgatcatagttggggcctcttttgtaaagtgtttcaaaggatgtaagacctttgaggagtttagaaggagtgcagttgaggagataagtggcagtagaaatgagataagaccaataggtcaatggtaaatgtgattgaaaacttaaagcttgagcaatgtttaatatgtgttgatgttttctttcaaccacagagtttttgttgtggtttttcaacacgtgaatgatagtgaattatgccctttgaggcataaaacgaagtgagatttaattccttggcattgtcggatctgatagcctttatggatttggaaaattgagtgcaaaccatgttaaaaaaatctggtatgatagtcttaacatcagattttgcttttagcatgtaagtccatgtaaaacgggaatgatcatcaacaatggtcaaaaaatacctataaccttctatacttattatttgaaatggtccccatatatccatatgaactaagtctaaagttgtcatcgcaaaattattattggagacaaaagggagtctcttttgtttagctaaatgacatatatgacagtaggtattagaattgggaatgaaagaattatcaatctttttattgaaagaattcgaaatatacaatgatggatgaccaaggcgattgtgccattggtttacatttgatgtatgtaaatcgaaatgagattgactggaggcagcagcaagtggtttatcttgagagatgaggtacaatttgtcatatctcttagctatccgaatcaccaccttccgagagaaggatcctgtataatgcatgaattagttttaaagagaacattgttgggtgtattggaaactaaatcattgatagacaagaggtttattcagaagttaggcacatatagaacattatgcagaactagagagttattaatgcaaactgtaccacattttgtgacttgtaccaacccaccagtaggcaaaaccacatgtttgggaaatgatgtgttattgaaagatgtaaaacaagatatatttgaacacatatggtgggtggcaccactatcaagaataaaatcaaaagaaagttgtgagatgatattaccagccatattcgaagcagcaggagtgttttcagcagttggatttgcttgactgagctactagctgaggagggaaattaactgttgacattgtgat

SEQ ID NO: 25751 - DNA, 2812 bp, Cannabis sativa
tgtcctggtcgtggaatagttaaggtaggttcttatcgagaacactaggggggataactctgattacgatgggccaattgtgattaataaaaagtaggctagttcatctgatggtgttgccaataagagggcaagggtggagaccaaagaataggtcttacaattagcagcctcaagaaggcagtcctctaaaactcagtcccagaaggggtctgatgcattcgatggtggaagcccgcataggtgaggcaccaaaacatcatgggataattgggatcctcctccaccaccctcagcgcctaaggttattcccgccacctctactcagttgtcctgggaaaagaaaacactacactacctttattacctctgacacccttcatactttttgtcaagcctttgctgttgatgaaagttgataattcacgcccaatggttatcaagcagttataccagaaggggcttggcaacaagtatgaaaagatgaagaagttgaccagtagcatctcctccaaatgtaactttgatttaccgactacgacaaatggaatgatgcctaccctcttcttgtgaacaaagttaagataacggagaagctccgtcctcaatttggaacaaacatgtcaccatttttggttgacctattggaacagagtgctgctacatgctgtaggcttgttgctgataagtttgtcatgatggcgagtagggatccaatgtacatagttgaagctatgaggacccaggctaatgctgtaagtttaactttctttttgacttgaataaacacttttaatttttccattgtttgattcacttatattttctctttcacaggttggcttgatggtagagaggaatggctccatggttattcaactggcttatgatctggaggtgctgagggcagagcatgccaatgccgagttgaggagagaggaagcaaccaatgctttagctgaggccaatgccaagatggaagccaccataaagcaaagggtgtctaactctttggacaaggccttgacccgtgaaaggtaggcaaccaagatggagagggaccgtagagacaagtacaagtacttgcattccacaactcttaccaaaatcaaagacttggaagtcgacctgaagtaggccaaggtggatgtccaagaaaaagacaaaagattaccaccctatctctggagtacgaccaacatgctaaaattattcgagacaaatacattagtgaaagtactcttgagagaaaggtgaagcaccatctagagttacaacagaaagcggaggaagctgaggcaaaagctatttagagggatgaagaggctgagactaaagtgattgcatctataaaggcttatgaagagtcccaaaaaaaggtcaccaaggtagagggtgaaaactcaattttaaagggacgtctttagcaggcgatcctagagaaataagagcaagaagcccagcacaccaaggctctagaacaggcatttgtctacttagtgtacaccatctagtagcatgaaaaatctataatcgaccactttaatgctagacacaaagaagatctgttgcctaagatcttggcactagaggaggcaaataaagctaaggaagcaactcagaggacaaaaacggttgatcctgggactaccattcctgctggtgagaacatggatgactttgctcttccaacctctgatgttcctatctcaaccaactctgtgatcccgaaggtctcgtttgatttccaaacccaagattcataatccttgaaggacccagctcagccttaccaatccttgcttatctcaaacaactttatccttatttatttttttcttttgggggacaagggtcctctggttatgtgtgcatagacaatcttttatacccttgttgtagggtttttaagtacatagtactatttcattaattccttagatatttgcattttatccgcaaaatttgctaagttttaatacttttagcctcgtgaggttctggtttcaaaggcctaaacctttgaatttttgattaaatgtttagacttgaatatttttcctgtttaaataactaattaacctgggctaattaattatttaagaatagggcctttctgaacttacctttttaattaatctgaatcaattattttaagtagcctgaatactttggtcgcgttaacctgggctaactgaacttttattttaagttaacctagattaactatttaatgtgtgagaattgattctaagtataataaagtagtggcttgcttccggttccctgagaaatcaatttcaagcaatactctatactcttatatttggttaaatgctaaataacttcaaatataataaggtagtggcttacttttggttccctaaggttccaattttaggcaatactccctactcttatatttgagaatttagcttagctattttttgtgaaagaggtaaaattacttatgataatatcatatatgctacccccaagtgattaatagttgagacttttgatcacttgttacatgatagaacttttaaagaccaaatatgaaatgaaaacttcttcttttattcaaatatatcctgccctgaggtgtacatggaaattagttattaaaatcaaaagtaaagaaaaacaaaaagggacctgaccaccctcagtttattgatagtatcggcgcaggtggtcagcattccatgctcttagaattcttgtttcatctttcaaatggtaagttccatcaccaattttgtctatgactttatatgggcctttccagtttggtcctaagacccccatt

SEQ ID NO: 25752 - DNA, 2452 bp, Cannabis sativa
tagaaaatggcttaacaagtatggtggtggccaagttgattggggtggcaaattctctggtgctcttccaccaacccctcctagagaacaactcatggacaggttctatatataaaacaacaaaattatcacaatattttttttgatcgatataggaaaattctatagtagagtattacttttatcgcttttcagtagggttgtttatatttttagcatttagaaaaattataactcaattttttttatttgtcgatgtatagcagttgattagatattttgttagtgtttagaatatatactttacaaaatcgaaaaaatagagtttaaacatttagttacgtatgtgtttattttcttaattcgtttttggtatggtaaattattcaaaattttctaaaaattagtgaaatacctataactattataaaactaagcactcctactataattgttcccaataattgtttatataactaacttgactacttttttttaggtattggagtcatgtagtgaattgtagtagttgcagtgctgcacacaagggtttcaaagtgttagaaataatgctacaagtgatttccatagctatgattggatatgttggtgtgactaataaacaaggccaaacattgaagattgccatggtttctacagcattactttgctttgtagcttcaaagtggctttctcatttcatccacaagaccttccattttcatgactatgaccatgcttttcgttgaaacatatctcacatgtataatgatgcatatatatatatatatataaataaatatatatgtcattggttttgattactcaaccaatgaaataatcttagagttagagtacttgaacttcatatatatttgcatgtatgtcaatatgatttgtgttgggaaaacaattgattctatttatgtttctcacaattgtactaagaacaatatccaaaaatcagttaagaacttaaatcgagagaaatgtataatcctttatttctttattagttacacaaaatgggatcatctaaggttatgtaggtttctaaactaagaactaaatgaagtacctaactcggtcaactaacactaaggtgacgtttagttagaaagtagtgttgcaaattaaacctcgtcaagaacattcataacaaagatttcagcaagaaataaaatgtaataacagtgactaagaaatgaacaaaaaaatcgagtttattaatgaacaaagcaaaaaaaaaaaatagaagataatacacaagtaaggatcaggatactcacagacaactcaattacaatctcaacaagcattagctcttactgaaaaggaggtgatctaaccgcaccttccagtacagctaccttgttacgacttcactccaatcactagtcctgccttcagcatccccctccttacggttaagttaacaacttcaggcatgaccagctctcatagtgtgacggctcacttgagagaagtcacttcaagagtgaacaatctctttaacatctatcgacatacacaagctgaaacagtaactcaacaatggcaatcctagtctattctctctctaacaatgaatcttgaactctctctctctatctgaattggattgttgtttcaagtgaatgagagccaaggggtatatgtagtgctctgttcataacagttgattaataacagaaatctagccaactgatttaattgaaattaatttatattataatgggaatgagaagagaaccaaatacaaaaagaaagcagtggctagttcatacaaaatctccagccttctacttgttcatgtagttgctagttcatatcgagtacgacccgtactagtgagaaaatatttcatagcaacagcaaataccaaactcaaaacaccaattttcattgcacaaattattcctaaagactcgtgtcttttgttcttgtgctctgcatttgattcaaacttgttagaaactgtccccgacgagcccttcatgaaacacgagtaggataaaactgtttcttttgttaatgccggcttcaaagatttcttcacggtttggaaatggtgatcacatacaacagttgcagatatgtcttctctgagagctaccattccagcttccctgcacaagctctcgagttcagcacctgtgaacagctcggtatcttctgcaatacttgatagatcaacatcatctgatattctcatttttcgagtatgtacttgaaggatttcacatcgagcttccaaatccggtggtggtacataaaggacctaaacatcatttgtaattatcacaaattcaatcaacaggcatcctttacaagtataggattacaattttactaagatacaaggcaatcccaaaacacagaatccaaactctcattgaaagtaaattcacaaaattacaaactctcataccagatcaaagcgcccagggcg

SEQ ID NO: 25753 - DNA, 5281 bp, Cannabis sativa
  modified_base (323)..(323): a, c, t, g, unknown or other
ttatatatgaaaaaatgaaaaaaattaaaaaaatttacgcccacttacgcccaccctcccaccctccaattaaattctgggtccgccactgattctaagcaatatacattgatgttgttttcattttttttttggttaaaaattttgatctcacaacagtctattcgttttcactataaaaaatcttacttttagtcacaacaaaatttgtaactaaagataaaaaaatttgtggctaattataaattatcattattatgttgtgactaaaatgcccatggctaaaagtattagtcacaaaaaattacaatttgttgtgactnaatgtgtttttagtcacaatatttattatgaataaaactaaattagtgacaacttgtaactaaataatatgttttagtcataagttttttgttttgcctaaaagttacatttagtcacaaagaatttatgttgtgactaaaaggttgtcactaaaagtagcagttttttgtagtggttgtttaaatccaaacacaaattaagtaaactaaccacttgagaagattaaagcaggtacataaacttgtcagtattttaattaatacttctttgtttgatttaataatatttatgagaatatttttaatattaatatgattaatacataatggttattttattttgaaaaataggaataattgtagactcaaaacaaatacaacatttgtctgtctaattgtattttcccctttaatctttaatactatgttgaaggcatctcttcttaagagatgacaattatgtaactccatgtgagcatttgtctctctaattgtattttcaccttaatttgtgaaaatgttctactccagtagactcttgcatctagccatgaagtttgagatagatacaagagagccaactgcagatgagccaaaacaacttaggtatgtttgtttgtgggacttgattcaacgactctattaatagagcaggtttggttaagtctatgatggcggtagacgcaacctccatgcctagagcctttggagcaacttccagattcaaggccagaggtgctggctcttgagatccgctcccagaggcctagttcttctttctgccatcaccaccaccttgggcaatttctcgaatctcatcagattgggtcttgacactgcccaagaatttgtttagcaatcccatttgaagagtgactgattgatctgcacaaaacaaacaaaacattcataaaaaagaaaagattataacaaaaggcatgaactttacaacacattatcatgcaaggtattaagagggtccaaaccattaatcttagcataattgacttttcctctggcaaacagagcaatatcttttcaacctaaatttgtttcgtattggaagaatcttaggaagtagatttcactaaatgcatcccctctgacatgatggtgcataggagggatgaaatggttaggacttcgaatgatagagtctactctatctacatatctactgaaagaatacatataatctaaactcaagaagtatatggatcaaatcaacattgattaactgtctctaaatcagacatagtgggagccctaattatatgaaaaggcatctcaccactaccagaagtgctcgctctcggagcaccttcattgggcatcacatccttgaagctgatggaaagctcttcagcctccctcaagctatttgggaactatctcctctagtcctcattccactactcatcttccttcatcgcctttaagtagtcctccacaatagtaatcactgcaatggtctctttgacttcgttcgggtcccctcttaaggattcttggaccgattccgtcacggataggtgatctatatttagtgtggggcgataagacccaattcctaaagatttgtcgtagtcactagttttttcatctacaactccttaggtgagaaagacttatagaagttgaccttctcttccaactctgggattagggcagattggggaaggcagtctagcacatacaaatagtggcagatcataacacagtaaacataagggaaaaacagaattttgtgagtcaaaggcggagtcagaacttacttgcaagattgaagtctaaactgagggtaggaaccctccttaacgggaagccggaagtataaaagtaatagtccttgaagtcatatgtgtacttcatggaactggtggggcaggagacattttttctatatctttgcagcctgtagaagcccaccttatccttatggtctctcattggttgggacttgacctggtaaaaatacaagacctcttccggtgtaggcatagatttgctgtgtttgacacagaagacataccatctggagagtaggttgtatgcttgagatataagctagaaaggtgctattcccattactgcacagaactcagcaaagtagcacctcaagggcaggtgtgcccccatctcgacgtgaacccaaatccatacgccaaagcctccttctgagcattttttgggtctctctccgagcatggagagcttattccagaacagtgccagaacactctcaagtcctcgttgagtttcgtacttcctcaagttattgtaatttatgaacaggtagacatactggtccatttcccatggactgtcatttaggaccaattgggaagcttcttgatgctccattgtcttcacttcagaatcaaatttctttcgatgagaacgcttagtcatggtttttgtacagaaagaaggaaatccaagcagttagctaccctaactacctaatatagaaagggagctgggggtcctcccccataaactacttgaagaggtcccaactagactcgctaccaagaaatgataacttctagaagttccttgttccagacaagaagtcaggaacaatgagaaaagagagacgacaaaatctaacatcgaacccaaaactagagtggtttggggtgaatctaagaatttgcaaacattcatggtgcaaattgatcaactcgaggacttactaagcgagaagtagtttaaaaaattgtacaatacataatccctaaatcttcctaaggggatagaattgcaatcaagaaatcctaattttaacccataacatagtatgcacacacaatgccaaatgatgaatccaaaaaaagcattccataggaaaatatttatatatctaaatacctgatgttgacaatggagaattcaaattgttgttggatttggctcaggaagttgattgcacctttcgcgatgacaagagactgaggtgattagcgagtcaatttctgcttcaaaattcaggcttgtaatttcctttgttgtagccgacttgatcactagagaaaggagatgaggatattctcgtgccctaatttttagtaagagatgaaaacagaagtccacgacattttctagattgataaaaaaggatttttctcgagagaaatttgaagttttggggtggcaagaagacttgtgcactttgaaaggttgaaaatttgaacagagagctaaaagtggtaactggaggtcattaggggtatttataccctaagaaagcgatccacgtgaagaaggagtggacggctgcaatcttttcttcacaagcacgatctccatccaacggctagggagatcaataatctatgtgtatccacacatttagtgctatatagaataaagatgtgaagtaatgatgaagatgctctttttcaattttcatgccagccagtgaatagtcgtcaaaatgtagtcattcctagaagatgactcctcgataaccacacctttttacatgctcgactgccacgtggatacatcataatcacaagtggaggtcagttccatggtcaagtagcctgtgaaatatcactacttcattctccaatctccacatgtccaaatcaagagaccagagcaagcttccacctagtgcagcatcctgaaagcttggggtaaatgttatccgcatttttgccattggacacgtggattctaggtgaaaattcaagaccaatcagtgggaccctcatcaatgataaagtgggccaagcccacctgggtatgtccttcttggagctaacttggttccgtactcatagagtcttccgcccttgacggatagagcccagaagacacctccagtattatgaggccaaaggataagatagtaccttctcggaagacccttccggtttccctattcgttccttcttataaataaattaagaaactccagctgtcagattgctccagaatatcatatcgcgattaaaggggaacttcccataacaagtgtggtgtagttattccaaaataactgcccactattagtggacacgattttgaccagatcaacctaagtccaattcgcttagtcaacaaattgtactcttcatgggatggacttcatgagaaagcccaaagatattgttcagttgtaaactccctagtagagggaaaaaggaaaatcctaatgtaattctccaactactataaataccccattaatcttatggattaggggttgaactctcttacgtatttttgctcaggcaaacatacaaacatacattgtgtgtatctcccagagcatttacaagtaaatagatcactaaaaaaaattgactcgtggactaaggctagttaatacctcaaccacataaaaaattatttgtctcttctgattttttgtttttttattattgtttcttctgttcttattattttaattctgttattaaaaatctcgagaaataaaagaaaataaatatcatactactattcctgaagagattgttcctaagacttattggtacatacaatgtgttcatatatattttttctcttatcatattattaagaactaatagaaaactaatttcttctctcttttttttatgtataatttttattatatttaaaattaaaattatgtgtgttcgattttataaaacactcaagaaatatatatcacagatatctaaacatattcctaaaagtgctttaatataggaaatcataaatctatagaacctttgctaaattaaagaagaagaaaatgataaaagatgagcgaaagaactaacctgaagccattgttggagatttcagagaaggttatgatcttccaagaatacactatttcttaggtattttctctgatggggaaggagagaatgcagaaacccacccctagtggttcttgggcaccgctacctatttataggctcattatataatgagttttgagtatttataatttg

SEQ ID NO: 25754 - DNA, 1617 bp, Cannabis sativa
gaatagtatctattgtaagtgcacatactgtatttagaataatagtagtatacactttatttctttaacaatttataattttatatactaaacatatacatatatatatagattcataatcacctagttgtgtatagaaatatttaaatataaatttagacattatacaataaaatacttactcacttatgcatagaccaatctagcttaaaacagtcaacagtcttagaattttacagatacagaaacatagtattatgatattggatctcataattaccaaagcaagtattttaagaaataatagatataataataccaaaagtattcattcagggcatcatagtttctccactgaaaatgctttgattttcctttgcttttttgagattcctatgcaagtaaatcaataaaggaaatgcataaatgaaaccaaaatatattattacaatcctaaacttgtgcaattatattatatattagagttacttccggaacctttcataaaatagttccattcggttatcagcagcaggttgatcaacttgcaacgctaaaaaagtaactaatggtgcgtgaggaggaggtgcaaaaagaggaccctattgcatgagtctctgaatctcctcatcctatctatgaagtctaggttgcattctgcaaacctctcctcctaatctggcagagcgtgtggcagatttgcattactaccaccatgacccttccaacgacctcaacctcgaccacaagcataagagggattatgatttcctcgaccatctctagccttgaccatatcaccctaacatctattgtttagtcgggtgtccattatacagtacgagcctgcaaattcataagtcaggttagttaggtaatgatcataattggatattgattaccgcttaacatggaaatatgaacatgaaattattctgctatcatactacgtactaacatgcttcctattatacttttctattcatgcttatctagttttaattactaaaatatatacaagattactaaaccatgagttcaacttatctttgacaattgtacaaatctcaacattttttaaagaagaacttggcggctctaatacaaaattgtaattccttattagcttaggtatgctacgatgctttcttaattaatacatttttttttgtattaaataaaactttactaaatatacttcataagtaccaaatttttacaagtttgggatccccccgaataacatcagcatagcctatcgacaatcaaaactaagcatgtgctatcctgaagataataaccctctagatgtaactgtttagatatgtacaatcctccctaagctcaccgctcactatcattcagctttagctttactcttacttacacatggtacacataactgtgagtcgatagactcgataagaaaagtataaaatttacaacatatatctgacccgtaattaggcacccatacacctaattactgtaagtctactacccgcctccaatgcttatgccgagtctcgcacgttcttaactatagtacgattgactataatatgagcttatactcaccactcgagttgcactgatactgtagcatcaatccatact

SEQ ID NO: 25755 - DNA, 2062 bp, Cannabis sativa
actaaaaaaatttgtgggtccaacgggtccgatggggaccctggtggggttcgatgcatgtgctgaaatgcgagagagatggggttgagttatgagatgagtatttttgggttttagataaagtggtcatatattttcaatggtgatatgtattagtttaaggataaaatattaggtatatgtaagtataaaaaattaaatttcccttttgaatataacattgaccaaattaaaaaaatattaatattgctctctacgattcttttgctgagttatgtaaataaaataaaataaaagacaattaataatgcactcaaattaaaaagaacttctcaacaagtattagagcattgctagtaagaattagtgatgctcaacactttttataagtagtgtttcacaattaattaacgatattctttaaaagttattttcttaagttatataatatcttatacatagttacattaatagcagtatgacactgaggaatgcactagacaccaataatatttttttagcaatttaccaagtgttataatggtttcaatattcattaattgttttgcttatgaaaagaagggttttttcttcaatttaaatcatatacactctgaaatatgctaatgttcttgtgcaaccacttcaatttggagtgtggggatgtcaattttggaaaactaggacaataagggatatatatatttttttttttttaaaaaaaaataagcgtagtcatatattaaatagatattagacctcatggtcgttacacaaaatgttctcccgtaatagcaattgaaagaccttcaaaataatagcaattgttaatattaatggttttgggggacccttgtcctttgtgtgtgtttgtcttaggaatcacatcatcatgtggatttattaggtgtaagcatttttcaaaagaaaaaaatatggtatttttaaaaattactaaaaaatatgtatatttttaaataattttctcttaggacccttggttgatggactctaagcccgccttagctcaagcatgatcctatgtcctgataccactctaaccttatgatatttaagacttacattgtatctgaatttcttagatcataggtggtaacaaaattgttaggcctttttcaatagaaaatagggtatttttaaaattattaaaaatgtatgtctttttttaaataattttcttttgaaaccctacttaaagtccgtcttagcccaagtatgatcctgaatttgtagagtaaatattattttaaactttgtgctttgtaaaagttaccaattatactctctattttgttaaatgataaaatgaactttgtattttttaaaattatacaaataggaccctgattttttgccaaaataaaatttaattataatctgatctataaatgttatgataaaattagttacattttctttatctattcgtgttagaaattgttttaaagtcagttatattaaaaaataaaattatttaaaattgagcttggtcctatttttactattttggaaagtataaggttcattttatcatttaacaaaataaaaggtctaattaataacttttgcaaaatacagagtctaaaatagtatttatactaaccttataatattttgtgatgtgattaattcacactttcgaattaaaaaaatcgtcttgaaattgggacataaatccatttggaaggatctaactgattaaccacattttcaaaaaaaccacattttctactttattgccttagacaactgataagtctatactttctaattgtatacattctttttgtgtgacatgtatgtttatggagtaacacactttgtttgtttttcttttttttcttttagagaaaatacttgttattattaaacaaacaaagattcgtttacactaacagggtaaataggtagagagataatctccaatcaagtacaagtctcatccacccctaatgtaaacttagcaaggccatcagccgcgttatttgcagaacgtttaacatgtgaaacagttacattagggaaaaaagataaaagacta

SEQ ID NO: 25756 - DNA, 5305 bp, Cannabis sativa
tcaacttcagcagagactcgctgagtcaaactgaagaaacgaggaactagagtgcgtggctgctgctgcacgagtattcccgaatgatgcaccacttgtgcaagatgaacctccagttagatgactatgaggaagacctcacgagtcacgaactagaagtgcacgaggtcgcaatgtcagagaataatccaaataacccagatcaagaacacacgaggtttatgacaaacacgaggatctattattataaagtcatgccatttagattgaagaatgcaggacctacttactagcatcttgtaaatggaatgttggagcatcagatagggcgcaacgagatctatgtagataatatgttggtaaagtcagtaaaaaatgaagaccatgtgaatgatcctgcaaaatatttctcaatattgagaaaattcaaaatgaaattaaatccaaaacagtgttctttgagagtatcttcgatcaaaaattattatgacttggtcaaatcacattactcacgtatcttattcatggttatttatttaatattaaattttattaaatctcaaacatgtagttagtcataattattgtgatgtaaatcacggtagaaaataattatgaacatgatcaaaatattgaagtcctaagattagtcagtgcattagatttacagtaactagctaatctatgataaattctacttacactaagttaagtgttaagttctttctagaactttggtgaagtagatatataagagcaagggtatttattacattggactggaccgatcttgacttaatgttagatagcataatgtattattagctagctaatttagtcagatcactaatattgaccgtaggtcaatttaacctcaactttgagtgataagcattctaattcattaaattattgagttccttggtgtgttcattaacatcttactctacggactagtccatactttggattaggaacttagtagtttaattgagtaagagtgtttatcgtagatatgaaaatctatagtttcaattaatggaaatgaaatggtaatttccttatagctcagttcaaggagtttaaatgagtgagatctcacttcagtagcaatatcgtattgaaatttcatttacaaggaagtaagtgttttaaggataaaatactcttaggaatagaatggtaactttatattccacttatgtaaatcacctataaagagtagctattgatggttataacaataaataaggcatctgcataacgcatccatcacattttggaatgcatcaaagtctaaaacttcttgtaagaaatcgtgacactaagcaccaccgatgattaataactaactcttcctcttctacctcatcatctagcaagaactcatcctatttgttctctaattgaaccccagcccatttttccccaatctcctgaaggatcgaaaagttgaaagaacacaacaagatcacaaaatacacaactccctaattggagaggaaaacaaattaacatgtcaaaagacacgacaaattgttcttcacttattacttttatcacatttttggttatcaatcggcatagaagcaaagcgttatgtaacattttatgtcgttttggcgaaaacaaacatctaatatttttgcaagacgttactgcatgcattaggtcgactcttaatcgacgttaaaatatctatatattagcgataaagcgacatcccattccgatggtagtgtaagcacataattattcgtaaagtaacttttttcacatagcaaattactcttacttaatatacataaaataacacacatattaatatttactatttttttgcagttttggtgcattagtgcatactaatctattattgtttttttttcctctgatattaaatatcattgagaagagactagaatatcacaagcatatatatatgtacttccaacatttatctatatgtatacataaatataaatatagtgcaatctcaccaactttgcaatatagtctgaactgagctagagtggagaggtttgtccaaaatggataaggaacttttcacacgcacctttcctcaataataataatatttgattaaatgtcaatgctttcataccaaggaaagcatctatcgaaatggacatgttatgatgtgtgtgtaatgagtaatgagaaatcgttggtgatttttcattgtttccccatactgcttaaaacaatcgtacattaaaaaaaaatgatacaaaaggtacccaataaagacttaaaagatttgtgcataataactttcattaattttggtcgtctttggattttctcctttcaattgattttgattttgattttgaaaggtaaactcaattgattgtggttagtgactatgctttcttatgtgaaatctgcctggcttagcttctataagcttcttttgggccaaaccgagttcgggacccgaaatatatttttgagatttattttggcattaataggataattttgaaaatctgaaattatgtgttatatatgggtgtgatgaaagacttgtttgcccttgattgcataaatatgtttattattggctatgggagtattttggtaatttgaccctatgatgtaatattcaacaaaatcaatctttgtgtaaaatgaaatgtcattttctggttctttccagccctaggccgaacccgttctccctcttcctttctcatttttttctcttgaagttttatcaacttggatttgaagctttaatttgtgagaattggtgaggttttttacttaaagcttaagagaatttgtggtaagattcttaacctttttgttttgctaatttctaaaagttataatgaattgttaagtgttcttgatgttcttgatgtttatttggaaattgaatgcatgttgatttgaattaaggtgaaatatgatgtttttgtgttgattgagctagtaggcttataggtattgcatttagctggattttgaggggaattagggttgtgaggtgtgtttgaaatctaggtttggcatggtttattattgggtattttttgttgatttaaaggctttgtgtttaagtttgttttatggagaatatatgctggttttggttcaagcttttgtgagtatgttttgaattggtaccttgagctttgattagcttggaattgatgttatatcaattataggttgtactagctttgaattcgaggttatgcatgttttggttgagatgggatggattttaggtaaaatttttgaccttggaaaaatagttgttacaaggcccctcgccgcggccatgacagggctcgctgcggcgagaccaaactgttgttgctcgccacgaccgtggccctgctcgccgcagtgaggccttgttttctccggggaattttagtttttattttcgtcataacttttgactcggaactccgtttgggatgttctttatattgttggaaagctcgttccgagctctatatgtttatctagaattgaaattccaattatatgattatgtgaagttaaattttaggattaatcatatttgtgaaatcttgagaattgtgactaggattaccggcgcttgctcaggaacacctggtggtttgaaatctccacatacttgggataccaggtaagacagtagttagcacgtagagttaagcgaggtggcgctcatgtttgatattacgcttttgattaaatgagaaatcgagattagggttattaccctaaagtgagcggttatatggtctagggttattactctagtgattaaataattttgaatgcaatgccatgctatatgtgttgtaataaataattatgtgggtaaggcataatttggttagactcggtaattaaaatcgagataaactaatctaaggccttattataaatagacgtgtgagagcaacacataggtctatgctaaatagacagtagatgcggtggcatcaatatttatttgcatagagaatatattatttattattatttatactgttttgctgggcttgactcatgggtactctacaaaagggtaaaactatttatgatcagccatgagtttgagggcttagcggtggattgtacatgttcgggtcacactagaccacgcgacttgggtctaccagctattgtatctatattctcagttttttgcttaggtcgacacgttaaagtgacttgtaatattttgtgaaaacttttacgggatcccagatcatgtgttatattttgaaatggtttgaaaagtttaaacagttacaagttaaatatttattccttaaatgttttaaagtttaaattcagctctctttctagtaattctggtttagcggggttaggctatgtttatcagaaaccgtagcgtgcctaattgttagggcgttacaataataatactcataatattaaatatgtgttgcagtttagtggtaatttaattagtttattaattaagagatttagaattcaaatcctaacaactttacttttttactaggccccattttttatttttgtctaaggtttaaattaacatagagccgaccctacataatgttagataatttattttattaaaagggtatgtttgcacttatagtatttaaaggttttgcatacataaataaaataaaaaataaataaaataaaattcatgcgacaaatttcctcttaactagtgttgtaaatttgtgcatactgttattttttttttttgtgttttttttttaaaatattggtcgtgtcatatcgtgccttaaaaaatgggtcgtatttgtcgtgccaacattttcaaaaaataggtccgacatgacccctacacccagtattttcatgtcgtgatttactcgtgtaggctcgtttttcttaaacaggtcatcctgttttcatatccaagctcaaaatcgtattttacttttctatttttttttcacaattaataatgagttaattactaaagtatatgtatattttatacgacaatattttacggacaatcatataaaaaaataactaaaattattagaatttgaatatttatttataaatactcaaatttttatatcattctatgaataattatagaattataattttcaatgatatttaaatgttattattatttaaacttatttataattggcaaaatacatgtattattattatatctattaaattatagaaatttttaatatttcttatggtattttttaggtttgttgtgtgctatatttttcaggttagtctatctatgtatatatatcctgtatttcgtatt

SEQ ID NO: 25757 - DNA, 3076 bp, Cannabis sativa
  modified_base (1524)..(1524): a, c, t, g, unknown or other
taacattatttcaacaacaaaataaaaccaatgaaagggattgaatgaacttcgaaacaagtgtttacaggagaaaaacacaattcaataagaaatgtaaactgatcatactaaacaatgctcacaacaataaaacaatcataatcaaaatctcaaaaaacacgtaaaaaaccaaacttctgatcaatttagtggaaatgaaattataagttgattgaacataacgaaattcctaatacataaatacaaaaagttgagaggaaggagaggtttagctggataagacctcaatcaaatcgaaccgtggagtgtgtgatagtgagatggtgattagggttttaccttttcttttttgaaagttgaaagagatatgtggtagagaaagaaatagaggagagggagtggagtttatgcttcttaagcgaatagctcctgacgaaggaacgagagaaaaggagagataaaatagtgcggcgtagttcttttcagtggaccacttttctcactttgacacctcagctcactgaaaaaaaaataaaaaatcagctttcaaggcggcacataattctattttattatatttacccccaacgtagaaaatctataaaggatttttttttttttttttttgaagtaagttacacaaaaggagaaactagattctcccaacagaattcaaatttagccttaatgcttccttggcgttgaaatgcgcatcattgattttcagtgtgaagaatgtacggaagagtagcattagggaaaagagataggaactcccgaatttgaaggacaaaacttgaaagtgttgaattatcctaccaagaactttgaactttgttaactaattgtagacaattcgactcaatattagtgataggaatacggattgcagaacaccactgtagggctactagaagggcttgagcttcagtaaaaattggcattgaggcacctgtaatactctttgaaaggccggctattctttggttatgatcattaaatattgaagcacttaagccagacttttgaaacttggaactaaaagctacatccactttgagcttgaaaccaatttgagggcgagaaaaggttccttgggaccctactggtgttgagatgcacggagtggagatgagtttgcttccagaagattaggaattaagcagctgggcttgttgatagtcctgcaaaagattcttcacaatattttctgcatcatgaaatgagttagacttgcaattgaaaaatttattatttattgaattccaaatctgtcaggctaaagccaacaaaagccaaaattggtctttgctaagagtctccaaacctgtaaggtaaaaatactttatatcatatctatggtttgcaatgaaaaaaatctttgagggaagaactcttccaaacagacttagccatagggcattgcagcagggcatgggtaacggtctcggtttaggactgacaaagtggacaagaagggtgagggagaacttttttatggtggagattaagagagcaagnaaggatatggtgataggctttccaggtgaaatgcttcatttttggtaagattttgctgttccaaacagctttccactaggagatttggtaaaggggttggaggtggttgcctgggaagggttagggatggagttagctaggtgataggccgagttgactgtgaaaatcccatattggtgctgaccccaaataagactatcaccctgagagttaatagggaccttaaggatttcattgacctggtaaggagggagttgatgcttaagggtggggatatgccaattaccgctattatccaagaagaaagatacagtcaggttagagggatcaatgttggtaaggaaagaaagggagtggagtccagaaatccatttgtcatgagtaagggaaatggtctctccatcgcctactttccaaatgaggcctcgattaagaagctgacgcccccagagaagacttttccaagtttgagaggggcagtgaccaatagtagcatgaagaaaatcagtgtttttgaagtatttggccttgagaagagagtgaaggagagaagtaggctgagtccatattctccaagcttgcttggcaatcaaagcttggttgtgatgaataaaagatcgaaaaccaagaccaccaaaaagtttggaattgcagatagtagacgagctttttcagtgaattttgttgttattactatcaaaaccccaccagaacttagagatgagacgctggatggagtgacaagtggttttaaggatcctgaaacacgacatggcatatgaaggaataacctggacaaccgccttaataagaatttccttaccagctttggaaaaaaacttagcattccaaatgttcaatttggaagcaactttttgaaccaggtagtgaaactgctcagaattgagtttgcatgtaccatgaggaaccccaaggtatttataccctttggaaaaatcattgtagcctagattaacacattttaaggaatgaaactgaaacttatggttttggtatggtctaatacaagaaaaacatgatggttcaaatgttttaagtaggttgtgatcaggtttctttaaaaaaaagaacttcaaatggtgatttatttcttaaaagtggtgttgacatcctattaatgagatatacagatgtttggaaagcatcaatccaatatttataaggcatcgtggcctgagccaagagagttcaccctatttcaactatatatctatgttttcgtttagttctcccattttgagctgaagtatggagacatgagtgttgataagcaatgccattaactttggcaagattatcaaacacctgatattcaccagcataatcagaccttaagcctttaattttagtttcaaattgattttctacaaaagttttgaactcaataaaggcatttaaggaattagatatgtttttcaaagggtaaagccaagtgtagcggctaaaattatcaatgaagtgcatgtaaaacttgtaatttgtgttggatgcaattgggactagaccccaaatatcagtgtggataagatct

SEQ ID NO: 25758 - DNA, 3831 bp, Cannabis sativa
  modified_base (3193)..(3199): a, c, t, g, unknown or other
ctcaggattctttttaccataatttgacaccagaagaacatgcaagagtgcatgaatacaattttgatcatcccggtgagggaaattctgttttactcacactatgtctaggattatatagtttttaacttcatttgaacttagcagtgaggtttgtgctatttaactttacgtgattagtgcccattgtacattgtttctaatatctgtatcctgctaaaatttcacaaaaatataatcttgttttaaccaattattaaggtatattagaaatttagaactgttcggtttgaagccataactagcataactatgatgtatttctcctatctggtgcggactgtctctttcatgtcttttgatgcaaacttgcttttattgtcagatgcatttgatactgaaaaactcttagcttctatggaaaagttgaggaatgggcaagccgtagatattccaaaatatgacttcaaaagttacaaaaacaaccagcatagaagggtaacttttgttttcttaatatatcggtttaatgtactgctttctgtttttatgcctctttgtcatactatagagaagaataaagagaattaaagtaattcaataattacagtacacaaatatgtgcatgcatgcatttatcagtatgtttcttatctctattattattcgaattagaggaccctgaattcaacaatatgctctgcaggtaaatccttcagacgtgataattttggaaggcattctcatttttcacgatccccgtgttcgagagttgatgaatatgaagatatttgtcgatacaggtcatttattttcttttttatcattaggctgcttgatgtttttactccctaattctgatatttttgttagttactactacaaatatgtggtcttgagatgcttatttaaccacttatttatttattcagtattatagctttgcttttgagatttctgctttaacgtatatgggatggcgtggtatgttgatttatagtgttactaagttgagacacttcacattgaaaatttttcagtgcagatgctgatgttcgtttagcaaggaggattaggcgcgacacagttgaaaaaaacagggatattggtacagttcttgatcaggttagtaactcttcatgtagttttattatcatgcttattggaaagagatagtatctttgaattatatggacctcaattaagtttaatgggtcaataaatatacttggtggtaattatgttgtgttactttttagtagctatgaatgtcctgaaagtgatcgttgcgacagatggtttactcttatcatttaactaagtcttgttgtttacacattgtcattctctttctgaaaatctccactcaattgggttcagggttcactgccagtctctgttacttgattcactgtttcattttcttaaaatgtttatctttgatttgatgcagtactcaaagtttgtgaagcctgcatttgatgactttattcttcctacaaaaaaatatgccgatatcattattccccggggaggagataatcatgtggcaattgatttgattgtacaacacatccgtacaaagcttggccagcatgacttgtgtaaaatatatcctaatttatacgttatacattcaacttttcaggtatttgactatttttccagcttcattttctgttattaatgtaatctcagcaacttttttatggcactaattaccgactgacttgtacagatacggggcatgcataccctcatacgtgattctcaaacaacaaagcatgattttgttttttatgctgatcggttgattcgtttggtgggtatatttgtttctttgaatagaagacttatttatctatttgcattttgagaatgagataagtcattgagtaatgaccttgaaaactattaccaggtcgttgaacatggtcttggacatctgccatttaccgaaaagcaggtggttactccaaccggtaagctgatattcacatggaacttttttagttctttgtaccttttcctttcatgatcagtataatttgacttcagctttctggttaagtgtgactactcatattagaaaaaacaaagcattatgttgttagtttaggactcatgcttcatatgcatgtttcctattcaatgactatgttatgtactcttcatcattttgagatatcattatgctgtacagatgatacccttccttattttgtttcttttttctaattttgatttggctaagaaattccaatttcttgaaactgtaattgtttatagtttgtttacatcttcttttttcgcagagtcggtgtatactggtgtagacttctgtaagagattatgtggtgtgtcagtaatcaggaggtagtatttgcaaaccattgtctcatttctttttttgtttggtttttcgtagctctctgagcgtttctaaatattcttctcattgcagcggtgagagtatggagaatgctttgagagcatgttgtaagggaatcaagattgggaaaattctaattcacagagaaggagacaatggccaacaggtttcgattcgttctatggttgtacctactgttctctaaatgtttcatttcaattttttttactgttctttcctatgctatgtcagctcgtctacgaaaaacttccccaagatatctcagataggcatgtcttactattggatcctattctaggcacaggtttgtttattaacaccaaactaaaattaagttcttgggtaatcttaatttatacgtttgttaagtaaaactgtatcgattgttatcgatcttttcttcagggaattcggctgttcaggcaatctctttactcttaaggaaaggtgtaccagagtccaacatcatatttctcaatctcatatctgtaagtgttttgagttgagtctttttttacttaccgaaaagctttaagttttatcgagtttaaaactcacaatgctgtgaaaaaccaggcacctcaaggaattcatgtggtctgcaaaagattcccaagaattaagattgtgacatctgagattgaaagtggtttgaacggagattatcgtgtcataccgggcatgggcgagtttggagaccgatatttcggaactgatgatgatgactggcaagaagtgactcactcaacttaaaaacataataatagtaataataataannnnnnnaataataataattaataaaagaaagaaaaaaaaaagatctccatacttatatgtcttttatttttgtccactccaatcatcctcttatccgaaaatcagctaaacttgcttttgacttatatataattctgctggcttctctacttttataagagttgaaattttgttgacttcctttggccgattcttgctcttttatataatcctataaatatatatctatacaatacatacttcttcacacactttggggtttgttttgttctgtttttttttgtcttcttattttcattttttccttttggttaaagttttcttaccataatagggttgtggacattagccaaaatcaaattaccataataaggatggactctagtgtttggatatgaattggtcatattattaagaataatattgtacaaacaatattgtatattacttggtatgacatagaattaaaaaaatagtattttctaagaatgatcatccaaaatcaatctatatatacgtaaaatgtattcacaacccaagatgtatatacaaaaaaactatttatatatatatatatatgtatttatcgattgtggtgggttgaagttttgattcgattataggcggtggtaatatga

SEQ ID NO: 25759 - DNA, 2514 bp, Cannabis sativa
acactattttcataatgtgtaatactacatgaagtgacacattgtaaataattaacaatattctatcataattattaaattaactaagatctgacttaatatttaattctctgttctgtttgacaccattgatacttttgtagtatttttaattcttcgtacaattatggctaacaaaaatagactttcaatgtacaaagaaaaggacatgtgtctccaatattagagcgaggattgatatgaactattatctgttgtattattttttttttatattaattatctaaaaaaattgaaataaaacacaagtgaacaaaatatatacataaacaatatgtaatacaatttatttaattttttgataaatttttctaactttttagataattttgtagaagatgttgatgactaagagactttcaatgcactcttattagagttgaatttcattgtagatcacattagattagcttcttcaggctcttgagaagaataaaaatctgaaaaatatatttccttatggctggtatacatggatttttcgaatttgaatttaggatatcattccataaaatatatatatatatattacataaaatgttttggctactttttaagaagagaaaaaaaaactgatagagaatgatgaaagagaaaaattagtataatatgatcttattttcttctattttttacacatagtattccctacaaattgagatattatagtttaacaaatgattttgatcttacaagtgtaagagttttaacacattgaaatatgtaacctttgttacataattaagcactagacattaaaaccaaccaaattgggtactatactcaacaaaggctgcaatgtattgggatgaaatttcctagcaaaaaggaaacaaattgagctcattctcccattataagtacaattaaacccatgccttattttattaagaaaggcctcagaaacatctctcttagtaaaagtactaggatgtgagccacctctagaccaatcaacccatgtgatgctctcattagtagtcattttagggcaaaccttattcactaatgttgccaaataatgctcatccatgtaacacggaggtctacaatgctctgcaaacactggatagtacctcgaatctgatactatctcgattgccaatcgtctttgaacctcaaaccattgcgatccttttctccaatcagagatcgagatggtaggccacattttgtggttgtacctatgaaagtttcaataataggtaaatttagaatgtaggatcacttatgtactcaaaactctaatgtatgatgttaattttatggaataacattttaaaactaattcatgatgagcagggtcggccttgaaatttgtgttggacttcagaagatataaaaacatttcagcccttactaaggtagtatttttaaaattatttaaaatatatttgactcttaagcgcaaacttaacctaacttagtccagaactgacctaataataagcgagtgaagtctaaaaaatatcattatagtacctgcctcgacctcttcgtcttgggtcatcgaataagcccaagaaactttggttagagttgataaggtgagtgtagattgtagtgaagttgaagatgggaatgcatgtttcagagagtaatataaatctctcatttgagaaatctaatagggcatttgctagtagccttctttctgcatctatcattgtcttttttccccattggacatcctgcaaatctattttgttaggtgtgttaaaataaggagtggctgaaattttttttctataattagttaaatataatttcaataactattgtaaacaaaatattctttagcacactaaaagtaagttgttaattctagaaaattagatggtataccctttttaatttaactgaattcatttttactcttttcacgaagattgacttatactttttttttcaaaaaaaaaaattaataaacagagatatataatatataaggataaaaaacttttcaattttcattcatattttaagtaaaattaatatgtactcataaactcaaaacaataaatataaagcgtgattgtgtgataagtattgcttgccggtatgggatttggactaatagcctatgataagtatagttagttattatgccttgtctaggttaatttggatttttgcctttttatttaccaaattgagattgttgagatgttggattcaaagacttttgtacaattctgttcaattttactaatatgtcgattgtctatgtaccaaattatgcctcctaaactttgatgtttaccttatcgtacgccctaaactttgacaggtactaaattgtgtcactgaactttcattcatgctagaattctattagtaaaattaggcaaaaatctttaaatttaacaatctcaatagttagaaggaaatttttaacagactaaaaaatttgaagacatgatttaatatatgtcaaagtttaatatacaaaat

SEQ ID NO: 25760 - DNA, 2695 bp, Cannabis sativa
gtttgttgtgcttgttttagtatgattttatgctaaaactcatgtacacacggttttcctctgccacaagtgagggttttcaaaatatataacaagtaggggccagtctaagacaatggcctctgtctcttttcaaaaaaaaaagaacaatttagtaaatttaaaatattccattatgtttcctagttatataaacaacatgaagtaattttgttttcctttctagtgagttcaagtaaacaaaataatacaaaattagaatttccatttccctctactttattcccattcatttctatactgaattattctaattccgattacacgagttagttaacatgccacaaagctagtagctgacatacaggagaaaagaaatcactgattaattcaaagaaattctgatgtaagataagagggagaggaacaaaagaaagaccaaaaaaagagacttctgcttacactagaaatgggaactgttgcctgttctaggatctgagtgtacctggattagtaatggccgggaatcctgaataatagactgaaagccctcggaggttatgacattaagactatcatctccagtatctaaaggacaacattacacttgtaatttttccaaataaatgcatgcaagagtagatcgattgcaataaatgactgagaccataaccaacctggaattgcagaatctaacaacggaaggtctacggttgaaatacttttccctgcatactgttctttggccttctcaagaacatcctaccaagtataaacaagaaatccagaaatttttcgaacaataaaggacctggcaaggattaaaagggaagacaaagagagcttcttccaactgaaagtgtaattttctcatattcattagctggagattgggaacttactaattgttcttcaataccaaatatatcataatttttcttccatgtcgggtttgtcagcaactcataagcatagcgaatctgcaacttaaatagtcagtcccaaatttaaagcagcagtatcaggaatgacctgacaagtgacaaggaagagtaattccacttgaaaatacaattaaaacaatgatactggaaatcctcaacctcgaaagatcacacgcagaggatgtatttgaatgaaatgcttgagaggatgtaaggttgtattattccaccatgaaatgtgtacatgcacttgtacgctacttaagaacatgatatttcttaatgcagaaaagaaaacataaaaatggtttaaaaccaactcatatcagcatgtaccaaaactaaggaacttagaccaactcccatataattagatctagaacgaaatccgttgccttattcctaacatgttagttttttcaactattcttaacatgttagcagataaacaacataagataaagcaagaaattgctgaccttgataaaatcagaagtaagagaaacctcaacggctgaattcctgtagtggataactttttttggttatattaaatttaagaacactatattaaagcattctccaaacagtcaaaacacataacactatgcttcctaatggccactgccatcgactccaaagcttaaatatatatatatataatattaataaaatagaggacattacaccgtagtggccaaaaatgaaaaggaaaggagactgctatgtttttacaaataaagttatgaactatatttaattagagacaagcaaaaaaaaaaaatcagacactagggcaatagaaattgcagaaattaccatttggatgaaagtttctcgtaggcttccttcacttcttcaattgaactgtacttattgattagcagagcttcaaattgaccagccaaatgcgttcagtcagtatagataaatacatatacactataataaaatcccctatacatacaattcgcatacgacatacatatatacaggtatgcgggatgtgtataatgtatgatttagagtgcaaaagagagaaactgagaaactaccgtcgtaatgagaaggaggaaatgatttaggaattagaacgacttgatagaacatagccactaagaagagagctaaaggcaccgagtaagctttgatcgtcgacaccgacgtcgccattgacgaactcgatgccgaagtagaagaagccttggtcatggtggcgaatggcgattcctactgagtccacactctactccactggagactgagttatagaatcttcaaatctcggactggaaaaaggaataaataaaatatttattatattttaaaaataatatacagaagactagacgaatctgattgcggagcgtacaagtctccggaccaaaagcggtcttcaatggcaaatttgttaatttctatttaagcattatgacctaatccttgcttttaggattagttagtgatattattaaaattaggtaatatagtcgttcttcggctaatttaatttcttttagtattataataaaataactatttattaatttaataaatagttacttaaaaatataatttttatatatgataaaattaaaaatatattatttatttctatattattattattaatacactataaaaaaaaatgttttttttagtgacaattttttaatcctaacataaattttttgtgactaaatgtgacttttagtcacagcaaaaaattacttatgactaaaacataatat

SEQ ID NO: 25761 - DNA, 1826 bp, Cannabis sativa
catgaagacttaagcttatattttactgtttgatgctattaaatattaacattacataaatattaaagactactagtgactagtgtcaatataaaataccatctaatattatgatttgtgtaattaaatattaagttatatatatttttatttaataattattaagtaaaataattataattcgcaaagaactattttataaaagtttgtttggtagatcgtataatgatcctatgtatatttggataaaataatatattatattaattattatgataaaaaaatttaatacaaagtaaattgtattatttaacacataaataatactccgtattaattattattatattatttataaaggatctggggtcaatttcaatctccaatacagggacctagaccggatccagattggacttcggatctctcgaactcgtaccttagaccctaaacttggagcctagacctgaaccctagtctccgaactccaaacccagaccgcgcacccaactggacccgaacccagacccaatctggagttggtgctagagttgagtttgttaaaaatatattataacattacacaacctattaatacaactcaatattaattatattattgtattaaaccaatacattatgacttactaaacaagctctaatagtgttaaatatcaattgcatattattaagtgtggtttaataatagaataaataacatcataaatattcaatgttttgagttgccataaatttaataattttttttattaaatttttaaaatataattccactagtctcaatttgttgaggtttgttagttgatgactaggataataggtgtcacaattttattgaatcaactcataatttctttaaaaactattttaaatttaaaacctaataaaaataatttaaaaataagtaaaataataattaaaactaattaaagcagtattcataaaactcgtgcctttctggttagcagtttatcttctcatctccaatctccattctttaactacttatactgctatttacatataattatattaagtaccatattatcttaattttcttcgaaaggctatttaatttatataaatatatatatatatatataatatgcaatagtatattgaataccacaaccactaataaaatatcttctctcatatagtctttaaagtgtaaaataggaatacactaaattattttttatacaataacaataataatagccctttggattaaaaaggctgcggtgtcaccttttaaagcagtaattatcaacactcactcccatacacaacacgccattattgattattttgaaaataatggaaacatcttttcgcttatttggtcattaatttgtctccttctccactctcttccaatcctttcgcatattcgtccccatcatattcattcattcattcattctcacatctgttaaccccacacaacaatttattatcacacattctcaaacttccactcattattattatttcatttctctcacactatataattatatactactactatcttcctccacatttgtctctgctgagatctactcttctcgcacccatcatctcatctccaatatcctctttctcccattattaattacatcatcatcttaatttaaaaataatatgggttccgaagttttggaagaatgccggccaattattccaatgccaactatttctattcagaggaatatttcaaatctgaacgaggtaaagtcgttgcctagtactgatcatgatcataataatccaaaacagcaaggtgatgagcttttgtgttt

SEQ ID NO: 25762 - DNA, 3125 bp, Cannabis sativa
  modified_base (2867)..(2867): a, c, t, g, unknown or other
cttgattccaaaagtgttctatctcgatatgtaattttttgtggagatcgaagcttcatgatcgattaaaattatttttgtgaagctttatctcgattcccttcagcctggagaaagacttcttgatatctttaatagtgtgcttggtccgtgtatgttatgcaaccaggtagatggtcacttcattccccatctatttgccagatgacaaaaataatttggttcatgtctaaatgtggtattcgtttggaaaatttcaacctgtcttttggaaggcatttagtcatttggatatgccaacctccttttttttgagataaacactgatatggagcatatacaagaattcttgtttttcgttccatgttttaattatagggtgtggcagtatcgaaatgtgtccactagcagaaagtttttcttgtagagtctatgtttaatattatagcccaagattttcagggtcattggagattttttgtgagggatccttccatcgaatctcatcaatcggtggagaggcctcaaggatgatcaagatcaactcattacaatctatgcaatgaagattgaggtgggagactctcttgcaagtaagatccaggctatgcttaatggtatgaaagcaatgcaggagttccagattgtggatgtcaatattatcttggtttatcaagttcttgtgagtgcggtagcaaagagacagacctcaaattggtccattgtgatttcgttctctaacttatgctatatataattaatggctgtaatgtgctttagatttttagaaaactaaatttggctgctcatgcacttgtgcaatggggcctttctaactctattttctggttttattgattttttggaggtgaatccctttttattcaccactatttttgtgcttaatggagtttttgaggcattttaagcaaaaaaatagtttgatatcatattgagttggtataatactctgtggcgaagttagaaaattattttagatgggccgaacatttactacaaattaaaagaaagtaaatatctaatatcttatataaatatattcaattattttgattttgtataattttgattctaaatgataaatatataatttttacatatagaaactactattttttttttattattattgttttattttataaaaaattactaaaatacttttacaaacatatttataatattgcgaacaattaaattaaattttagcaattttaattgaataatttatgcaagaataaatttcaaaacaaaaaaaaaaaaaaacaaaacgttaggagtataaatatgccaacctcttttctttgaggtaaacactgatatagagcatagacaagaattcttgttcatcgctgcatgcctttgttatagggcgtgacagtatcagaatgtggctttccactagcataaagttttccctatgtagtccacgtttaatattatagcccgaaattttttagggtcattggagagttttatgtagagggatccttccatcgaatttcataagtggagaggcctcaatgatggtcaagatcaattcaagacaatttatgtaatgaagtttgaggtgggagactctcttgtggggaagcattaggctatgattcacagtattaaagcgatctaggagttgcggattgtgggtgacaaagagacagacttcaaattggtccatcgcaattccgttctctaaattactttatgctttagataatatgtgctttggatttttagaaagctaaatttgattactcatgcccttgcacaattgggcctttctaactccgtttctggttttgttgatttttggagcttaatgaaatttttgaggtatttcaagcaaaaaaataaattgagatcatattgagttggtataacacttcgtgacaaagttagaaaattattttagataggccgaatatttacttcaaattatggtaaggacattagttttgttctaatggtaagcttttacaattattaataattaatgtgatagtgataaatagataattgtacaattatagttaatatttgggatgcacttgaatattatttttaataatatattttaatattaattttttaaatcaagtaaaagttattttctcaatcgtttttttcatctttctacacttataatcttcttctcactcagtgcatgtcttctccacttccaattccaattaaataagaatgtcatttcctcatctcatatttctataatctattttgtcaaactattattattattattattattaatttgttattgttattattattgtttataaaaattacagtaacaatgaatctttagctccacgagactctaaaaaacatgtaaattatctcaatctcccacaattaaagtttgaggtattttaattctttctttcaagacattaaacaaaggcaaacaaggtaaaccaaataagcatgctatcgaacaccatcaactaggacagaatatcgaacgggtttaataggtttcaggttcataagtttttgaataaaaaaatgcacccctacccgcttgttcatgtcacaggttcgactggtttcaagtttgtaggtttcgtattagcaccgtctacagtaaatgggttacgggcaggttcatatgtttttttaatattatatactaaatattatatatatattatttataatacatagtaatagttatatgtaagactcttcttttataggagtttgaaaaacaaccctatggatgggaatgtttttcaaccgatcttattgttagattttctgccaaaaaaaaaacctattttaatataatcagatttattaattaataaaagatcagaaatcattttatnttgcatggttcacaagatttattttatgattattttaattgataaattctattaagtgcaggacatatataaatatatatatatttgttcataattatagtgtcatcagcacaatggaatattatcatgattacatgttcaaaagtttatttccatgatttatcagtttatttgatttagactgacatgataatcggcgataaggtatacttacaccttggataagtgttatgacctttctagggtattggcaaagtt

SEQ ID NO: 25763 - DNA, 1492 bp, Cannabis sativa
cttactcttcgttgatgatagtctccttttttgtcaagcagatgaaagttcatgcctagctatcaagagggtgttggatacttaccataaagcttctggccaattcatcaatcgtgacaaatctgttatgtccttctctctaaatacaacattggctgcccaaattttctttcatcggcaactctcaatgccaattagtgaatgtcacgaacgataccttggcctcccatcttactctggccgtgacaaaagggagctgtttagcaacatcaaagagcgtatttagaaactcatgcaatcttggagtgaaaaactcttctcaactgggggtagggaggtccttctcaaagtagtggtattcagtctatccctacctatgctatgagttgcttccgatttccagtgtacttttgcaatcaacttgaaagtatgatggctaacttttggtggggaatgaatgagaatggttctaagattcattggcgatcatggaacttgctttgtaaaactaagggtgaacgtggaatgggtttctgatcttttattcaatttaaccaagctctccttgctaagcaagcttggcggattgttgaatacccaaactcactccttagtaaacttctcaaaagcagatatttccctcataactcattccttgaggcaagtatgggccattctccttctcttacatggcaaggaattcgttggggttgtgagttattggttcatgggctgagatggaagattggtgaaggtcgaactattagaagtggatttgacccttggctgcctggtcattcaaactttttaccaatctcttacttgggacctcctaatggtatggttgctaatctcatcacataagagcggcaatggaacattcctttgctacaacaatactttagccctcttgatgttgagaagatcctcaccttgcctctgagttttttccccacacaagataaattgatttggcatcatcactcctcagggaactttacagttcagagtgcatatcatcttgcaacttcattggataatgaagacctatgctccagctccacttcggctacacaatggtggaaacttttctggtctctccaaatccctcaaaaggttaaaatatttgcttggcgtgtcatccatgatgctctaccagttgccacatcacttgtccgaaggaaaatcatcactgattccacatgctctatatgcaaacaagcatgggaatcaacggggcatgccctttttggttgcaaatatgccaaagcggtttggagaagtttcaatctcagctttaattggtcagcagcaacttcaatgaaaaatggggattacttgatacatctttcctctatttacaacaaagctgaaatggaacatatcttctgtacaatgtgggctatttggagtgagagaaacaaggtgattcatggcaagaaggcaaggagtgctcgagatttggctgtctttgcttaagtttttctgcaaa

SEQ ID NO: 25764 - DNA, 1095 bp, Cannabis sativa
  modified_base (78)..(81): a, c, t, g, unknown or other
aactacgtccgccaagcccctgatcagaccgtccattttttttcgactgtgttctggttgtagagagagaaagaagannnngagagagagagagagagtgaagatgtatgatatattaaagtgaagaaaggtagttaaataaggaagggtggaagctatggcggggaatggcaatttggtaattatcataaagagtgccgacaaatttggacgacacatgtgtggacacctgtgacaacaacgtagtaagagttgactatgtgtccgacgtggcaatcactatctaatcacacacactctttctcttcttttttttctaaagggagcaaatctcaattgttaatactaaatttattattattattattagtaataaaaaaatctataattaattttctttccattctttctcattgtgtgttggaaaattttatttaacaagggaaagtaatcaattgattttcaagctaggattttcctaatttttgtttaaaatatattttttcagaagctatttttaaaagacaaattgaattttttttttttttttttgatataagcgtttatatattacaacatattttacctgggactcgaacccaggacctccaacactcacacacccacctatggtcacttgagctagccccaaatggtttaaaaaaaaaaaaaaatggcatggattattgcctttgtacagttttatcttttcaattttttgagttacaaaaatttctcacaaactatagcaaacattgaaaatgtgtccctactgcataataaggcttgtagtgcagatacagagttttatttttatttttattgttttggaggatgtaaggagatgtagagctgattttgtaagagtcgaaaaggaaaacttatcagagttagttccatattgttaatgtttgaaaataaaattccatatttaagatgaatagagtactcctctcactatcaattaattttgagatagaatttcatttacctttttccaaattcatattaatataatttagtaggatgtactaattattatctctatcattggttacagcaatctccttcagtactgtccatagctacaactgg

SEQ ID NO: 25765 - DNA, 1656 bp, Cannabis sativa
atatatatatatatataatactagtatttatattattatatatttatatatttatacatgcatgtgccaaataatatataattaattggattcttcataagtgtttttcaaaaaaaaaattaaaataattttgtccttatatttataattaattattttgaattttattttaaacaccaattatttaaaaaaaaaatcgaaaacatgcatgttgttataaatcaacgtacgtataacattataatttttccatacatcgaaatatagaattaatcgcacaccttatcaatttagtggaacaaacgaattaaatttttataagagtaaatactattttgaattctatattttgcaaaagttatcaatattaaactctctttatttaataaaatagaccttatattttttaaaattataaaaatagaactctgaacttaatttttaataattttattttttaatataatcaactttaattaagacaatttttaacatgaacatatacaaaatgtaaccagttttgtcataacatctctaaatcaaattattattaagttttattttgaaaaaaaatcatttcaaagtcctatttgtataattttgaaaaataaaagatctattttgtcatttaataaaatagaaggtccaattaataacttttgcaaaatacagaatctaaaatagtatttatctttcccataattaactatacataatgatgtagttatgtcgcaactaaccctaatctttatgtaatatttcatgaagaaaaatcataacatatatattcatgaacaaagtacatatagtagtgatgaatataatacttaatatatacactatattgtttgtatatgcatgcagggtgtgtataagaatgatatgattggtatagaattcgatccattagtagctggagagccaaagctaaaaggtgaaatagttctccaaacaatgttcaaaatgcatttgaatcattcaaaatggtgggatttggcagctcttgtgtgtttgttaatttcacatagattaatatttctattggttctcaagtataaagacaccatatcactacactctaagctatatttcaacaaagtgatccaccaaattggcaatatgagaagatcatcttcttcaatatcactaataagtcaaagtttcaatgttgtatcaaagaagaaaataagttctagtaaatgtaaaactctccattccttatcttcccaattggatctttcttctcctatgagacctagttaggattatcttgtcattttgcaaaataagacaattaatcatattatatgtcatttgttattattattataaagaaaataagacaaaatttgagacatgtgattgcttaactattatcaaatttatttaaatattaaatttaaaataattatttattacaataaataattatataattatattcagtaacattcattcctttgattgtgttatacagtggtggttcaggaaccatggacttgttgtactaagctccaataaattaaaatcatcaattaaataatcatatatattaattaaattatcatacatatatatatattaattacctccaaactttgacacatactaaattatgccacatgaactttaaggtcgttaaaaattcctcctgaa

SEQ ID NO: 25766 - DNA, 2228 bp, Cannabis sativa
gtttattcatttcttattttatttatcttttcattttgttggattgtggagggtgtttattttagccattcttctttttcttttttggatatggaaaattagaaactagaacctgtctggcctgataggctggatatatagtataagcctcagccatacaaaatggggattctaaatttatatctggataattggactgggaccactgaatcaatgaaaatgagcatgcggataaatgtgacgaccaatacaaccgtgaagtccctaggttctatcagcaacaacatgatgttaaagcggagataaggctggctttctcaatcggtcttatccaagaactcattaattctacaataaaaattatgttctgcccagttggggctaacttgggttgcagcctcctccagtcttatcagcccaacaactacaaggggtccaacacgcttcagccacgactgctttgctggaaaagacatttggcaaaatccaaatggccctactaagtccaaacatctctgtggcttttattagctatgatgtgctttcctgggaatggtattgtgaacgactaaataaaaaagtgctgctcattttactaacaaattccttggtaattggtttaagctcaaaatgaacgagaatttaaaaacttgtatgtatatgactagaggaagtcatgtggacatagaagaaggtaaaccccaccactccatctatccggaactgcaagcaacggcaatttgacgataaaacaaagagaaaaggagatggaaaaggcacagtgactattacttttggtccactaaaaaggaactcgataattcatgtcttagcattggatgagagtgctgaataagaagcactgaaacaaagactgacatcttcactggacacagaaatggtaaatgtagccatgaaaacgaacttcatatgccacagacatgctaatgcgcataacacctaaattgccagaatttccatagtgagtttagaatcaatcatactctaattcgtctggcgtaatgggccgtttaagagggacaatagacttcttctcaacatcacgtgataaagctttcctcatatctgaaaaaaaaaatggaagaatagaacaaaatgtgagcaaaatgaaaaggcaattagaatacatgatttggtttcaagtttgagcatacctagcccatcttcctcccctgaataataccgtagaacccttctatagatcacatatccaagctgaggagataaaaatagagtaagcatggggaatcttatttggtacaaaataaaaaaaatgatagaaacatgttcattgggtttaataccattctagaccctgtattttgcaaaattactaattagaaaatggtacaaaatagtaccctgagctcaattttttaataattttttttaatataaccaacaaatttctagcacgaatagaagcagataatatacccaattatgtcataacaactctacattttgataaaaaatcaatccagggtactattttgtaccatttttaaaaatacgaaatccaatttgtcatataacaaaacagtccaatcggtaacttttacaaaacacagtccaaaatgatttacccttgttcagtgacaactcttcatctaaacaagttaaaaagaagaaaaaaaaggtcagtaaaatcttctctttgttttccttactgaatgttgcaacttgcccaatgaaaacgttaatttagtagcaggtgcataaaccctgagtattttatttccttatcttctctttgtttggataataatatatgataaatccatgaattttccatattatcagggccaggttcacaacaaaattataaagaaacgagaataatatgtttaactcgtgttcgcaggtcgtgttcgtgtcaaaacccatgtataacaggtatatgctcaacccgaacacgacccgtctaataatcgtgtcagaaaatgaaacctgaacacgacccatttataaactgattgacacgacacgacccgtgtaacctgtttataaacatattttgtttaaacatgtcaaccaataacaagtttatgaagtatataacaagtttataacccatttatgacatattgaaatactaaaataactttaaaataaatatgtcattaacgggtcagtttcgtgttagccgtgtcaacccaaacacgacccgtttattaaacggattagacgagtcaacccgaacataa

SEQ ID NO: 25767 - DNA, 3210 bp, Cannabis sativa
ttttttttgttggttttcgaaaaaaattgatttaacagagggaaattctttatttttgtagtagtgaaagtgatgaaatttaagaaaagagacaagattagggttattaattaattgttatataaaaaatataggaagatgatcacaattattattagggggattgatgacatgagagggcaatattgtcaaggaatattaatatgtgagaatatataattagaatatgtatatattaaaatgtaaattaaatatataatattaattaaagaattaatgtattagaaaggtaaaggtaataggaatgggaggagatagaaagcaaaggatgaaagaaagagaggtggtggaatgcctttttcttctttggacggttcctcaacaaatctttctttgacttcctcaacccaatttacaatttaaatatatatatatatatatattattatatgcttctacttgattttgttctttctttcattatttttctttttctttaatatatactactcttcaattcaatcctcgaatcttagtacggtagctcttttacttttttatttttacttattggtaattaaatataatatatgcatgagcttaaactattcataaaactaaatatatatatacatataattatatttatatatacatacaaagttatattcacaacgtactctatttcttgttcaatgggctgtatatatagcattttcaaaaaagcaaattaatcaaatttagttatatatcaaaataattgaattagctatagtttgattctttgtgtgtcccatcaaaataaggagaaagaataatcaaagtccttaactaagtcaccctattccaataataataataataattataataaagtaaaaaaaatcaaactttgtcttaaaaaattaacctttcaataatttgatagctataattaaactaatattgataaacgctcaatttaatttgttttttttttattattttaaactttctctgctcatccaaccataatttccccacgtgaatattatatatttttcacaagagtgataaattacaaagtgtgaaaactaagtgcttgaaaaagagagtcactattatattttatacgtactattatatatattataaatagatattaattaattgatcgttaagagaaaaaaaaaaaggacaagaaagcaaagcatcgtattctcatcaatatagtctcatagctagacttgttgatagaattaattaattaattcatgcatataaaaatatatatgacattcctaagtgatgctaataaggtgacttttaacatttttcattaaacattgctatagggtaccaggcccgactataggcataagctgattagatttgtgcttagggcatacctagcttaggaactcaaaaaaattcttttttaaattaatttattttttttttactaattttaaaaaatactatattttcttctaaataagggctagagaattttattttctctaatagcccattatatttcagggtccgtcttgtgcagggccggccctaggtataggcgggttaagcccgtgtctaggacccattcattttaagggctcaaataaaaaaaaatattttttaaaaataccatttaactttataataagggtctaatttttttttttttattttacttatagcctattttaatttgagataccaaaatagttgaatgtctatgacatatgacatgacgttttataattgattaattaaaagatattaattaattaattgaaagaagagaattaggaaaagacaagattgtctcccatgatgggtgatgcatggggtccccagtactgctgcctcggtaacatgttcaaagagagggatggtacgttaaggctattttggtaatttcagcagtacacacacacataggccctctcttatgagttgtctctctgatccttttcatcgatatatcatcaatatttggaaagctcctgatcatcacccacatttcatgctaccctacctacctactatactcttcttttcttccttttccacaatcaattatataaatttatatatacaccattagaatttagcaatcttatctaagtgtcactctacacacttattattagcgatattttttaaaagttattttattagttaagttatacgaaatttattcaagattatatatcaattgcaaaagaatacttgtgtccagtgttcgaccccacttaccaacatattcagtcactctatgtattaattatttaatatgtactgtagtgtatatatatatatgtgatgccttgagaagtttcaacccatgaggcaatttaatatatcatgtcttaattatatatttaaataattttaaattttttatttaattatacgcgtgaccctaaagtgatagttacatgcaccgatgagatttgaatgtggtaatagttaagggaggaaaatccaatttattttagaattttttacttaaattttgatcatgtactaaatcatatactcttgaatttttttaaaatattaaaaaaaattctaaactaatgagatttgttggatttaaagatttttttttaatatatactaacacaagtcttacattttagattaaagttcaaccacaattttgtaatatatgttaaagtttaaagattagatatcaaaatttgaagatatatgaacaattttcgtattagtaaccatgaatagaatttgacaaaaattttaaatctaaccatttcagaaatttaattttttttttaatatggcctacaaaaattcaacaaaaatcaatatctatatataaaaaaaaggaaatgacaaaagctactttgaaaaatgccgttatgtataggattgcctttgtaatgtattggattggaccttttgatacaaaccttctacccacccaagcttactattattataattcaatttctagctactttccaataatattgtttctcgaaaatataaaaaggaaagtaataactaataatttaattaaaccctttatttatcataatgagataataataaacgcaatgctttcatcaccataaataatatatattccatcagtaggatcagtgttaagatatatcggacaatatttttacatatgtggtattaatttttatggacacttaaatatataatattttagtataaattaaaatttaacatagt

SEQ ID NO: 25768 - DNA, 2056 bp, Cannabis sativa
ttcaactaggaaaatcgatgccatgaggcaaagaaatttgatttaacatatatgtctaaattagtaatttatacacatagagctggtgctataactgagcttgagacctaaaacggtgaaaagtaagcagaacaagtaaagacttaattatttcttctcattttattttttagcgttggttgcggtttgtgtactggacgtttggaacaacaatgataatgtgcatggatagagatgtacagtgttgtgaccagagtcaaacccttccacacaggaaatgataaagctaaataattaggcaatattataatgttacattgcttacgaggcaagatgtattactttttataatatatgacatttgtgcttgtaagctacattacattttctgtgccatcctgtccgaaaaagtctcgaggcataggcaagaagaattagtactcaggtactttttgtttcattgtaatggtactgttgtatacaatttatttgtgtgcatatgtttgaatgtgtaatgtctttaaattatcagccggtacttattttaattttcagtcaatataaataataaggttgtgacagaaagagagcactccaaagtacattttaacactctcagtgcgatatacgctgaagcgaactatccaaatcaattcaataacttcagaacaaagaaaaatcaagtagatttattttgctcttcctctttgcttttctactctccttttcctgttacttggtaaattaaaaaacaaaactacagataaaatataaacttaggctcttcagaggataagaacagcaactacagtcaaaaaaattaatcttcacacgagtgggaaaaagaggatcgtactctttggtgcatgatcgataatggagctaagatttcagtgatcggttctaggtttcctctggaccctttcctttgcttcttagcatgtctgtaaaattccctctcatgattctcctgaatctagtatcctcagccggtgaaggtggtatcgcctttggtgattcaactgtctctggtggtatctctacagattctttcttgcctaagagtccactgtcaccaaagaaactgctcacagatgatgcaatgccaatatgagcacccatcactttactaatggtctcaaaggttccaccggatctctccttcattataatttcaagcgcctccttgtgtgcaggatctaatgcatctgagtccttcaataagttctgtatggcaggtagaaggaaatcccgaacactagttgctgaaacatctgtaataagcagaaaagagattgtgcatcaaagacgtcaaaactcaacaaaccaaaataactttgttatcaccagtcagcagcacattttgaatgacaagcaaacacaaaaacattgtcaaattagcttgtagataaatctaaaatttgggctactagtttgtaagaggtgcaatcatttgtttctcaagacaccttccaatgaaaaatgttaactgttaacacgaggaatctgtaaatgtgaaaccttcaagttaaatgttttttttttccatgtccaggctttaaatttggagtgttatcataaccagactcgctcataaacaaaaagttgtagatgtgcttcacctagtttcagattttcaatggtcaattgtgctcttgtcaatttcgcttttgatgatgtaagtaaaagaaggaatattctaagtacatttattttgagtcataacaattttcacataccccaggatgaaatcaatgtttcaatactccagctagttattcttagatgcaaatggacaaccaaacacagtagctttggtcacatttgtagaaaatctcataatctgacatgacgaatcacatcgtcacatgttttgatacacaaatataagctagaactggaactattccttaaaatctgaacacaagaaaaaggtagcacaatgtaccagcctgctcttattaggcaagtttttgtccaaaatgtagagcacaattgcacatatatgattttgcaaacactaggggcaaataggggtatgcataaatcatccaat

SEQ ID NO: 25769 - DNA, 1100 bp, Cannabis sativa
  modified_base (1028)..(1046): a, c, t, g, unknown or other
acaaatattgattccgattattttacatttattctgttacatttctccattaaattattctgattctgaatactgtatagtaagcatgcatgtcataaaagaaatgttagtattacaggggatggaggaactctgcctctaaggccatctttaatgcaggcaacgtgtagtgctatctgtctggcccactaaccattttttatacaatttaaaaatagcttatttaatatataaaagataataataataaaaaaaaaaagacagaattagacatgaactaataatagagttattattggcgaatttcgtaatcccttaatagtttgtaaatattaaagtgcatttagtaattttttttaattaaaaaaaatcaaaatattttttaaaaccatgttatataaaactattttgactttttaattttttaattgagaattaaaattttaaaaattttgaaaacaaaaaaattactttcaatgtttttatatttttttttaataatattttgaagctcagactccaacctcgaccctaacccaaatctggacccgattaaataaaattaaaacataaaaataaaaataaaagttatagaacacatttttgttttttgtttttaaaactaacaaacaaaagtagttatagaaaacttttttattttttaaaaatacaaattttactttgatatcatcgaaacccttccatgggatccatggcctatcccatatttcacacgatccatcagcgatcaagatacccgctccatccaagcacaccttggaaggttaatgatctgtttcaagatggttctcgtatctagaatgaaaggctgattcgtgttttgcagtggagattgctgctgatattctaaggatcaaacctctgaatgagggttctgatatcctattttggaaggctgcgaagtcgggtaagttcttggtcaaaagtgcgtattggataagtcaacaacatgagtttaaagagccaaacagtgttggattttgtgccctaaataaaactcattttannnnnnnnnnnnnnnnnnnttaataaagattagaaatcattttatgttgcacggttcatatgatttatttcat

SEQ ID NO: 25770 - DNA, 1839 bp, Cannabis sativa
tgaacgaccttcatatttcggatgaagcgggactgttaggactggcgtgcgctttcctcctccaactgctggttggcttgcagaaagccctcaatttaaaacttggcgtcagtaagctcaactcagagggtcattttgacagcacctaggtcaaggtttgtcacccgaaccctctccagctccgtcactagtgcgccaacctccacggtagccctttctactagtagggctgcttgtcaaacaataaggcaaagttagaaaggctgaattaccaagaacaggggacgaggaaaataaaagcaaatggaatgaaaagaaaaatatctcaaagtcttaccccgatggcctacctctttgcataatgggccagtgcgaaaagcatccgcgttgctgcaagatgcccaagtctccgtaggcaattctgaggcgctcgcagccacttggtccaagagctctgcaacaaaatgagtggctcttggcccaacctatagggcagccggttctttagggcttcaacctccacgatttgtcccaccggaggcactgcgtgcatgtcatctgccatctccggcatgtggacaaccgacatcactctgataagaaaatggtagaaatcatacctcccacataatgacactacactttgaaggctaatgaggtaatgcattaaagggctcgtcataaaaaccaagtgcgcaaaaaatttctcaaaagaagttactacaagcccttggaccatagtatgtcccgaaagcttgggggtaaatgttttctacatttttgccagcacgccacgtggaaattaattaaagagagatgagaaatcattaagctatccaagggcctcgctctgcgctcttcgaggataaaggccctaaccttgcagaacagacctccacgaaaaagaagtcttcccgaatgcaggccacgagagagatgtccgcgagctaatgactctctcccttctagaagacgggaccctttgcttccgcgaagaatatggaccttccatcaagatacattgatccaggggactcttttaacttgcaaaagtttggtttgcacatgccagactacgggcccatccaccacacctttcctatgtacgatgtcagaggttgcctctcacgcgcacgccaccatgcagagcatgcgtgtccttgtgtactgtgcaaaacgatcccgactaagaataaggtaattcaaatgagaacgaacctggaatgacatgcgttcaaagcgccgccagtacaaccaatacaatctgacatcagtaaagaccgcatggaaaatatactacctaccaatccaacggtgggggttcatccttatgaagatccatccaagatggcccatgcgaggagatcggcctataaatacccccaaaggcacacgaggcaagggatttagaccctaatttttacttcttctcctttccttcctttggctcttcaccttgagaccgaagacgaattctctgtgaaaacatcactataaccctcttgttaacttcagaatattcctactaagcgtcctcttcttcgagaggcacatagtagtctgggagaaaagtctattctttttgtatttgtataaacgatcattggccaaagagcctaataaaatagactcgtggactaaggatatttaatacctgaatcacgtaaaaatctcttatttgttattgcattatttataccttcattactttcttaagctccatatattcgattgccaaaaaactggtaaacacctaaaatctcttttcttcacaattaagcccttgtgtagtaaaaattcataaataagacatactctaatttagaattataattgatt

SEQ ID NO: 25771 - DNA, 6169 bp, Cannabis sativa
  modified_base (4792)..(4792): a, c, t, g, unknown or other
ttttttttttttgaagaaaacaactaaactacctgttcaaagaggtgaattttgggctaaaagaagaaacacttggaaagataaaagaacttccacaaacagtgtaatgttcatggatttcccaataccaaaatataattcctttggtacaccaaacttcgacctttgttatctttttttggtaaaagtctaacttgttaatactttagtacaggactgattagaccaaaaaaagaaagaagcttatgaaatgacatgttgtttaagtcggtagttgaatttccaaaccgccaagttcttaaccgaaatttagatattaacaataaatgggtaaacattcattagccagaggaagagaagagaagagaaaaataccatttttgaaaactaatggcgacagcctactctttaatctggcaattaaaaaagataaccaagttgcagaaactctcaaataaacaatcacgtgagagagaaagagagagaagattgggattacagacgacaaaagtcagccattaatggacgaagggaaaagaaaaaagaaaagtagaaaaagacttcacctcatttttatatattttggtgagtttgaagaaacaagtagatttggcaacatgggtgtttctggcttggctttttcctcaatctgtttctatgcttctgtcacaaagttcgtgagatctgaggaaagacttgtcttttaacaaggtggtagttcatttatatatgtaatgtattttattgcactgtcaaaatagaagtttttatttattctaatttttatttatctcttatggctaaagtttgattgatagatccaatatatatatattttaatttgattttaaattctttccatttggaaaaacaaggttaggtttggttaggttaggttgaatttagttgcctttttttactccacaataactgctattttctttgattggtttaatagtaattacttaagttagtaatgttagatacaacctcggttagaatattttaatttagatttagtctcttctgaaatatcttaacattgtattgattttcactacttttactagatgtctgtactaatattagctgtcataatggttacactactcattattgatagttttttggttctataataagggtaatacaagtaagtggggtgatgttgctaaaaccatgtccacttaatattataactaccaaaaccgaatataaaaaaggaattattaaatatactattgttattattacttaaaatttttaaatattgttattagtgtaattaagtataaaatctcttgtgatttaatgtaataatttttataaaatatcgttaactgttaattcagaatttcgttaacataaatgagacttataattaatattttgaaataattatgtaataaattatacttggaatttaattgctaaattaaataaagacaataattttacgtaattttctagttaaatcaacataatctacgagttatttttatttctttgagtgtttgtgtatagatttttgcaaggattcgatatgcaaactttattgtccccttcaactataattttgaatgctatttgtaaaagtaggataacgattatttgttcttatctgaagggtagttatataacgtggattttttcatgttttacacgtttatgcgtaaatgagaaatataaataactacatgtgttttaaaagtacaaatgaaccagtgctttgacttggccaaaacatgttgcagtcaagtagaacttgttttacattcttctctgaatgttgatcgaaaggaccataaatcgagttaagctttttcaaggcaaactcgatagccaaatcaacattaactatttttgacctaagcaagacacatggttatctttttttcttgaagagaggcggcttgagtagggtgtggttccaaagcattcttgagataaatgatgttttgagcgagtagccaaatatatttaatgtccgaagcggagagttgtcttctctgaaaaagataattccatgcagcccttctcttgatttttctcgttggttgaccaaatcaggtcttaacatagttttgctaatatttcctttagtgtcttttcgagattgttacatgactttatttgtttattatgcgaccagatgattcttacttaatttgttatttattactttgtacacgtgtcatgcaatcagactcatttatttaagtgcttcagaaaatgggtataacaattatcccttaaaaactgtttctagtcttaaagggacttttgaaatacctcatcggaaattgtaccccacctttaagcgtattaaatatgctttttattttggcgattttatttcttcgagaaactttaaatatctttcacatcggttttttcatcacttcaacctgaaagtgagtgttggggtttataccctgaaaaatatgtaaaaatattttgactttaaatataagttgaacaatttgatatatgattgaatgttgaattatttattaagaatttctatgtaaatattagaaaattcattgttcttatatgaagttgtgacatgtattgtacagagaattaagatcacgagatatgaataaaatagtcaacaacatattaaagttatggaatctttaatcaatagttgctagtatagttcattgacaccttttattcggtgtaagcaatcttgatttatatcgctgatgtacatggacatcttggtgaaggtattgtatataatagagattatatataacatgatcgatatgtaattaagttgcctttatcaaattcttcatttactatgtagacctaattcatattacaatgatgatcaattagtagatcggcctaaatcctgagaagtaatgaactcttgttcatgttatttatttctttgattcacttgttaaagtttctcagagaagatgattcttacaacttgttttgagaatctaataatgcggatatctatgaacttgatttacaatgtggaatcctgactttcctaacagatcaaatattagttccctttaagtgttaattctagaactgaaagttgtgcacaaatttagatcgggtctaaattatactttcactattaatagtactaaaggataaataagtaataagaagagtaaaatggtaaattgactaattctaattatgaacaaatacgtggagggctaatcactagtattcatcataacaatgaatactgttgttaaactcaataaatataattatataattactaaaagtgttattcaatatttttagtaaaataataatagaatcaataaatagaattatttttattgatgagattcaataactaatctaatttattagagcttagtattatatgtccatggtccttggattaccacaatataacattgtcaagggtatggatgaaacaaaataaaaaaaaaaataagaaaaatctattttgaaatagcaaaatagtaattatttatttttataataaataatttaattttaaatttattctttaaataaattggagagacaaaaaagttgttaggacaaacatcattgttattgcaagatggtgagaatcaactatgtaataataatgatatgcgccaaaaacttatgatgggtgccattggatttgttttttaattaattaattcaaaagataaatatttatcaaaaatttaaatttaaaagttagttatagatctttatttatagttgagatattctctcaaagtggttaagagattctgttcagataatttaaatattttttcaagtgattgagatatttccttaatttgttattagatatttaaactaaatatttaaaggcttgaatattattattattattaatattttaaataaataaatatcttatttagagaggccaggagagaggaacatattgcgttggagaggaacgtccagaagcttctgcgataacccatatgcgagtcgtctccgttcagttcaatcggtcggcgtctccgtttagcgagtcatctctgttcggtttagtcggtcggtggccaccgtctgagagtggctccggagcagatgtattcggttcggtttcagccgtacggctaagagtggctcttctgttttagtttttttgtttcctttattaattttctattattagtttaattcctattagagtttttatggggttagtattataaggggtacattccttaactgatttaagtgatgtgatcgtatttatgtgttaaaactatttaagttttcccattagtcttgccttctgacatggtgttttagttttccctttagttttttctgattcgattcttgttggttcttcttttctgtatttgcttttgggattttgctgattgtggtacgattatggaagacggtacataggtgcatattcctattgaggaggaggctatggtagaagcattcaagaagaggaagattggttgtgttcaacccaaaatttctgatataataggcattaaagaagctttgagttggatcgctactcattcgtgagatagagtcatgttggaaatagatagcttggtgtgtgtccaagcgattcagtatttttatgccttcacagtttgtcttattgttcaagatgttcgaaatttgcttttggctttattttttgttgatttgtgttttgtaaaacgatctgcaaataagttggctcattacttggcaagagactcttatttctctacaggtcgcgtgcttcagctggaggactgttcatctgaagtgcgttctattgttttgnacgaatttattaattaataaatcttatgatttttattcaaaaataaataaatatcttatttaattaaatttttattattattttattagatataattaatatactaatataaatctaaatctatatatactatagtccgagtatcattaatactacgaaaagattgcaaggatacttgatacttcattaagtggtaactttcttgttcatatttttcatttttctgatttaatatgtatgcatgtagagatcctaagatgtggtgagatgataattgtattaaatatttgctgcatacttaatttaatactacaaaaataacaaatgatactggtactaattttattatgtgtatatattaaatattatatgatttttttgtattttatatgtatatatatgatagatatgtataccaatggatgatgatgtttattatgaacgtttgattgatgatggatcgttggaattgatttattttttctaaacaaatcgtaaaaaaataatagagtataagagtttttatgtgatttatttattaatctgaaaataattttacataaaaattttacaatgtaatgctcacgatcatgaagcttggattcatttcgaatccttgtcgtgtacgtcacacgcacggagcttgaacccctctaaaataatcttccatcaaattaccaaataaagtatagaattaaagtccttttacatcttataaatcatttctaaattacccaacatcaaaacaagcataatccaataatgatttctaaaggaaaaacatcgaatttcttaccaaatttccttatactagtacttgaaataagttccctctttgatcttcaaatactctattgctcacttttaatctctcctcaaaatatcaatagttgagaaaagaaaaagtaagagaagtattgatgatgggaatggagttgatgatagtttggatggtggtggtgtttcgggtaagatagaaagaatgagagaaagtaattgataaatttgattttaattcatgtatatcataataatgatatcaaaagaaagaaaataggcattgaggacaattttcaagtaataggtgtcaaaaggagaataaacaaaaagaattaattttttttattataatcttttttctaaactaaataaaatcctaattaattctaagaataaataagtaagtctaatacattccacttccacatcagtataatctaaatgcagtgacatttcgctacacatttgaatgatttcatatttgctcctaataaataaatataggctaattagtaatttttaccccgaactttgacatgtatcaaatcatgccccttgaattttttttgccgttaaaaattcaccctaaactattga

SEQ ID NO: 25772 - DNA, 1549 bp, Cannabis sativa
gatgtagaatcaaaaatttaattacaatgtgaagactgagtcaattcaaaaaaaaaatataacaaatggatagtaaaacccactccatatataaacaattttaactctctctccccccgacaaatcactcttagccactccctctctttctttctccccctctttctctcttcaaaacaccaaaagaaaaatccactaacaccactgccagtgtagatcgaacgagcactttcagccaccgtctgacctcatgcatatcaggccatttgaatccccaagcaccgacgacctcaacccccaagtggcaccgtcgttagctcaggattgcaagttaaagttttgaggttcaacgcatttttcaatcacctctggtgtccatttgacgagtcttcttcaccactagactcagctcatcggctcgttgagggaacaatctacactaagttaatttgtccagctcgctactttttcaggtgatgtttttgtaactctacccctttctgatgacttttcagcgatattgtgtaccgttgtgacaaataattagtatgagtgtgatctactagtcgaagtatttattttgatatatactactcctattttcagcgacgtttccggtacacaatttttactgccactaattattgttgtgcaccgcttagatgaggttttaaaactccaaactttaaatataatcatgttatatgtcgttggactcgattttgagtgtagaatgcaatgatgattatcatttagccatttggtggttataggtgaaagtggtacctaaaattggattaaacaattggagctagggacttgagagcttaggatcatctttttggacaaagtttaacggcttgggagaggtaggaactcaacttgattattggacttattttttttatgtgttgaatgacattggacatatttcaatttgtatgatttataaaatgtctaaaaatttttaaacttaatctgcatatttttctaggctattttggagcagtatggccaaatatgtttttgtacaattattatgcaaattatttttttttattattttataatattataggcattatgtgttagttttatggtactaaattaggtacacagcgaaagaattatatatctgatttgttagtttttatggtccatatcagagttataaaagcgaaagtagaatttgataaaaatagtttttatctaatatgaaccataagcctaagaatctcaacataatgtatatagatgaaatctaaactactgaaaataatacattatcgcttgaagcctatctggtatccttgctatcttttaatacaatcgacaatcatccaatctaagaaccttagttgaagaatctacacattgatcttccaagccagtctcaacacttaggaatagagtgagttattaaatcttatttggatgaacatatttaggtattacagtgtgtactcaactcatgagacattgtaatgagttaagaatatttaatctcacacacacctgaataggaatgggcgtgtgagacaagagagag

SEQ ID NO: 25773 - DNA, 3428 bp, Cannabis sativa
agcgattcaagccgaattgggctttaacaacccacgaaaataagggataaatatcatctatttacctattcgtgggggataattaacctattaattatttattgttttattatgtaacaaataactaattttctattttttaggggtataaggttattattctcttgtaaaatctcctatataaagagcattaacctaaccctaattcatttatgtctcaagtaccctaaagctctaagtcttaaaccctaactctctctctctctccctctcttctacacgccctaggcttgtagaagagactaagtctttctctcttacttgtgatttgcctacgcattcttatattgtaatcttaagagaaccacctcaaaatccacaacacttgtgatcttagtggtattatcagtgacattaatacaaccaaaagggaagtaggtcattatccgctaactaagggatcaaacctctataaaattaatatgtctctttactttctcgttcttattatgtacatgtggtagcatcagtaataaatacaactccgttgtcagttgaccaaatttgaggtcaacagtttggtgctttcattgagagtgttgtcaatttatctcatttaacaccatggttaacacaaggagagctccagctacaacttttgcctcattgggtcttcctcaagacactataactactgatcctaatgttcgtgttctagccacaactggaatctctacgaatctgacaatttaatgttcattacccgctaactaagggggtcgaacctctataaaaatattatgtctctttactttctctttcttattatgtacacgtggtagcatcagtaataaatacgactccgttgtcagttgaccgaatctgaggtcaatagtttggttctttcattaagagtgttgtcaatttatctcatttaactccatggctaacacaaggagagctccagctacaacttctgcctcattgggtcttcctcatgaccctatgactgttgattctaatgttcgtgttctagccacaactggaatctctacgaatctgacggatgtggccaaccctaccaacccggcaagtacaaaaaacttgatcaccacaactggttaggttgacactaccaaccgagttggtctcaatggccaatcttgctgccaagggtagttccaccattggcaccttatactgagggtttggttaatgtaaagcaacccccgggcacataggctgcactagccagttaagggagaacgagcgaccagacattacctagcataaggttggccgaccatggccaattaccttacctagggctggtcggccaaagccagatgccagacctagggtgggctgaccttaaacataccctctcccagggtatggccggctaggtcctggctaatctagggctgcagcccaattgtgaagggccaattaacaaggttcttgcagcatcagatccttctatgcaagcaaagttggatcaaataagagacatgataaagggcttggatggcccaaaaccatcaaaccttgaactggatagctcaaggggctcactgttctcagcatacataaatgcacttccccttccaaagttcaaaatgctaatttggaagatgtgtacgaggaaagaagatcccttaggacacctaaaatactttgagatccaaacaaatctcccacaaatatctagagatgtgcgatgccgaatctttcaagcaaccctagctgaaatagcccaacagtggtatttcaagctagtcccaggaagatttaattcttgggaagaattctcttgagaattctatacttaattctctgcctcaagacaaatatcttcatgactagaggatcttgtcgaaataaagcaaagacaagatgagcctttgaaagactacattcaaatgttcatgattgaggccaccaaggtcaaagacctgatagaagaaggctgatatatgaccatactcggaggcatcttaccgttgagtaaattctggaaaattaccaaaaaaatctcaaagagcaacatgaaagaatacctcgagcaagcagatggtttcatcaagttagaagaagttgtccgacaagtccagacaagagggtaggttaatgttgaatagacacatggcatcatactgccccaagtgttgttccacatgccagtcagcacagacaatatctaccaattctccaacaaagagaatattggaggcaagcgcaacaatgatggctctcgccaaattaatggcaaaaaggaaaattcaatgattcccttatgccatgaagtctaagggacatgaaggagacgtccacatacttcactctcctactaagactcccaaagcaatgcatgcccaccggccatggtgataagtgtcaccaaacctgaagcacctgggccatcaagctcggccaataaaaggccacctgtcaacctagcatggccataaaaggccatcctcttgccatcttcatggctaaatatacaagcatatctccccaaatctctaagatttgggagaaaagtaagagctagagatgaagagagagttggagcaagacaactcaacctagaaggtgcattgaccacctgcccagtgtaggcatggccctcaagacacctgggggcaatgaaggccagttcaaagcttttaataatgaggctaaatatgaagcgattgctagcctcaagctagcacacgaagcacgggctgaatacctagacatacaccatgactctcaactagtcgtaggtcatgtcctaggtgaatgcacagctcaaggaaaaaagatgatggcctatttgagctatattcaagacttgttaagttaactcaaatgttgtactaaaaggcaagaccctaaagaggacgcaacaactaatgcactcgctcgactagccagcaccaccttgacagctaaggtaaacttagtacccgctcaattctttaaagaactaagcatcccaatttcaaaagaaatagacatgttggacaaccatcctatatggatgacacccataacaacatacctccaaatgaaaaccttcctagaaatcagggataaggataatagctgttgggtatccaatcctggatagcgtaacgcacagacgtgatatcccaataccacctctaagatgtgttaccaagaaagaagctgaacatctattgacaggagtgcatagaggctctatggcaatgaccatgggaaaatctaactaagtgtagatgggattgaactgcagcactgacctgacctccaaaaggctggtcaaccatgtccttagtaggctggtcgtgtaactccctaatctatagggacgccacgtgtgtgattttataaactagtttaatactagtagaataattaattattaaaaaccgtgctaatattaaaaacttgac

SEQ ID NO: 25774 - DNA, 1916 bp, Cannabis sativa
tcaatgggattctacatttttaatcccatctttgcagcatttggatttttatagatcagatcatagagctctcaaagctactgtcacggctaaatctgatcaaactgaagctgttgaattcaaatctcggttccgctttgaaaaaatttggttaaaggaagaagcttgtgctgatattatactggccaactggaatcggggtgacagcagccctttggttcagttaaccactaacatttctgactgtgcatcgaatctgtagaggtggcattactctacttttggcaatctgagaagggaaattaaggattctcatcaacatgttgcagcactacaaaattcatcaagcacagctcctgagcactttgcagcacttaaaaattcagagcagatactagatgatttgttagctaaggaagaagattattggcatcaaagagcacgtatatcatggatgaaatctggggattctaatacaaagttcttccatcaacgtgctaattcaagatcatccaacaatcgaatcaaaaaattaaaagatgcagcaggaaatactcaaaccagtgaatcggctctcatgactataatttcagattattttcaatccattttcacaagccagcaagttgatgatcatgccattaattcaatattagaagttgtcccaacaatgcttgatgagaatgcaagagatatcatttctgcgccatttacagcatctgatgttcataatgctctccactcaatgagtgatgacaaaagccctgggaaagatggtatgtcagtcatgttctttaccaactattggaatattgtggggactttagtcacagaatcggtgttggaagttctcaacaatggtgttgatcctactctcttcaatagcacaataatcactcttattccaaaggttaagaagccacagtttataactcagtatcgaccaattagtttgtgcaacgtactctataaattggtttctaagtcaattatgctgcgattgcaacctttcttgccattggtgatctctgaatatcaaagtgccttcatgtctcaacgattgataattgataatgttctcattgcttttgagatgttgcactcgctaaagaatcgaaaacggggttcacaagggtatgctgcaatcaagctagacatgtccaaagcgttcgatcgagtggaatggaattatattgctcagatcatgttgaaaatggggtttggaaccattattgtcaaccttattcttcgatgccttcaatcagtttcctattcttttctcttgaatggtaaagttcttggagatttgaagccatctcgtggaataaggcagggggaccctctctcgccatacctatttctaatttgtgcagaaggactctcacggctgctgcaatctaaagaaaacaatgggtctctacatgggctgagagtgtcaagaactgctccatcagtatctcatctgttttttgctgatgatagtgttctcttttgtcgagcaaacccccaatcagctaggtctattcagcaggtgttggatatctatcatagagctagtggccaagcagttaacccagacaaatgtgtgctatccttttctcctaacacgagacaatatcatcaaaattacttccaacaacttctcaatatgccaattcagccttgccatgaagaatatctcgggttgccttctttttcaggccgagataagactagactctttagtggtatcactgataaaatttggaagctattaagtagttggaaggaacaattattttctgctggaggtaaggaagtgctattgaaagctgtagtacaggcaatttccacatatgcaatgagttgctttcgtttgccagccacactgtgtcatcaaattgagagcatgatggccaatttctggtggggatcaa

SEQ ID NO: 25775 - DNA, 4478 bp, Cannabis sativa
taactaagcgggctttacacttcccttgaagctggtcgaacaagttgtcgatcctaggtagagatacttactcttgatagtcaacttattcaatttccagtagccaatacacatatgaagtgatctatctttctttttaatgaacagcagcggagctccctagggtgacacactgggttgagaaaaccctaagtcaagcatcccctgaagttgaatctttaattctttaagttctacaggagccattctataaggtgccttagaaactagctccactccaagtgctaaatcaattcaaaattctatctctcgttgtggtggtaaacccagaagttcactgggtaacacatctagaaattctttaactattttaatctctttaggccaaactgattcaggccaagtggtgtccaacaccaccgctaaaaaccctaggcacccatcttgcaatagaattttggcctttaatgctgagataactgggattcaggatctctgaactgatcccacaaacacaatcagatcctcaccctcaggttgaaagatcaccatcttttgcttacagtcaatagtagcagcatacttggacaagaaatccattccaagtataatgtcaaaatctactaaacccaactccactaagtcagcacttaactctctaccttcaattctaattggcatagacctaacccacccattggagataactaattcttcaccaggcagtagggttctcaaccctgtttcatagcaatcatatggtctacccaacttgtcaattattctggctgccacatatgaatgagtgactctaggatcaaacaaaacaaaatagttaactgacctgtaacaactgaggggctagcttctacattagcctgagtaacagcaaacacccttattggagcgggttttgatttagtcttctgttcttctttctttagctggggcaatctctttagtagtgtccagttactccacattggaaacattctcgacctttacacttgcccaaatgatgtttcgtgaaattagggcattttgggtaagtgtattgattctcaacaccaccctgacggttaccacgaccttggttccctcaaaacccttttttctgactcgagccactagacatagatgaacttttctctattgatcaatgtttgagtcactaccactcctaccataaccagaggtcggaggagcaatagctccaccaataatttgagtccctcgggactcctgaatgcactcaactgcactctgagctcgcagtgctttccccaccatatcagcataagtggtggtatcgtctgttgtaatcatcaggtcatgtttaatctttggattcaatccatccaaatattttttttcttgctaaaattagttggcatgattccgaaggccaacctagccaatctatcaaattgggttgtatattttgtgactcacatattttctttctgagtcaaatgagtgaattcttttctttttgcactacaaactacttcattatagtacttcgcattaaataactcttggaattattcccatttaatagtggtgacgtctcgggtaagagctaccatgtttcaccaaaccagggcatcttcttggaattggaacgttgcacatgccactctatcatttccagtaactcccataaagttcagaattcggttaataatagttagccactgctcaacattcataacatttggacctcctagaaaaaatagaggtgcatgcttatggaacctttcataaagtggttcgattagcaacgacaaccagctccacttgcatagcaggggcaagagtcacttgcacctcaggagtaggcattgcaagagcaccctgctgcctcaaatgccagaaatcttcttcttattcattaattcttgcttgcattgcaacaagcctattctcttagtcttgggtagtctgtggtgggttaacatcaccccaaaagcgtgccctacctcttgggcctccgccttagccgcaaaatttttggggaaactacactccttgactgccactagattcgactgaattaccttggcttctcgtgttttacctgacatccattatattagaatagcctgcaaaaccataagctagcctggttagatcgcgatcaagactaaattgctaattaccgcttaattaagaaaataaaacatgcacctattcagctatcaggctactaacatgctttctatcaggattttcttatcaaatactaattaacaactattgaagcaataaaggcttactaaaccgtgagttgagcctatctttgatgatgattgttacatatcgtgatgatccttagaagacaaccttgcagctctaataccaaattgtaacaccctactaggttaggcatgttattgtgatttaaagctagctgtgcaatctgttgctaatcaacgagtttgttggaaaatgtatttaattaaaactttactcaattaaactttaattgaaataaattaaacgttacataaattgggattctgtatttaaaaatttacaaccatattacaaaatattaattccaaaaattgtcgcctagcgactattcaaaatacagcctacttttacgaagattgaatactccatgtctaaccgacttgatatgtacaatcttcatgtgctcgcactcactgctgctcaactttagctttgtctttacctacacatgtaaacaataactgtgtgttgacagactcaataagaaaagcataataattaataacataaacttaaatcgaattataactgggcacccatacacccaatcataaccctattctgcgtcctatgtgtactgagtctagaacgtttgtagggcagtactattgaccataataccagcctacactcggtactctagttgtactaatgtgatgaaatcaatcagtacttaagctaaatgtacaatcatcggtaactaatatagctctatgtatattgataccgctatgtcaatatattatctaacaagcattcataaacatgtacgctaaatatgtaatcacatatgcatatcattatactaatcttgccttgattccaaattcaagtgttctggtcaatctaagtagaactgctgcttgacggtttacaggcccctaagtcacaacatacgtaaaattgataagtgatatgttaaatcattttttggggacttagactcgaaactaaaagtttttctatcgataaatagcgtgactaaaacctaaatatcgagaaaatactaaaatatgggagtttgggaaaggtacccaaaataatggcagaccccctctgtaaatagcaggctgttttctttggttttttcgcctagaaaaatagtaggtcgttttcctaaaaatggcctgctgcttctacaacaaaaaatgttcaaaatcccaaaacttaaccaattgagcaccaaacttttccaaactttctagagtacctaattaagctatattaagcataaacaagctgaaaaatccaacaataagctactaaaaaaaacaccattatagagcaaagtttgagcttaaaagctcaaactttgtctaggctcaataacaaacatctattccagcttaaaattactgaaacaatcataaaataacttcagaatcaaaccataaccacttgaagcttatacaaaaaccaatttctcaaaattgcatgaaaaacctaactttttctttcaaaaattcaaaggaaaggtacaagagagcttacctcatagctcacttgaattacaaccactaaattccttggttttggtctgaattagaaagaaaatcccttggttttcttggttcttcttgggccaacaaaaagagcaagagggagagagagagagacttaggtttctaagttaacaatttcttgactaaatgaataattaaataagtattcttatttttattcagcttaatatctaaaagataagcttaggatttactaaaaaaatactatcttataaaagacaaacttaagtaaaattattaacccttcatcatgaagtatcttaaggcttaggggtattttagtccaaactcataatcttggatactcctgacattccaaatatctatctataatgccccactaaaactaagatactatactatatctaaatgactctataggccagctgtcacattccactattatcggacataaaaatatgaaaaacataaaatttatatataatataattaacacacctagaattaaaatatatctccataattttataaataataattaaaagtctaattctgaaattaagccctaattatctgattattctcaaattaaagttaagtggtcattacattaaatgtcgagaatgtaaatgttatggtcacattcaagttgaatgggcaaactgttgggttttgtgccctaaataaaattcattttaatataatcagatttactaattaataaaagatcagaaa

SEQ ID NO: 25776 - DNA, 5476 bp, Cannabis sativa
  modified_base (3229)..(3229): a, c, t, g, unknown or other
gaacaagaaataacagaaaataaaaggttaattacaccttagtacaaagcactgaaaacagagcaattaacactaatgataattaactaattcttaacaaaatttcctagacaaatcaaaaggatctcaaaaaacaaatctatttagtattctagtgtcacttgtctgtctttttaatttgcacttgggttggtttggcaaagcttagaaatgtacttattgagatttgtagaataatgtgaacaatagttgtgggataattacataaaatactattttatataaaatttttatatatttacgtttattttttttttttttacatttttatgatttttaattaaaataatacgaaaataacaagatgattacataaaagtaacaagaaaataacataaaaaaaaacagcaaaaaataacatataaataacaaaaaatcaacaacaaattaacaagtgtacaacataaagatacataaaaaaaatcgtattttctgtaaataaaatcataaaaaatgtaaaaatgtttaaaatgttgtacaatcgtatttttatatatttttttttgtgtatttgtgaaataatccctagttttaaagtgtagtaccttgctaaataagaagagaattttttgtaaacatagcttttgtaaaaaaatttattagcaaaataacttgataagaaaatttatatcaaaataactttgtatggttgcagaaatgaccatgaattatactgtgcgaccaatatggtcgcaaaacgaccatagatttatactgtgtgactatcatggtcacatagagtagattaagtgaggttattttgtaaatttgaatatttcatattattaatttgacaaatttcacataaagagagtaccaaaaagaaatagaagttgtgaacttgtaataaaatggttagtttatgtaagttttctttaaaaaaattatggaagtgtatttatattttttggggtgtagataaaatttgggacattatattagggggttaactgatagtgttacaagctgaaattttaatttttttggtttgctgattgaggacgttataactttattgtctaaacttttttctccttccctttagatagttataaatccgttgttacattggatctttggcagtcttagtgcatctctaatagagtgctataaatgtggtgtatatggattatagactaaaaattttgaaagaaaattacaaaaatacgtcactatggaaatttttttatttttactctttgaaattttctatttataaaaatactttttcagtaaaaagaataaatcctttttttttaattgttttatggtttgtttatttgtattttagttgtcatgaggttgtttttctggttatttttttttattttttttataagttatttattgttgatttatagttgttgtgaaattgatttctcattatattttagttgtatttttactttttactaaataaagtgtatttttgtaattaaaaattttagaccgtaaaagtataaataaaatataaaagaatgatagttttaaaaattcttttttttaatccatgttcataaaattgaacgtgtataatgcggtccaaatttagaatatcttaaaagttgtatcaaattaagcacaaaatatgtcatagaccaaatgttttactacaataaatattattttttatttattttttttaccacccattaatacaattaataacgttttatatttttaattatatatttaatatgattttatatattttgcataaaacattaatgtttttgttgatttttttacctctttttattaaaataaagttcggagttaattgtggtataatccttaatattttcacttcactagtaattaacttacaaaacttaaattttgatagcaaaactcgtattttgtttgtatttagccatttccatctatttttgacagttaactgctactgtggattatctacacagatatagtgtacacgtggcataattttatcgatctacatataattttaaaaataaattaatttaaaatataaaataaatcattttaaagaataaaaaatttatatttttcttcttaaaataaaatttataaaatttttattttattttatttttttttcaaaaaattcctcattatgttgtagaaaaagctaaaaacagaaagcaaaactcaaggagactatgagaagaacttatctttttttctctacttgagtatgttgtggccaacttaaggtctccactttgtccctcctttaaaagattgacatttggcaaaaataaataactcattaaaacacttgtattgtatttgtatccacttgttagagtatattctaccatagtatttatatataaatatataaatatatatgattttcgaatgaagttaaaaaataaacaaatgtatatttgattgtagatgacttcatatatccaatatccatatccactttttaagtcgtatatatatttaccaaaggagagaatacaaatatagaagggttaattaggatttctgtccctcaaattttgatatgtattaaattatgttttttaaatttgtaagtcgttaaaaatttcttttaaactattgagattgttaaattttaaaaattttgtctaattttagtaaggaaagtttagaagatataatttgataccggtcaaaatttgagggacataatttgataaatattaaaatttatggagtatgatttactaaataaaccattattgaattagtaaaattgaatgcaattagataaaaaagttcttaaatccaataatttcaatagttcagggggaatttttaacgctcagaaaaattcaaacaacatgatttaatacatgtcaaaatttagggtacaaaaattctaattagcctataaataatatattaacatatagaagattgccattaggctctagtggtacctaacaccttttatagataacactttaagattaattagtgatattctctaaaaactattttcataagttatataaactcaatacttaattacactaataacaatatgacacgaaaaaaaaaataccaatactaccatttcacatttctctaacatatattacataggattaaggctatgtttggtgggaggaaaggagagtagaatggatggataggttagtgaggatggagaggattgttaatctcctttgtattatttggtattagntatgaggtgggaaggatggagaaaaaattaattagtaaaattacaaaattatttttttaaaagtggttattgtatttcgcaaaatatattttatctttttttttttttttgttaaataaatatattttatctttttctataatatttttactcttcctttaccgctcttcatccacacacatctccttctactcctaccaaaacaaatttacaaataagttattatttccaattaataattgtgccacgtgtcaagttattataagagacttttttgatggtcaataaaaagggcagatgattaatgcacatacacacatcatagggtgagaaagaaagagagcattcacactaacacagtagctagtacatttatggagcaaagaagagacagcaaataaaacaaacatcagtgtggcttctcaaaatcttttgttcgagataaagattgttgtttatgtggatcggaagaagaaagtgccctgcatttgtttcgtgattgcagcttctcaaaagcagtgtggctaggaagtcgatatcctttgaggattgattgtattccgggggacaatatgatcaatttcttggataagcttatttcttctatgacaatagtcaatagaaaggagctgttaaattttattggttgtgtgttctctgagatttggaaccaaaggaatgcagtctgtgctaggaatgttgttgctgatccagttgcagctcatcaaaatatcgagaaggctgtgaaggacataaataagctgcatacttgtactgagattcaaagagctgttgcaaattcggctgttactcctcaacagaaccaggccctgcaaatgcttcctggtgtggcaggggagagatacgttattttcactgatgcgtcttgggtaaaaggagctgctggggttgcagcaattggagttgacagggtcaagggacagtggtttgttaaagcccagagaactcactccaattcagttctggaagctgaactcaaggctattctcctagctttgaattgggctgttgaagaaggtaggaatgaagtgatcatcctctcagactcaaagatagcaattgatgctttgattttagctgaaagacctcctgagtggaaatcctctaatattttctttgatatcattaacgtatctaaaaaacttttggtgtgtaatttctttttcattagtcgtagtttgaacttgttggctgatggtatggctaaaagcgctagagtcgctgaagatcaagccgttttgtatcaaggggagggagttccccctgtgattcccatcgttttgtctaattaattgaaccaaaagttctttcaaaaaaaaaataaaacaaacatcatctccaaccataccctttcaatatacttttttagctaactatatatacaaatttaatgtgaattattgttggaaatatctaatattttatgcatttttatcacattaattcttattattttgttatctgagagcataataaggtagctcattattacttagtaaaatttaatgtataggatattttttttttattaaccatggatacttttaatcattgtattgctcaacttaggtgaggatgcttcacttggttgatgagaattcccttttttaaaaaaaacaaaaaaatatataaattttcttaaaataatcaattttaaccaaatagatagtatcattgggataaatatctatctatctatcctatcattttacttaattttgccaaaaataaagagtgactttggtggttggtgatgctctttaacaaatttacaacaagttcttatttatttaattttcttaagtgattaatattttgtaaatagttagcgatattttataataattattaaattataaattattattattggaacacattgtaattggttaacaatattcttttaaagagcattgttattgagcagcacttagtatattttttaaaatttattttctaaagttatatgagacccgatacagacccgatacttaattacaatatcacacttaagagggtactaaacacttgtaatactttttagcaattctcttctttaaattatatgagtcaatagagaaatgctaaaaggtgtgccaagtgtaccctctaagtgtcatactctcggttcgaaattttttgcagtgcggttgcggtttgatttttttctaaactgcgcagtgcggtgcgatttgtagttttgaattgttaacatgcggttcaaac

SEQ ID NO: 25777 - DNA, 3591 bp, Cannabis sativa
  modified_base (876)..(888): a, c, t, g, unknown or other
ccagcggctggagtctccattgacccgctgaactggggtgcggcggctgactccatgagtgggagtcatttggatgaagtgaagagaatggtggcggagtaccgaaaacccgtagtccggctcggtggagagacgctaacgatttctcaggtagctgccatcgccgctggtgacggtgccggtgtaaaggtggagctctctgagtcgtccagggctggagtcaacgctagcagtgagtgggttatggagagtatgaacaaaggtacggacagctatggtgtgactaccggattcggtgcgacctcacacaggagaacgaaaaatggcggcgcccttcagaaggagctaatcaggtaatgcgtcacttactcactttagtctctggaaatgttccgtgagaatcggactaggacgatttgactcagttccgacataaaccgggtcaactcggacgagttgaccgagtgggtccatatgctgtcaattacgttatttatttattcaaataattatattgtgtatcatttatatatgtcgacaagcactaagcagggtagttgcatccgacggcctaagatttttggatttttttttttttttgaaagcagaggaaacaaaattttaattatacgtagattttttttttaattaaattaaatgtatatacatatacatatacctttttttattattatttatttattttcctcatagaaatatatacaccttatatttactatctttacatttattttggaataaatgttattggtgtattgtgttttttttttttcctgacaaaaaagtccttttctgattagtttagtagaactggatattataagaggttgcatagtttattattattattattannnnnnnnnnnnntattattattattattatgttacaaacaattgtcattatacaattattgttactaacttataatttactgccttacaaaaaaaaaaaaactttaatttttactgtgttaaaagaaaatgtaatattaattattcaaacaaacaacaaataacacttcttttatggctagcaattattagtaataaaaaaccagaatacatggcttaaagcattgactagtctttctctttttatatttttattatttaataaaatccttaactaatcttcaaacttttaatattgtttgtagatttctcaatgctggaatatttggtagtggaaaagagtcagcacacactctgcctcactcaacaacaagagcggggttgcttgttaggattaacacccttctccaaggctactctggcattagattcgagattttggaagctatggcgaagctcctcaacaacaatgtcactccttgtttgcctctacgtggcacaatcactgcatccggtgaccttgtacccttgtcttacattgctggtttgctcaccggcaggcctaattctaaagcggttggccctaatggcgagtccctcaccgcagaggaagccttcaaagtggctggaatcaattctagtttctttgagttgcaacctaaagaaggtcttgctcttgtcaatggcactgctgttggttctggtttggcttctactgttctttttgaggccaacattcttggcgtgttgtccgagatcttgtctgcaatctttgcagaagtgatgcagggtaagcctgagtttacggatcacttgactcataagttgaagcaccatcctggccagattgaggctgctgctattatggagcacattttaaatggtagtgcttacattaaagatgctcaaaagcttcacgagatggatcctcttcaaaaaccaaaacaggatcgctatgctcttagaacatcaccccagtggcttggaccgcaaattgaagtgatcagattctcaaccaagtcaattgaaagagagatcaactcggtgaatgacaaccctttgattgatgtttcaaggaacaaggctcttcatggtggtaacttccaagggaccccaattggtgtttcaatggacaacacccgtttggctattgcagcaattggcaaactcatgtttgctcaattctctgagcttgtgaatgacttttacaataatggtttgccttcaaatctttctggaggccgcaacccaagtttggattatggttttaagggagctgaaattgccatggcttcttactgttctgagctccaataccttgctaatccggtgacgagccatgtccaaagcgctgaacaacacaaccaagatgtgaactctttgggattaatatcttcaagaaagactgctgagtctatcgatattctcaagctcatgtcttcaacattcttggttgcactttgccaagcaatcgacttgagacatttggaggagaatttgaaatacacagtgaaaaatgttgtgagtcaagtggctaagagagttttaacaacaggtgtcaatggagaactccatccatcaagattttgcgagaaggatttgcttaaagttgtagatagggaatatttgtttgcctacattgatgatccatgcagtgctacctacccattgatgcagaaactgagacaagtacttgttgagcatgctctgtcaaacggtgaaaatgagaagaattcaagcacttcaatattccaaaaaattgtagcttttgaggaagaattgaagacccttttgccaaaagaggttgagaatgcaaggattggtgtggaaagtggaaatgtagccataacaaataagattaaggaatgcaggtcatatccattgtacaagtttgtgagagaggagttgggaactggtttgcttactggagagaatgttaagtctcctggagaggaattcgacaaagtgttttctgctatgtgccaaggaaaaatcattgatccaatgttagaatgtcttagtagctggaatggtgctccccttccgatttgttagttgtcattttgttgagtttgaatgttgtttaatgtgtccataaatttagttgtcaacaagggtgcttgaatgtcatttaaagtgtctataaaagttaatttagttgtcaacaagggcaaatatgtgggagtgaattgtgtattgtaaaataatcttttgttcttttttttcttgcaataagatgtaactttttcctttgatattatttttgttttattttaaatggaataaaaatcagttggttacgacccaaaattatgcttacatttttttctatttgattatatttattgttttctccagaatataaagcatgagagcatctggagtgttataaatatgatgtgtatgtattttttagttcatttttatgaaattaaactccaatggtggtctataatatggtttaaatttagcatactaaaaatgcatcaaatttgacacaaattatagcatgcacaaaattttatatgataatgaatattgctttcttctttactcttttgctattcatcaatgtaattgctaacttttatttattttatttatatattgaatattagtttcatatacttccaatacaaatttaatatttttgtcgcgtgtgagagagatgaagagaagagagagagccctattgggtgtgtgtgtgtgtgtgtgt

SEQ ID NO: 25778 - DNA, 1960 bp, Cannabis sativa
ggtaaaataaattccaacacaagagcttcttcccagataagctttgccggcgcagttagggtacttctgccggcgcaacaatacgccggcaaaagcaggatttcttgtagtgattgtgaggcgtagaaacttagttagcataaccatttttagataaagacaagagcagttatgatggttatctatttggctcatgtgtcttaaatataaaatgtggggattgttcacgtttcatatgcagttacaaggataagatctcaagggaataactgcatatcccagacatctataaatagggaaagattttgtaggatggggacgaacaatttgagaattatagagaacgaactagatattgtatcctataaacatcgaaatcctgataataagatggactcttggactatgaatatgaagaattcacttcaaaatcacgtaaaaaaccttcttgtccttatttattattacagttattatttattatattgaagtttatttattaaatcaagactcattatttgttaacgaaaaatgacgttaaaaattcttaccttttcttattataatcggttattgaggtataatgtgttattcatttttactcaatttgttgtggaactagttttgtttttaatttatgtttcagtgttttaggaactaatttttctctttatttttttaattataaacggtttgagttattctgtattatttctttgtattagttatattatagaatcaattttattttaattataaccggtttgagttattctgtgcaatttgtttttattcattattttataaaattggttctattttaattataatcggtttgagttattgcgtgttacttatttctattcattatgttatagaatcaattttattttaatttatatctgaaacatctaactctagtgatttttcaaacgacgacacaactctgttgactttttcgacgatttttgcagcgatttttctggcaatggtgatttttctaacgacttttctagtacggcgttgatgacttctccagtgactttttcgacgctaatgactttttcggtcttttctgatgtcgatatcttctccggcccctttctgaggatatttgttattagaagttttattaaatttatttatgatttttttgaaattcctatattttaaactttgattattttttaatcttatgtctttttgtattatttatttatgtcatataaatgtaaattctattcattttccccatatttattaagaaaaaacccttttattaaaactaataaaaattaatgtatgcacaaataaaaagtctaacatgagggactcaggatggctcgagatcttctgttatcttccttttccattgaatctgattgtgaactgttgtcaatatggtcacaagtaggactgaattttgtacagatgctgatggacttatttatagtactagtgaagttttacgtgtagcacacgtaacatataaattatataattatatgtatattaaattaaatttacttttaaatatattagtaattttaaaacaaaatctttggacaataaacataattctcgtttaaacttagttatttatttttcttgcataagttaaaaatctatattattcttaaaaaaattatattattattatatgatgctgacttttgacataatatctcatgtagctccccttatattaattagtatataattttttagtaatgggatttgatatgtaaaattatttatttaatataatatatcttgtttcaaatatttaaatatataatattagtaaatttataatgttgtatatttttttggctactatatatattgttataataatattttttaaatatttcaatcattaattttgaattatactaaataataccttgtaaatatactatatattaatttttaaattgagatataattaagctagcat

SEQ ID NO: 25779 - DNA, 3057 bp, Cannabis sativa
caatctccatcttcaagtgcataactcaacatataaaagtgcatgaagaaatcattaacatgtgggtccctaaatctaacacaatataataaatggaaaggaaaataatatataatacaataaacatgtcatgttatactctgctgcctataaatacagaccttcccaaaaccccaaaagcaacccaagtctagagttaataataatccagtttccatggccccagttccaatttcttccatcaaagttgggaaaattgatgatgtccaagagttgagaaaggctaagtctaaaatcccagaaagatttgtaagagacaaaactgagaggccaacactagccacttcatcaatatcatctactcacattcccattatagatctccacaagctttcaaatggttcaaaggatgaaattttaagtgagcttttgcagctctcaactgcttgtgatgagtggggtttttttcaggtattacaaccataaaaactttcattttatagtaataataacaataataatgtcatgtgaactaatgttttttttttctttaggtgataaatcatgggattgaccagaatttggtagagcaaatagagaaggtatccaagggctttttcatgttgcctttggctgagaagcagaagtatgctatggctcctgggacagttcagggctatggacaagcttttgtgttctcagaggaccaaaaactagattggtgcaacatgtttgcacttggggttgagccaaattttattagaagcccaaaactatggccaaaaaaccctgttaacttcaggtaatgatgatatatagacactactctgcttttgactttgtcaactcatacatctatatttatatttagtaataatatacatattttatattcagtgaaactgtggatctttattcaaaagaagtaaggaaactatgccaaaagctgttgaaatacatagccatgactcttgggttgaaagaagatgtatttaatgagatgtttggtgtggctgccaaagccataaggatgaactattacccaccatgttcaagacctgaccttgttttgggtctaagcccacattcagatggaagtgccctaacagttctacaagaaagtaaaggcagctcagtgggacttcaaatcttgaaagatgacaaatgggtttcagttcagccaatcccaaatgcccttgtcatcaacattggagacactatagaagtaagacatattatatctttacttttttctttgtttcagaatttgggtgttttggggtttcttctttcctttttctttttcttttttctaacttgtacaacatatacaggtccttacaaatggaaggtacaagagtgtggaacacagagctgtgactcacaagcaaaaagataggctttcaatagtcaccttttatgctcctacctatgaattagagataggacctttggctgaattggtggaagaaaataagccatgcaactatagaagatacaatcatggagagtatagtaagcactatgtgacaaacaagttacaaggcaagagaacactggattttgccaagattcaaactaaaccaaacccatgttgaaaaaagagtatagtaacattatatgagaaactagaatgttttagttgggaaaaggaaaaaaagaagagggttttcagtcctttgctaatttcaatgtgatctatacactgtttgtggatttaactatgttctgaaaaatcttacaaattaatgaaagctttgtggggtcttgtacttataatttctttgtcaaattgtgttttgtttttcaatgactaaaaattaagtagtagcaagttgtagtagtaagtagaaaaaaaataaaataaaagagtatcaaacataagtatattttcactttatgctgtttccctctctgagattcctaatatggaaagagccaatcaatcaaaatacttgctaggatggaatctaacaatgcccaccatataattatatcacaatatggtcatgaacaaaaataaaaaatcaaaactcaataataataataataatatgggtgctccattgttcaagggaaaggaaagcttttttgtcaatggtgggagtgaggagaggccccaattacatcatgtgtgtctgtttttctttttagttgttcatataattggagtcaaggaaggcactaagtcaaaaatatatatatattttatatataaagcaagtagttattacatggatattttgctgattctaagctgaagtgacattattaaatgagtggtaacaactagaagagcacatagaaattaaggagcccaaacatttgatgacataagatgtgatctaggctttaatcaaaaaaatcaaaagtggcgtatattacataatttcattgtattcatcatctaaaataggtatttttacattttatactaaaatttttaatttttgcatcttcttataggcagattttttttcaaaaatactgtatttttttttaaaaaaatattgtataagttttatactgtgtattgtgttaagttttcacgattatttcatagttgttttttaattaacccactgttattttgattgttctgttttattgttttacagttattttgtaaaaagacagtactttaataaaaaaattccgtgcagcagtaaaattataaacttttgtctaaaattttgtatttttgtaaaaaccctaactatatatatttacatatatacataatacatataaaaatgagaaatgctaagggcacccatgatacttaacactcttatgaagtgtaagatcgctattagtgtaactcaatatcggatcccatttgttttacttaaataatattataaaaaatactaattaattataaaacggcacttcattgtggtgttagacaccataaatgtcttatagtaatgctctataaaaaatacataagatttttttggggagggctacagccaacagccccctaagtcaatgaatggctcaatagtctttggagagtggagactagtgtagtgtcagcaaccataatatttc

SEQ ID NO: 25780 - DNA, 8366 bp, Cannabis sativa
taataaaattgttttagtattgcttcagtttcaaaaaaaaatagcttctacaatacaattgacattatttttttttatttcaatgtttcatttttgaaaaaagaaacaaaaattaaagtttttttttatgacattctctattatatataatgaatttttttatatatatatttttaagttttttttattttttttttaaattgttatatttgatgcaattgaatttctatgctatataaatcaaaacttgataccatttgttttttttttttttttttgtaaagcacaccatttccttatgtttattgtatataaaatgtaataattcttattaatgtaacgaaaattgtaaattttccaaaaaaaaaaaacctaaaaattatcttttatcctttgttatgtgtataaagaagtgaacaacgataaagggcttgacttgagttaatagaggaacacttgtttctgtggaggtcgactactcaatggtcattgtgttttgatgattcttgtttcaattttgagtgtttcaacttttaatgggaatgactgagtttacatgtaaagttttcaggaaagaaaaattattagaggttcatgtagatgatgattttgggttttaagtgcttaagtggttccaagtacggataagcatccgattattcaacctttttttttaattcaatccatctaacaatttacattaataaattcattctagttgtaataggatatccaacttaattaaattgaattggttctgtataattggattgtttgagatgttggccaccaaaataaaaaaaaaaacttcaaacaacttttttttctcaaactcagatcgacaaatcaattcttggcaattaagacaaaataattgcattaagaaagacacagattgatgaagcctcaaactatgcacttttttttttcttcttctaaggttttactattgccaagatcacaaagatacacgaccaaagaaagctcacagtacattcattcatcttcaactatttgtatcccgactacaccggaaaattttatgtatcgatttgttcttccctattcgaaagaatagcaaaaaaaacacaaaaacacgatagcctactgccataagaaacaataccagtaaattctcccacttggaattgctgtcgggagagatatcgtatgcactccggattgcctgaataccggatatggttcttacttgtccaactgcaaatgttgtccctagatactcattctcaagaaggccctaatatgaacaaaaaataacatcatagagggaaatatacaatttaaaataataacataagaaaggttagtctagtgaaatttcccatctgaaattgcatggcattgaagcaaacaagggcaaagttttcccaaatgaactttatacaaacattattatttagagagggggagccgtaacgtcgttagccttcttacctggatagagtaggtatgaaaagcaatataggatataggaattgtccagactggtcctggtaatgcactacgaattctgaaatatcccgcggagagcatcattacgacctgatattccatagtttatgtcggtaagattaccggaagctaaatgtttcacaaaaatcatgataaatacatacaaccatgattgttcatttaattggacaatacaggtttatggttataccaagatccattattgttgacagtgtaaccaaaatatttatgagtaaccaagtaataaattgtatgaaacttacttgtatggatacaagggtcaggacgctccagaaaacatctttccacatagaaacaacagcaagcactagcccttcatttaccaggaggcacatgaagaaatttagcacaaagtacattaacaagctgaattcgtctcgcaacccaacgaggaaatagaagacaagacttgatgaaattgagatcagaaagagaaagggaatgcttgatagaagttgcccaaataaaaatactaaaaccccagagtgttggtttgatttttcacttgcacatatctgccaaaatatacaatcattagatgagataaatacttgtgatggatgaacgtgaacccaggaaaatctattatgaaacttgttaaaactacaataaaaacagggttgagaaaacaatactacatgtatcctttaaaatctcaactacataggcaggcagctggcaggttcttaactagataatttagtaatttataattgcataacgtgtatttcaaacctaggctcatacacatggaatgaacacccatacactcatttacttccttctctcaagaggtaaaaatggcttgcaccttttaaatacttagatatcaccgaaccacagagttcattctcattacaaactactgaaaatcttcttaattttttcaagctttaaaatagaagcagcttggcaagtcagtggtaccttgatttctttcataagtgcaggcactccagcaatgcttagaagtgcagtaaatgatataaaaatgaatattgctgcaactcttgtctgcaatgtacatagtcaagagaaaagaaaattaataacttcactaactggattcgtgaatcagattaatttgcttatgatcatatgacttaaggagcaaataacatgagtccaacactaaaaggaaactatttaataaataccagaaagcataacaggaaactatttaataaataccagaaggcataacagtgtttctcaatttaaacaagataccaaactttaacaagaaatctgacagagcaactataattgaacaagggacttcatgacattgacatacatagtgatacacacaatattactaagtatctaggacatttcagatagaacagctcgctgctttgcactacacagcaagttgagaaaactcttggtcatttcaaaatagtcaaaagatagtataaaatgagactgtcgggaacttaaattacaaccgtagcagcagacaggataagcttatctccctcaaaaattcgggttcttctcggtttctatttgtaaaatacttcaccactgccaactaaagttgataatggagaggttccttcagtaagtcctatttattactattccaaagaatcaattcatattttagctttcatcaacacaccggttaaaattgactaaggcttatctgagaatggtctgtcacaattgcacaaatttcatggaaaataggcagttccatagaggacattatgataattttataaaacaatattacattacacaagaaagaataacaacattctaataatgcatgcatgcaagttaaatatatcactaaagaaaaatacaaaacaaggaagtgatactacaggggacaaggagaaagggcagattttttaaataacaaaaaaatgcagaagccttaaaaaacaaggatatttttatttaaagaaggaaaaaaaaaggtgcaaacatctttaaaaaaatattagtatattctcataaacttaccacaactgaagacaaagaatgccctaagcccgaaaacactgtaccgatacaaagtgtaagaagcatataaagaatgagacgaagccaatagtatttccactcccttgacatgattaatagtgatctccatgttaatactgctatccttgtagcactgcctgcctttcccttggttttgagacgtggaccttcctgtaaattgcaaattcaagtaattaaattaacaaaagccaacatacaaccacaaagagaatacttttcataaagtaaatttttggggaaaagataattgcaaattagaagggaaaggacattgaagaatagaattgggactccagcttaaaaccaatacgtgctaggtgtgagaatttaatagtaggtacctagaactaatatacataatttccatgtgagaatttgatctaaactaatgagcaaacatcaatttttcattaagctgaaggtttctttcattcatacatagggatcaagcttaattgatgtataataaatcaatcaaatttgtgactttcttcaacttcactttatttattacttccaattattctctatcttaaggattctcttttccaccaatgttttcatactttttagaatgtaatgtttaatgggaagactagtcccagagaggggaaatatacacataaacagtaactactttgtggtgactacatatctatatctactgatttatttataagctcatgtaagttgcaagtaatgctaaatgcaatagatgcaactactgattataaagaatctgagcagagttgcttgctaatatgaaacagtaagcaacaaaatatgatatctatatctatataaatataaacacagaccttatctgtgagtctcagaatcatcgtttcaactgcagcagcatcagcagaagatttatatgttgcttcaagggtgcgtattgctacagcagtgtccatattcactgatgaaaagtccccattgtcatcctgttataatgccagcacattgttaacaaaaaaaaaaatgaaaatccaagtgaatttgcgattaaaagaatatcctatgaaagttgaaggcatatttgatccccaactactgttgtaacaatattaagaaatacttaaacacaccactagccctttaagttatcaaatcagaaaaccggtcctctaatactaaaatattattgccaaacaaatcccattttttactggcataagcatttattcaagatttgcaagatgcaatcagttcagtgataattaacaacactacaaaatataaaaattacctgccaatttttacacattgcaatgatcctgtcaaaatctgtatttattgcacgtagaaagtgatctgaaggactttgcataattgggcaaggaaatccagcatttgagaagtgctacatcaccaaaaggagcgtcagttagtaattttctacaaggtttcaatttaacttcctacttaagaaaacaaaatgttaaaaatccaaagtcaaacacatagttggattattaattttactgtttctcacgtatatcaaccacgtcaatcattttgaatttcagttcatcagcaacaattggttaaatcatgtattaaaaatatttcctttacaaacttcaaagacaaaagtagcaaagaaaacaacatatttacagctgtacctgcagacaagccaatgtttccccgaaaaatagtgtatttccatttgaaagcagacaaatccggtcaaaaaggccaaatacttcggtgctactttggcaaatggtaaacaaaagagtgcaccccatgcttgcaagtttcttcaatgtaaccatcatcagaagtgcagatacactgaaaataaataaattaatataaccaattcaacaacaatgctgcaatgagtaaaaatatattccaataaaatagaaaaattaattcagatgcagccatttataaacaaaagaagcatatcataatgggtaccaataaatacacaaatattaaacaacttagtactttcctaagttcctgacaagaaccttacaatgtagacgtctgcttaacgaatgaatccatagaggcagagcgttaacaaggatggtaaaaacagtaagaagcaaagaaacttaaaaacacctctttacctatcaagatgataaagaggctcatctataaataagacatgaggcctcatcacaagctcccgagcaatactaacccgccttctctcgccactaggaaggcccttcatataacagtgtccacctatcagtttgtttgcataatcactcagtgacatagcaatgatggcatcttcaaccacactctttttctgacaaaagaaaccaggaagctgaagcaacgctgaatagaaaagaaactcgcgaacagtgagtgatccaattagtgttgtttccctttcaacaaagccctgaaaaaaaaatcatgaaaatctaagatgatatgtgtgcttgaattgaaagtaactagttccaaaaaaataactaacatacatcctgttaatgtatgtgtaacttacatatgatccatatggcatgtccaactttgctccatttacataaacttccccgtacatcttagcagaatgatgcagtcttcctaaggtacaagtaatttaacaacgttcaattcttgtgcatcctaaaacaagagaaagcaaaaatatttgtagatggtgttcggtgcttccatacctgcgatagctttcaatagggttgatttcccggatttgggaggacccatgattactgtcatggttcctggcaatgcataaccagttgaactcttcacaaccttatcagagtacttccttttcccttttatagtaacagttaaatctttccaaacaactgatgccccagcaatctttcttgccataactgcaccctcaggtagcggcggggaaggaaaggacctactattaagcttagagagtgatggagaggccggcgttgtggcagcattgatagaatcacccccatcatcaactctaacatcaatatcagtatccccccagtccggagaatcctcaaacgaaatgggttgtctaagagaaccaggtttccgcaagtagaaaaaattacttgagggtaccctgctggctggactactagctgaagatgatgaagacctgttattgtcagattgagactgtatttcttccattatcttctccctgagagcaaatttttaattcactctaacttagccatgtaatgatttcactccaataaatcagagctcaatccaaaaacctgcatcaataaacacggttgagaaaaaaccagctattttactgagaaactgggggaaaacaaaattgtgtaagacagctgagaatacaaagctgaccatgatgcaaagggaggctttcacaaacctctcccaaatactgaagaaaaataaaacaacaacaatctattaattgttcttcaaacttaattcttgaaaagttgaaattacagccttgaaaaaagaaaactgaaaaaacacatttaacaccaggattattcttatcataaacatttatcaaatgtgaattaaaaattgagcaccatactttaattttattttatgactcatttattttaattagaggactttaatagcagaaattcactgaagtataaccccttttccatttttttttctctctctcctcattttaatttattctgctacttgagaattaatacaaaactttttaaaattatactacaaattgagaaaggaaaatatttaatggaaagtagtaggaaaccataaatgctcaaaggcctgaaaagaaaacacattagctcatgatcaatactcttaaaccccaacattattctatataaggaaagaaaaaacacaaccaagtattttcaagggtttatttttgggaggtcagaaaaccaaatattcaagcttggttaaaggttactaagaaaagctgagaaaaaaaaaaaaaaaaagctttaaatcaagctattctttttattctctattgggacccaagaaaaataagagctttcactctcaaatatgcaaaaaaaatacacttgagcaaatcttctttccatttccgtaaagatttaagctttaaaacagcattaaacctacttcaccgttatatttctatcttctctttaaatattcatcttacattttctaaactcccacttctcaataaccaaaatcttcacagaaaactgtgaaagggaaaaaccaatattgaaaagtaaagttaccagtaaataaaaagttgcagaggttggagcagaggcaaagctggatctgagtgagtgagagagctcagaaatgagggaatgtgaaagcaagcactgaggtactgaaaaaaattgagtgagagagagaatgtttcgagtatcagtgagagagtaaatattaattttctttatggattatttgacccgcttttccgggtatttattattattattattttaaaaatcgggtatttaatcgggtatttattattttttttatatatatatataattaatcgggtatttattatttggtgttctctactttttcttacttcactttttttaaacaacaaattcagatgtaatcattttgccaacccaacacatttttaagatatgaaattatactaaatcataaatgatatactttttttttttaataattagaattttttttcatttgaactatttaatttgttccctaaaatatatagttggttaaaaatatctcataaaataaaaattacataattatgcctattctataaggttctatttcttttactgttaaaaattagtatttttatctcttaaactttaatcaatatagaattttgctccttttaataaaaaaattaattttaa

SEQ ID NO: 25781 - DNA, 2797 bp, Cannabis sativa
ctattccctcggctttcatccataaaatttgaatcaatgtccaattccttggaaactttcttgcgctttgatcccgccccaataccaccagcctgggatattttcccaaagatagggggtttcggcacccctctaggacccaccaacttggtcttcttaagcttttttatcttcccggagtgatcatgactaaaagcttcgtcctcccgggtcgcgccaaactttatcggccccagtttttctttaaataattaggccacatgcaccacatgctgggtaggaaacttggaagtatccacatagtcattgtaggccacattgaaagagttatcagcccgctgcgaaaccaccccttccattccttctttctccactctcgtgtgaccatctctaacttccgcacctttctccgggatgagggcctcattactagccgagagaggcatccctttcaaagccggatcatcattttctaatctactgcgatcatggatactctccacttctagcagcgcaaaaccgttagccaaccgcgatccatcccgcagctaagaaccgaacaagggaatagacctcccatcctgaacagtaactacccgcttctttgcagaacaatcagcatcaacatgaccaatgactccacatttaaagcagaaaataggtagtttttcatatttaaaatagctccaaacctttttatcaccataatctggaagagagactccagccaagaggggcacagccagctttaatcgaacttggaaacgcaaaaaatcattcagaatcacaccatttctactaaccttattcgcttgaataagcttccccatacggccagccatctgatgaatacaagcctctgtcatatatggtaaaggaactcccatggctttgacccaaatatccagattcgaaaggtccgcggactcccatttaccgtcttccggaagagcagcaaccagcaaatatccacaacacaggttccacggtccattctcaaggacgttcttgacttccttcgggcttcctagacggaaaatgaaggtttttggcctcaccgtttggaacctccaacccgggctaagcttccacaatcccgaaagagcttttctaagagttccattagatatcaccttcttcgaataaaattttccaacaaccgatttagcaattgtgtctttggccagttcattatcgggagaaacttcaatcgagaaatcgtccaaacaaacattctccgtctcctggatgatttcgtcaacaatagtgttttcattcaccgccgccatagtcacaggacctgaaaccagattagaaataaccccacaagcagtacagagattaggtaaaacagagagaagagaaatatccctggataggtatagatgaccacagcagaaaatttccaattcccttgccagatccaaaaaggaaagggtattaaaccctaagacactttgaatcgtgtctgcaggtagtgggccactacccatggccaatggtggccggacgtacaaggcgtcctccgtcccacctcacacggcccagacgggcccagtacgggacgaattcaaaaaactttgagcgggctacagtacgacgacgaggctactgtacggagacaatacaaggaagttgatatgccctgtacaaatatcaatgttacaacataacatccatgcaaaactttagaatgatattctcttttcttcaataatatattagtatagcatctcaatgttttgttacataatatgtttacatcatcaaacatcctctaaagttttaccattagtgatgctctaatatgggtgggtcctaagcgtgaatcctacataattctatatatatttttacaaaaaattattgatatttataattaatggtagaacgtgttctatataaacaaaattaacatttgatttttatgttaattgataaaatagaaaatagcaatagttctcaagaccaattctctgttttttcgacaaaaaatcttctcataaattaaaatttgatcttgtattttcaagtggtctttgttctaaaaaaacaaaacatttgataaaatcacaccaaacatttacttggcatattctccttacatatgagtgtttttcaaatataaaacaaagtaagagacgaaaggtcatgagccttgaagtaggatgaattcaacataaaatcgcattgaatgcgtaaaataattttattcagggtgtataatcattcttatgaacacgttttttgtttaattattttttgataataattttgtgcacaatttttatttactgtttggttgctcagaaaagttgtgaaagttaatgtaatacaatctatttgacttttttaatgtaaccgagagtttatatacagcaatactcattgtatgtagtgttatacctttattaagtagattatttcttctttgtttatttttatgcttaagcctagaggacttccaacagattttttattctatcatttaaaatacataattaaaaaattttacttttttttttttttattttacagtacatttttacattatatcatacgttaattttttttttatatatttttttctatatcattaaattaatattatttttataataataattttctaacatatatacaatataatatacataaataaaatattatttatatattattaaaataaatttagagaatgcactaagggtgtacgttggtcagtttagttggtttactttacattttattcaactcaatatataatcgacttacaaatatctaaatgtaacccgtc

SEQ ID NO: 25782 - DNA, 1838 bp, Cannabis sativa
  modified_base (1796)..(1813): a, c, t, g, unknown or other
ttacagctctctaactttctaatattttatcagttgccgaaaacctcggtcaacagacacataatacattttagactttctcttcatattattatgtaatgttacgctttgtaaactttatattttgaagtgaaataataaaattattgtaatacacaatagaatatctatctaagaatacacttgagcctaagtcaattatattataattgaaaggttataactaaatatagtttccctaaaaaaaatcacaacaccaaaaaatattaattgaacaataatgacaataaacaatccttaatacaatatcataataaaattatttttgcgtaaatatataatttttgtacatatattacaatttagaataaaatattaattctacataaattaatttataaattacatgtatatattttattaagatatatgaaaagcaatgcattgttcaactaacacataataatgtggccctaatataagcttaatattaaaagtgttatttttcttatgacatcattttgatgtttttctaagtggagccctcttttggtatgtgtttctttgttatggtgtccaatagctcattgaagcagagtcttgaagactattgtgctaatttgacgttggaggaggaagtacaaggggggaacgaggtgggagatgatactgaaatagactatagtttcgatgaacggtggtgttcagtgggaaagtttttgtctggtagattgatgggtttggaatttgtttagaatcagttagcttctttatggaaatcaggaatgggtatgtatgtgaagcaacttgagagtaatctgttcttgtttcaattctaccatgatgtggatattcaacgagttattgagggtggctcatggacatgtaaccgtcagtatctcatattgaaacgacttaaagaaggagataatccttgtcttaataatcttaataagttagacatgtgagtgcaggttcatggtgttgtcccaagctttatgtctgacatagtgctcaaagctgtagggaactacattggggtttttatggagacagattcaaagaattttattggagtttggcaggattgtttgcgagttcgagtgaaggtcaatattgatgttctccttaaacgtcaatggcgtctgcggaagaaggatggtgaatagatttgggttccgtttaaattgaaagagatccaaccttttgttttatttgtggtattacaggccatactgaacgattttgctcaaaattgtttcactcctctatctgagatcaaaaaaccatatgacgaatggatgggagctgtccctaagaaactaattaattttccaaatggttcgaaatggttgtgaaatcctgtgtcaaattcgtctctggtgagagccgacagtggaggggaggttcgtcacctgtcttccaaccttcctattttggaagatactgttggagaaaatcttggtattttaatgcaaagtattgaccagagtattttaaggggaaagaatattgaccacaattctgttcctaccaagaattactcatcagaggatacttctatcaattaatcccataatttaggggttgatctgtataaagatactaatatagctcaaaaggagggatttattttatttgatctgaaaagaagaaggatgggctttgtgaattgtgggctaagtatttgtgaagatgagaccatgtatgagaatgaaaatgggccaacgaaagtggatgttgaggacactattgagtcaaataatgaaggaagtttttgttggaatttattttannnnnnnnnnnnnnnnnnaccaagtatgttttattaacatcct

SEQ ID NO: 25783 - DNA, 2337 bp, Cannabis sativa
taaagttttttgatatatcgtgtcatgcttttcggacttgtcgcgtgtcatgtcttattttaagctagtttatttgtgcttacgtgtcatgccttttgtgtttctcgtgctgtatcgtgcttaaggatatatttttttgtgtcgtgtcatgccaatttgtagcattgtgtcgtgtcgtatcgtgtccaatcctgtatattttcgtaccgtgctcgtgttagtttcgtgccgtgtcaaaaggtctggcccgtatttatagcactagtagtgcctagtaccacctagaggtagcgctttacgatttgttagcgatactctcttaaatttattaccttaaagtttcgatatttaattgttttagcatttcttattttcaaaacaatcaactttttgttgagcttttacaattttctagcaattaattcatgcctcgacaaaatactaaaaaaaagccaaaatgttgacaagtacactttttttgctgcttttatattgtgtcagaagcaatgttctttacccgtggcaaaactcgtccgtaaagatatagacttctatcgatttgaatagtatcataacccatttttttgcgacagatctcacgaaaaccccgagcaaaaattagcacaaaaagcttagaactagggtgaccaatgagaagagctataacatcagtaaaagaggcatttcttatagtgatcgcattcttatatatattaggacatgtttaataaaatgctaaaatattggtatagtgttgtatttttacattgtttcaaaaaaaaaaaattagttattcatgggtgtgtcatatcttgtgcataatttgacacattctgatgcaatttttttaattacattcttagcatcaagtattaattatagaattcaatacacattttttaattacaatattattagtagtgtaagtatcttttaaatatttatttgattaataattatttcaatattttacctttcattttactattttatgtctcaaaatattattgtatatttattaaaataggctttgttatttttcttttactgccattggttaagtggttatgttctgttgtattctgttatgttagttgtattggttagttgttctttgtaactaactatgtactgtgctcctcttgagcttgagctatataaggctcactcccttctttgattcattaatgagaaatatactttgttcttcctcttctatttcttttctcgttttatattttcttgtttgtaatatggtatcagagccacgactttcgtgagcttcttttctggtttctttgttaattgtggttgtggctcatggctcgtgaaggagccaatactcgatgcacagcgaatcagggagatgaatctcggactgccaaaagattctctgccctggaaaccaatgatcgaccacctagagaagatcctagaagtccctacttcatttcgagtgaagatcaattagatgtgaatcttgttccaaggattttgactggctgtgaaaattacagttcatggaggcgatccatgattgtagctgttgcagcaagaaacaaaatcaagtttgtcgatgggcgattacctgaactagaggttgatgatgacatctatgatgtgtggtttcgatgccatagcctggtgatttcttggattttacatgccatttcgagtgagatttctaatagtgtgatgtaccttgataatgctgcaaagatttggacaaaacttcatgagagataccactagaaaaaatgcgccaagagttttcgaagccaaacgatctatgcatgcatcgattcaaggttcgaattctgttaccacttacttcactcgtctgaagtctttttaggatttgatacaagaatataggccacaacccgtttgcacttttggtgctatgaagactatccaagaataccaagatgaggattgtgttcttgagttcttaatcggtctaaatgagtcctatagtggagctcgatctcagatcttgatgcaagatcctttctctaatatcaacaaggtttttgcttctattgttcaagaagaaaggcagagaggaattactgtcaatcaaagtgataatgctcctcccacatcatccaacaattggcaaggacatcactgttgtgtccaagcacatattatggccaagtgctattgtttgtatggatatcccccagggcacaaactgtatgggaaattcccaaacaggaatgctcaaagccctgaaaagacccctgctgcaaacttgactaaagctcaaaagaatggtgaggctaatggaaatggcaagaacgttgagcaagatttcatggccacctttgctca

SEQ ID NO: 25784 - DNA, 3869 bp, Cannabis sativa
  modified_base (805)..(809): a, c, t, g, unknown or other
acgtaaaatacttggtgtcattcttattattctacttattaaatttcttatatctgtgtttaattacgaaataggctcattagtcgttaacaaaaatctgcgttaacacttctatttaaaatgttttgaggatcacatatgaaaatcagtgtctttttactacatggttgttaccagcactttaattggtatttaatgagataaaaacgttagacaagagaactgaaaacatgctcaatcaattcatatacgtttatggacgttttcaaaaactggttccaggtgttcgaaaaacaaccataaaataacatattaacaaccataaaataactattttcaaaaaactcaatatttagtttttgtaactcctctctgagttaaatgtttttccaacgtcacaatacccatttaaatgatataattgggtattgtaacaatttctaacagctagaaactttttccattgatttcataagttccatatcatatgtattaactcacttaattacatattatcaattgtgatccttaagttacaatctattttcagatttataactcttcatatgttacaacttttatgtgtattattgtactatgatataatacaacctccaacacataatatacattaatctcatattaatatataatatatcacatttcaatattttaatctacattatattataacaaataatataatagttttaactgttgaaacttatgtggcagcagttgatgagctggtttaatgaagaccaataaattcattattttgtccaagtttttttttttttttttnnnnnaagcgtttatatattacatcatgcataatctggaactcgaacccaagacctccaacacacacgcaccccctatggccacttgagctagcctcaagtggttattttgtccaagtttagcatagaaaatttaaccaatcaccacataagtgtgttcatatgtttctttttttttttttttatgtattttttaaaagagaattgttgaaaggtattattagtgtctaacatcctcttcagtgtcatatcgtaattagtgtaattaaatatcgtgtctcacatagttttaaaaaataatttttaacgaatattgataatgaatcacggagtgtcacttataaaaattgatggacaccactagtaccaaagataactgctaaagagtaccagtggtgcctagcaccctcctatgtgttaatatcgctattggtccaactaagtatcgtgtctcatataatttaatataataacttttatggagtatcgctagtcaatcgcaacgcgacatgtcgagaaaatactaggcaccactggtgcctaataacaatgcttagtaccgaataacaatgttttttaaagtgcacaatggagtaaagtgattcattaagattgctatacattaatatatattgtttgaaactcatccttgaatctgttttcaaaaaaaaggttcatccttgaatattttggtcacccatttcaaaataaataaacaaaaaaatatttttgtcactaattttaaacattaaaaataggcattaaattcatataatatatgcgtgggatctaattaagaatctgtatcatgtacacgtttaatgattgtgttaattaaacttgatgttaattatgatatgttcaactgtcaaacggctcatctcttaacctttaaattaattataaacactactatacttctcttttaatattctttcctcttcatcaagccaattatcatttttattgaatacgaaccacttcaaacccgacaaggtaagaaccacgaatttattttgaccaaaagcaccgccctgcaactaaagtaatcaatctttataaacaacaatcataaatattttatttacaatattgccctttcatttattgaaaatgtcacttactaccgtatgaataatggaactgcttaatataacagaaaaaaaaagggccaacctaattcgggggaatgagacgactcagcttttatgtctaaccatcaatcatttaatttttagcctctgccaactgctatgaagaaatttgctttttttttttttttttctaaaatactttgattaaaataaataaataaaaaagcctaatttttaagcatcaattgcaatgcatgtgggtagctttgattcaaagtaggtgcacccacatggccccccttcccctcccagaattaaaactctattttcctcatcaaattaatctaaacgttctactaccatgttaattgttatgcacttttataaattccttaaatgttgcctacaaattttttaagcatgtccatatctgaataccatgaggaatatgaagcagatttgtttatttttccttttctgttttacacaatcatatgatatgttatgatatgatgtacattattattattattatgtgtgccatgacactgtttttggttgctgacaatttcttgtccccatttcccttttctaacagtcaaaattggctttatttatacttaagtccatttcccctagtaagtccccatccacttataattatatacaccaaagtccaatactttatacagaaaacaggtctactttttttttgcaacccaattaaggaacaagtgcttaagttgagtctagtgctacaccacttgagtgggccaattaataacttatgaagtctcaattctcattaaaagctttatatagatcaatagaagaaagggaacccaattctaactataatctatctatacatacatacatccatattgtttcaaatcttgtttttatttcttcttacttatagattaattgtcacaatccaaatgggatagtaccctcaaaacttgacaaatttggtctgattttttagaggatgatcacattcacatggaagagaagggtgatagataaggattggaaatgaatgcataaggaattatttgttgtgggtgacattgacttgtcccttcagccaagctatcgtctaacccacatggctacatattgataatattgctatcttcccttcttacccacatgcagcctttgcatatgtggcagtggcacatgcacaacatgtgattggaaccctcaaacttaaatccccaatccatacacacatagtgttcttccttaacttatccatttcatcattcatatatacacacattaattcattgaaaaatttaaactaattataatatgaaagtgcttttttttttttttttgagggatcaaatatgactgcctttttcattaattattaattaagagagacaatgtgaaggttttgactcaattgcatttatatatataaatcatataatcaattgagtggggactttatctaaattttgttttagggtatgtgtttattcctccaatcaagcctaaattagtgggaaaattggcaaggccgtagttaaaactaacttaaagtcatttccctctaatatttcgcccttcaccaaattaaataaggacggactacatctataatgtagttgttgaaacttaaaagaggaaaaatcaacaaaatcagttaaataaattataattattatagaagtcagcaaaaatggcaacaaccatatataatgcctgtactacttaacaaaccgttacatgttgcatatcacctactggtgttcattggattacattcaatatttttaggtctatctagatccgatccaattatatattagaggttagattttatcatccgatccgatccaattaattacagtcatccaatcgatcaaatatgttggattagatcgattttatccgttggatgtatttcatatatatttattggtttaatttagatttattcaatattttagaccta

SEQ ID NO: 25785 - DNA, 4678 bp, Cannabis sativa
tgagtgagctgttttgcattgagagaaaagtgaataagaaacacaaatggcctaccaaaccaattatttgctgagaataagccaaacaatattacttttatttgctctatcttttcctcacaaactcacactgtatatttattttctttttgtgatatcattattcaattactattgattattcatttagtatattcagaggcaaataatattgataattaggtgaatacatgaaccttggtgaataaaagtcttatctatttctcttttcttgattattttctacttttgtaaaagtgtgattgattatgagaggtttgtactccactgggcagtggcatatgtgataagattattccattcctcatccattgccattttctctctaagctttctctgtacttttattgttacagtactgcaacagctgagctactgaagtactgaattaaagcatggctgaacttgtgattgaagcttttctctctgcttcctttgattttttgctggaaaagattacgtccccttatgttgaggacttcttcttcaaggggaaaaacgaaagttcatctgttgtttctgagaggcttttcaagttgaagtcaaccttcaattgtcttgctgcggtttgcattgaggtggagaacaagagaatcaaaaaccctgctgtggagaagtggctggacaatcttctggatgctgtcgatgatgcggaggacttctttggcgatattgaatatgatgctatgaaacccaagaatgtcgagttgaagaaagaaaaacgaaaggcaattagcaagttactcagttgttgctctaaaccttctaattcagctgattgtgaaaggaatgccaagatggaagcgattcttaagaggttggagcacttagccgatcagatcggaaagttgaatcttgaaaagaatgttggtgaggtgaaaccatctgaaagctcacgtgcgaagacttctctgccagatgaacctgaattatacggtagaaagactgacgaagatgctttgatgaagttgttgatgtccgatgatgtaggtagttcaaagatatgtgtcattccaatatgtggaatgggaggggtcggaaaaactacccttgctcaaacacttttcaacaatgaaggagtgacaaagatgtttgaacctaaggcatgggtgtatgtgtctgataaatttgatgccatggctgtgacaaaaagcattcttcaacaagttgctccgagtgaaacttcaagtgacatggattttaatttacttcaagttaatttgacaaagaagttaaccggaaagaagtttttgattgttttagacgatttttggaaagatgattatgttcagtggactgaattgataaagcctttcaacagtggggcacgaggcagcaaaataatagtaacaacaagaaatggaaaagttgcagataccattcgaactgttgatacacaccatcttagtgaattaacagaagatgagtgttggaaactatttgcaaagcacgcatcttgtggaaatcttgaattagaacgttttggcagagtaatcgctaaaaaatgtaacggtttgcctttagctgccaaagttctaggaggcctcttgagatcaacagatgatgctgagaaatggaaacaaatagccaatagtaatctttgggagctccaagataaaagaagtgagagtcttccagctgcattagaagtaagctatttttatcttcctccatacttgaaagggtgtttttcttattgttcaatattcccaaaaggctatgaatttaaaagagaggagttggtgttaatatggatggctgaaaaccttgtgcagtattccaagaggactaggagaatcgaagaagttggtcgtgagtattttgatgatttagtatctttctcatttttgcaaccgagtaagtggggggggtcttgttttgttatgcatgatcttatagttgatttggctagaactatttctggaaaatacagttgtttgttggagcaaactgacaacattgataggcttgagaagaagacacgtcaccttggatgtgtcaaggaactttatgctgataataagatagctagctatgattttggagccacacgtttgcgaacctttttaacattattaggttcaagttcatctgaaataattttttctaacgaagtagtgcagaatctgctatcgatgttgaaatgtttgagagtcctatcttttcgtgatcttcatcatatggattggttatctaattcaattggtgagctgaaacatcttcgctatttagatgtttctttcaccgagattgtgacactgcctgaatctgtaactgtattatacaatttacaaatactgaaattagaaaattgtcaccgacttgaagctttacccaaagatatgcatcgtctcattaatttgagacatcttattattagtggaaatagcctagttgagatgccatgtcaaataagtaaactgacgaatctccaaacattgacaacttttgttgtggggaagggtagtggggctaaaatagaagagttggaaaaacttcatagtctacacggaaagctttccattaagaagttagaaaatgtggtcaatattgcaaaagcaccggttcaagtaaatgtacaagaaaagaatcaacttgagaaattgacgttggaatggagtgttaatgaggatgttgttgatccaaaacatggagagggtgtgcttgaaatgctttcacctaacaaaacattgaaagagctcgagattatctactatcctggcaaaatatttccaaattgggttgggaatgatttttttagcaacattactaaagtaactctttatgattgtgagcattgctcctatttgccaccctttgggcaacttcctttgctaaaacatctttccatctcaagatgcaattcggtagtgacagtgggtgctgagttttacgggaattgtttggcaagaaagccattttcatccttggaaacattaagttttagtaagatgtcatcatgggagaaatggcagtcaatgcaaattgaagaagcaacaacatatgggaagctcaaaacacttaaaatggttaattgttctaagctcgtcggagatctgcctcgcttccttccttcactgataagtttggaaatttggaatttggagaatttggagtcatggtatgaggcaataaagccaagaaaaccttgttccactctcactccactctaccattaccctcctcttcaatctcttacattgttgttttgtggatcatccttcaaatccctcaatatggatttatttcctaatctaaaaactcttgagattgaatgtaacgactactttgaagctatctcagtgtcagatgggaaatctcttgaggaactaacatttttacttatcgagaattgtggtagttttgtatctttcccaaatggtggacttattgctcccaagctgagtgatttgcagatttttaattgccctaaattgaagtggttgccagagaagatgacttccctctcatctctaaagtcgttgacaatcataggttgtccattgatagagacttcgcctgaaaatggtatgcctgctagtttgtctgaactctttatatcctatgatgaatttttgaggatgaaatggaattggcaagcattaccccatcttatccatcttactatttctggatatggtaatgaagaagatatggaatcatttccggaggaagggctactgcctaccactatttcccatcttggtatcaaggattttgcaaaacttagagggctggacaaaaatgggcttacacaactcacctacttggaaacacttgagatcttcaactgccttgagttggagacattgtcagaagaagggttcccaacctccctgacctctttggagatatatgattgtcctttggttttagaaaagtactctcaaaaggagagtgggaatgaggagtactggaacaagattagtcacatacccaatgtcacaatttactaattgagcttgcatttaccacatataatctcaggtttgtttgattaacttatcgttcttccattttacttattttttatttatgtatgtataatactataggacctgctctgctctgctcctaatctgtagagatgtttttgttgtttttcttcactctgccttctttcttttcaataaatctttgtttttaataaaatacagatcaaatctttatttatatacttgatacctcgtattcatatatatgaacaagtgttaataattcatcggtcaatttgttttgacagacctcagcagaagaatcccttgttttatggtctattcattacagtttccaatatctgtttgaggtatggaacaatttccaattcaagtgtgtttattttattttatttatctgaatatatgcttttgctgtttttcaaaatgagtaatgaggtagcttccatggcatgaaacaagtttgttatataatagtatttgtggttggtttgcacttgttttgtttgtgtgttttagtattcttctggttattttcttattattaatgatgtttgagatgttttctttatgtctttgttgtgtaattacacttgccataatagtgtttcaacttgtattgtaaccataaacatacctcaacattgagtattggttcttca

SEQ ID NO: 25786 - DNA, 2538 bp, Cannabis sativa
agaaaaacatttctcccttaagaagtatcaaaataagaagtatcaaaccaatcatttaattatataatagttgtgaagcaaactcaagtgaattaaaattctattattaaagttcaaatactacgcatgtcaaaatccactctgataattatacaacttactcaataatccaaaataatctgcagctccaagaggtctctcgcaaagttcctcgaaagtaaataaagcacatccatcagcagttagtggaacctgttgaagtaaatcattaatatatatttatattatacaggactaaatgatatgctgttaaatgccattgaaaaatgagttagcaaatacctgtcatgttcttcccattactacttccactcttgtggaccagccttgtgttcaccaattaattcttcaaatctttgcttaaggaaatcagataaatctttaccaacaaagtagaaacctttctgagactgcagtcaagggcaaattaacataatgaagttgttaagtaatatatctcacttatataaaattgaattatatcgcaaacaaatatagaagcagttagtatcactaccgaagtcaatttccgatagtctacagaggaactaatttgatggacaatgcatctttcctgcaacaaaatagttttccaaattattgaatgaataataaaagcatggaaaaagatgcatacacaagtacagaagtagaagagtatcgccaaaaattactgctaacaatttgacacgaatgtaaaacaactaacacatttctcttttctaacctaagttgcaccaaaagttaaaggctgattaaacatatacacaactcaccaatctacagtcacttacacaccttcagagtggaaataaatggtaggaaaagatctcgttgtaatccatctttgtataggttgtctggagcacgatttgatgtggcaacaagaatctaaaattccacaaacatacagaaaactaaataaataaacatttatgatgaaaaataattttcattaataaagaaaatggttgagaagagaatgtatgaaagtgagctacttacaacaccatcgctgaataaatgtttaaagagacgatttagaattaaggcatcagcaacatcagtcacctaagaagagagcatagtaaagaaatgtgttaccaacaactgaataaattttttaaaaaagtaaatatatattaggcggaaaaaaggacaggaaagtgttattttctgggataccatgaattcatccagacatagtaaaatagcttcatcagaaatctctgctgaaacaacttcaagtggatctgccacacctctgtgcttctgtgataatgaaaaagttccacaataaactaagcatcagcatcctaatcgttcggcacatacaaaatgttcaaactaagatgtactcaagatttagaatgttgcgcaaagtttaaaccattttgcttagcacagcctataaactattaacttatcaaaacatgtcaaccggcttattgaatgaaaacccacaactcaaagcgaaaaaactttcaactttgtacgatataaagcttggttttcactcaaggtattgccttgtagacaattaaattatttacttatttagtaggatatacattatctacaaatgcattcttacttgcaaacgggtatgcacattcagcatgaaatcatggaaatgaatccgtttcttcctccaattgcatggcctgggacaaaaacataatgaaaaaagttttaagtatgaatgcattaagaataaaaagcacaattgagcttgagaataaaagagacagtaaacttattttcatgtattaggtttctactaacaattggtcataaaacaagtccatcaacatagtttttccagttcccactcctccatagagataaagacccttaacaggggagtatgaagactgtggcatgaaacgagaccatagccacctactcctgcaagagaaagataaataacatgtgaaacaggtaacaactaatgcagggaagggaacttgaaaaataatttaatactaagaaccactgtatatcagaatgcagtaggaaatttggttcaaaacagcgagaattggaacaaaagagttaccttccaactttctcggaagctgtgtatctatccaatcgacagacatcagctgaatcaacaagctcatcgtagagcctctgaagctctcttaatgtgcctagctgcaattatcagtgtcagtatattttctaagacaaaaccaaattcatattcagagcttagtactgccattttcgactgtcatgattctgttattgtacaaaaaatgcatcagtgaatctaagatttccaatcaagggaagtagattactcaaaatttcatgacaattaaggctgaatctcaaagttaactgcacatttatgcataactaaacaaagaaacattccaaatgttgtacactaacaagctatattatttgtttgaaagcttaaaactctttaaaattatacctggcacaagtcaccatcaacaagttcac

SEQ ID NO: 25787 - DNA, 1633 bp, Cannabis sativa
cccccccaaactcgagccccaaaccttggctttgatggcaaatttctgacccgaactcttactttatcataatacaacctaagttcattaatatttcaatatggcttacatccttttttttttatgtattacataatatgttatgggttgtgtcataaaaacactttatgctcccaaaatagtattttactaatttgatacaatataaaaacttataaacagaataccaaatccatagtgatttattaattaaaagttaaacttattaaaactaataaattaattaacttctcgtttgattccacatcatatatataatataaatttaattggccaaagttatttatgatcataacttattttgtaattaacatatcatgatgagataagtgacgacattagttctcttctccttattactttgtttttcacaactagtagatttgggtatgcatatatgtgaaacaatgcatgtatatattaattattttgttactaaggtgtgtttttaacatttacatttaatttacaagtatgaaattaaaatattttttgaaaaatttataaaaattaaaatatctaaaataaaagtataaaattatatatatatttacaaaaattcaatagcttctcaccaaaaaaaaaaaaaaatcaatagcaaaagaatcgtttaaatcatttcatatagctgaattagtatcatgtgcatgtaatcataattcaagtggtaactgcattatttagtagacaaattaccctaatgctaatgaaatgttatctcatgaaagatatacatctatagtttagttcagtttagtttattagcaaaaggaatgttgggagttaacttttaaccaattatagcaactaggcaagtgtattcctagaccctagtttttttactctacttatatagattgcttaaataaagcttatctactttatgaagagttaataattattagtgttcttccctaaaaaataagaaccctatatatagtggtccccttcctctcttctattttttttttttttttgaaattaaaaaaaaaaaaaaaagtaaaaccccaagaaaagtcaattaaaaaaagtgagagttgagaggtacaagacaaaagtttttaatagtttagggttttacattcaaaaacgactaataaagtaacactaaaaggggtcatgcaatgcatggttgtgtggaaggaaacatatacacgtgagcctgtatttgcttcaatggtttttgccctattttcggctcataaagctttctttttttattatttatgctccaaatataaatatatatatatttttatatataaaaaaaaggaatatgtctaaaaaaagcttcttattcaagctataattggtcccaaaataaggaagaagaacctactactatactatactcgaatatcaattatcattatttatatatatataaatttatattagttatcatgtataccctttttcctttgatctttttctttttctattattttggttcgttttggttttagaatgaatcaaggagattccattccgcaccccgttagatactttgattctcctgtccattaatttatctaaaaggacaatttccacttttgggtatccattagattta

SEQ ID NO: 25788 - DNA, 2416 bp, Cannabis sativa
ttggaagcaccattgtatatttgactgtttcctattgttagttataataaaaataagtggtatttttctgaccatttaactaacaagtagtgcttctgttgtagatagaaaataatggaattgattggtgaataagcctcccaataattaaaaaccataaagaaaattttacatttgtagacaaggactgtttgtagataatattggttttctgtctttgtgattgggtgtatatatgtggaaatttcagtacctttcaaaagtaagaggatctcatgacatggatattggatgcttcttccccttaatcattatccacctaatcacgtttcggcacgtgtacacataaaagccacataagcaacacattgcgatagttcaattagtctagacctcactacgagcgaactcgtttgtgagctctagacaataggctcattgcaacgagatccactcgagtacattactacaagtggccttgtattttcaccatttgaaaaaataagtagaatgtatttttttctatttaaagacaattgatcttttgaagaagtataatttgagtccttttgttgtttaagctatatttgtgaatataaatttatagtgtttaatgcccaagttgtagttttcatggtagtattggtttagtcctagtttttcactggattaccttaagtctgacaacttaactttgagtctcttttttttaaagatttaagttatttgttagagaaatttgataatttattatttattttttcttgaaaattccttaatttatgtttgtagtataactaatataatcgatacttggatgtgcatgcactcaaagttcataaactagttttggatggatgattttctatgtttatgtgcctaactcttattattttttgatgaagtaggagttgttttttattaaaaacaaaaaacaaaaaaagtacacgtagatactcattttttagtcctcataactaatatttgcatttttagtgcaagctagtgagctacattgaaagttgttttagtagattaattattaaaataaataaaaataaagttgcagtggcaacaatgctttatatatttatctcacaaaatttgtaatatttctcttctacccaacaacaaaagatcccacaccaccctgataagccacttttacctagaaacatcaaaatgggtaagatactgtttactcgaaaactgatcatggttaagtaaacgttaatatttgatacatggcaagaaaaaaaaaacatttcagagtcctgagtcattgtagtcgacgtgggaggcgtttatagtcatgcgcccaagttgacttcaagaactctgaaataggtgtttggatccctccaagttattttcaactcaccatccttcagtattatgaaccaagaagacaagaggaatctaagtctaaggcctggaaattgaaaatatacgaaataataccccagaagtcaacacatgcacctagggttttcacccaacgcccaatttgacattcccaactagagtttcagttttcgggttcgtcttagtgtaaatagctcaaactttgtacttatacatgaataagaactgtcacgaacatgttagaggcatcaaaatcagaatcgaaacacttcatgtttgagcacctagggcctagattgacatattgtcaacttggggtgcttccaaccacaatattgaagaagtatcccaagcattttcttcgtctacatccaaaataaagaatcaagtgctttcaggaaagaaacagatcaacatggaggctaaaactgggacccagcgcccaggttgacatattgtcaatttagaccattttcaatagcagtttagacaaagtcttccgggcatattctttattttcatcaacaattgagatatgggtgtttttaggaaataaacagagccacctgggagacaaaactgggacccatcacctaggttgacatatcctgggccatttccgaatgcttctcttgagaagtcttctgggcatattcgccattttcatcagttttatcattttttttttaaaataatcagcttctaccacgaacagatgcataaaaaaaaatgtaatcagtctggtcataacacttctaaatcatactattatcaagtttgaatttgacaaattaaattcatgacttattttatatcattttaaaaaacataggatttgaattgttacttattaaagcagagagagtcaaatttataattttttataaaatacattgtcaaaaatagcgtttattttatattatataattttcaaaaattattttattgaataaattttttctaaaaaatatatgtcacgacaacaattcaatcagatggtaacgacacgttagggtgggagtgtgtggttagatgaggtagccatggtgtg

SEQ ID NO: 25789 - DNA, 3313 bp, Cannabis sativa
ggtggctggccagctcttgtgaggaggttggtctgtcaattgatgtattgtttgagtgtcgggatccctgttggctgagttactaacttggcattcttgtttgtgagttgtattgccatatgacactgattttgtctacataagcaatgccacatcaggtgtgcaaaaatttagataacatttgccccccaagtccctttcataacgtctatatggatagggacttaccagttggattagtgcaattggaactgatttagcctttgatgaatagaagctactaaatttttggcctttggaaatactttgccttgactgtctgatctcattttctttagaaaactgattgctttatttgtctctttgttgtgtaggtgaggtaagtgaaggaggggtcccacatgtactatataagtgctttttgggggaaagcctcttcactttttagttttcactctctcactagaaattgaaatttgaagaagcttctccttctctctagagggccaaacccacaaagcatcaatctcttgggatttttgcaccgtttcaacgattcaagcttccaatcttcttcctcaatggtttcttatagtgggtaagctttctattcattttatttcacttaatttggtatatttttccatgaatgcatgaacattattctttgcttgaaatatcttttgtttcatactttagattgttgtcatttttgtattttgatctacaagatagacttaggatgcgtaatgtgtgaattctaggaaaaaaagatctgaatttgaccttcgttgtgattcttggctctttgagttacaagattagttcttgaaaaaacacatgtttggatccgtacaggtcctggccggccaaggacgtcttgtttaagacctggctggccaaggatgtctattagggggtcaagctggccaaggcagtacaacccatagattggccggcctatgcttgtaaattggattcttggccagccctaggctaggtcagtgggtctggccgacaactaaggcttgggaccctggtcgaaaaagcccaaggctccaagcaggcagctagtttcttaccctcgtttgaccttgtctagggtctcgcaacggccttggaagcatatacaactgtagtcttatgcgtggttccccttgggaactctgtataagacctggtagtgagtccattatagtcaattacataacttaggacttaccatatctctaagtaagtatacataaaatggcacttggtcgacaattaaccttgtacattgtgatttacctaaaaggtaccattgcgtactgttgactagaatgtgtttgtagctttgtcaagttgctcacctccccttatctcttatgtgcatgtggttttgagtgtcgaataggggaaatgacaattgcgtaggtcccttggttatcctatgatcgtggccaaaacaaaacagacttgtcattgaccgcctccatgtgaccccaatgtagcaagggtggctacaagggattgattcaggattgtagaggaggctacccagtctcatcttgatgttgagctagaggttgaccaggcagaggtgcctgaggtcgactaaggggctgagagccctaatattgagtctgatcttgaggaggccccaccagtcaaaagaagagaatacaggacttgcattttcctctccaactgccctttaggttgtcacgatgctaatggttatctgaacggcttggtgagcctttagtgttagtcttagatcatgtcttaattaagtcttttgagcctgagtttatggatgctagaccatagggagacagttgggtatcccgcacttctaccctctctattgatgcttttagcaaggtacttgatagtgtttagtgaagggtgtccattgcgagacacatcatagagatcattgggcaccaccagctttccctaggttggttgaattggtcagagcatcatattgagcaggggaagtgttgttgcttcatccatacttccaagacatcgctgcttactttgggatgtgccaacatagatcactctaaaaagtatcaagtaccttttgtcgatgtatgttttatatagggacctaggctggcctcagcctactcctcatgagattggttattattttgattagaagttttccccgaagcagaacaagattgggtatctctacttctgctaggttggccaccagtggttgagtgacaccagtagtacaaccatgtcaaaatttggtgggtatggtaagaagtactttattgcttgggccatccaaaggattggacattatgacatctggtgggttccattcttgaaatgctctatcctcacattgcaaatgagggatagggcgaaccacatcatgtctcattcagtgaaaaagagaaacatactgaggttgaccaatatggccaacttccagaaatatggtttgtaccctcctactcctagagttgcaggagccccagctgtagagggagcttttcctagagatggacaagctcttggcttaaacgctgatgtgcctttctattgtatagctcacaatctagagaggaaagagaaggtcttatatcgatgcttagccagcgggggttcagatagtgatgcttctctccagatcaggcttggaggtcagacttctgagggacctgctcaccctttgcctacatctagaggcaagggtaaggcagttgttgaggattctgacagttcctcttctgagaatggtggtatttgatagttaatggcaccatctcttacattcttgtcttgcattgaatatttatgacttgatttctgactttgcctttgctactttcctttttgtagatatgtcttccaagttgagaggcctcactaggggaccttctgacgagccttcgggttgactgagggccaaggtggcatagacctctcatggtagagatgctactagatcatctctgcctcctcctccatcagagcatgcaccagttgtgcaacctatggtagatgttcctcttgttaggagggaacgaccttgtggctggggtgctctgaggcccagctacagggtagagagccatggaggcagcccacagacgcatagagagatcccttccttttatggatgaggagctcaaggagcttggtgatggtgagctagaaaggctctactccattggccttaggtatctatcaatggtaagttgtacttctagctttgttcatctttttggcacttgtgtaagttggcgggccaagggatttactgcatgggtctggccagccaaggttgtatctttgaggggct

SEQ ID NO: 25790 - DNA, 2229 bp, Cannabis sativa
ttagaagaggagacttacacattatttgtatacacttctcagacattagtgtgtgcaatgaaaaataagatcattgtgttggaattttatgcactaaataaaatttatttcagtataatcttatttactatcaatgtaagattagaaattatttaggtttacattttatagtttaataaataaattttattaaatccagaacacatagttactcacaattacactgatgtcatcatagtgaaaaataattataattatatatttcaagctatttagtttcatgatttatcagtgcactgaatttatacagacatgataatcaacaaagtttacttacataaaaactatttaggttttctttttttcttctgtttcctaacatggttttagtggcttttctagcaattattatatcaattatcaaaaatcaaaatcctcagccattgataattgaagccatcattgattttgatattcacaagtgataaagaggaaacatataccaaacaatttattgattttgataatattaatattttaaattataaaaaggcagcacccatagtttcttatagtaatatcccaaaaatctaatcctgttacaaactcggcaaagcaaagacaagggaaattatttatcatttattttaaatacaaaaaattcactacaattttttttatttatttatttacaaaaataaatagattagaaagacaacactacatgttagagcatggggtaataatagattgtgttgtatgtattaataaggcagtactacttggaagctgacctcttatttcttaagctaaacaaatgaacatcttatgtgctctacaatcgagttaccttgcataattttcactaagagacttatatgaagaagaagaagaaaaaattaaacatgactgcaaaaattcactaatatgtacaaaaacttagacctcacttttggccttgaatcaagtgattttgcgtgctgcatgatagagctccatataatcaagagccggccggttccaagaccagtcttgctccatcactgtcttgcataatgagttgaaccactcccgcttgtcgtaccatgctgtgattgctctgccaaaacaatttcatagtgagcactatccaaaagaataacaaggaatatctagtaagtgtgaaatacttcagatgtggacttacctgtcaagagcatagtcaacaccagcagtatcagctccgtcgaaactaaatccattcggttctagaccctgtgcttgtgctctctctttgtcatggtcaacatcgaatacagtatcgtaaagtcctataagcaatgaagattcaaatggacagccattatgttttcatcaatagattgttcttttagtgcttaatattttgtaaaagaactttattcagagacttataaacagaacaatcaaaacatcactatagagcaaattaataagatactgtgtgtacatacctccagtttttcgaacaacagcaattgaaccatatctcatagcagtaagttgggtcaaaccacatggctcaaatattgagggaactaaaataaagtcagcaccagcatatatctgaaggaatactgaaaatagttagtttggtttggaggattgaagtgaatatgctactacaaatgataagacagtgtaaagcaatgaatggtgtttaaagacagcataccaaatgtgatagaggttcatcataagtcaaacaaagacgagcgcgacgagcatgagtagagtgcaagtgattggccaaatttacaaaatcattctggattctaggatctggagctgaaccaaggagaacaacctgccatcaaacaactccttgttataaatatttttctattgccatgactcgtgaaaactgaaaatgaggtattcttgaaaatttataactaacctgtccattgcgctccaaggtacgcccaatggcatgtttaatgagatggattcctttctgatgtgttaatcgagtaatgattcctactatagggagatcagctgtttcaagaccaagcttttcttgcaacgcatgcttggcagctcttttgccttcaacaacattttcagatgtgtatgatagctgggatggtatgaaatgtgcattagacaattgtaaataaagaattatgatcattagcccaaaaaggaatatgtttgaaacttcaaaggtttacactaatcttgacattttggttttttttttttttt

SEQ ID NO: 25791 - DNA, 2198 bp, Cannabis sativa
cattgaaacctcttccaattatatatattttgtaataaaaagaagaaaaaagaatactaaccacttagctttgaaggtatctcttcaattaagaagatgttgaccatatgacacaaagtcaacctccaaattgattcaagtatctcgaaaataagcaagccttcaataagaatgagtttcgatacaaagctccacaaactccaataaagccaagagcaattccaacttcgagtccaatgtaaaaccatgacatgtctaactatttttcatgatcaaaatctgaatcattagggtcatcattcttgaaaattggatgatttccagggcatttagtcaagagaggaagtccacataatccatcctcatttccaacatatgaagaagttgaagctttgtaattgagtacttatggggatacttcctgacaaatgattatatgacaagtccaagtatgccaaggaaaatattttggccaacccaataggaatttcaccaacaaaattgttatgtgacaaatctagtgattctagtttgtttaagctcccaatattcaaaggtatggctccactcaaattatttcttgacaagttcaattgagctagctccacaagatctgtcaactccataggaacctctccatccaatctattacttgaaaggttaatcactcttaacaaacccaaaatactttcatattcgtattcctttcctttccaagttacaaatgcctttatgttgtattcttgtaattcactgaaatagccaatctgatagtatattgaaattttgttcatatccaatgaattttgctctccagatatcttgaccatggatgtgaaattatttatacatgatggtatagctccatatatattattatgtgaaatgtctaatatctgaatatattgtagatggcatagacttgatggtattgttccattaaaatgattagattttagttgaagtataaccaaatttgatagtgtattccctatccacattggtatattccctttcaagctgttctctccaacatccaaaaataacaagtgagtgcaatttttcatggatgatggtaatgcttctgacaagttatttttgctcaaatcaagcatttgaatttgataaagagaagcaattgagcttgggatcactccaaacaatctgttgttgcgaaaattgagaaaattcaaattctgtagacgaaaccaacaattcggaaggtttccaaatagttggttattagaaagatcaagaacctccacattcccattaagtactgagttgcaaaacagaagatcaaatcctgtaagagtgttgttagaaagattcagcatagttgcattgaagagggaatttagtgggatatttccatggaatctgttggagcttaaatccacaataggaaaatgattcgattccaatggaatgtttggcaaggtactgtgaatctgattgaaagatatattcaaatatcttaaattggaagttgtattgaaagaccatataggaatggtatcagatattccagaacaagataaatcaatataggaaatatttgattgtgtttgaagccaagaagggaaatgtggacctatcatgcaagatctcaaattgatatgttggagttgatgaaaaggtggaacccaagtgtttggcaatttcatagtcaaagagtttgaagataaatcaaggtgttccaatttggagagtttctcaagatgtgattgagagacaactccactgaaagaattccaagaaatatctaatagctcaagactagaaagcttgcccatactttctggtagtgtgccattaaacttattgcttgacacatctaactctctcaagtttagaatcttagcaaaatctcttggcaatggtccagttagattgttatgagacaaattcaaaatttctaaggagttgttattgcaatcaatgaggcttttcaaggtatcaatgatggtggaattgaattggttgtaagacaaaactaattctttaaggttgcaaagattccccatcgatttcggtatttctcctccgaattgattcaaccgcaagttacaacgccttagagatttcaaattttgaaatgaataatgtggaataatactattactaggagtaacttccacattgaaattattagagtagagagagagatcaacaagattattgctcaaattaagcaa

SEQ ID NO: 25792 - DNA, 2198 bp, Cannabis sativa
gtcacaaggcaattaccttttgaggccttcgtcgacaccctcagcagtaacatcagtatagaaggcatcccatgtacaccaaccaaaccaatcaaggaatgaaggcaactgcaacatcaaaagaaaaggttttgttaggcaaagtaaccatgaattatagtacttgaccggagcaagttattatgtgaagcagaaaaaaatgatgctcttaccttcttcttttcacgatgaagaaaagtttgcatgtgtctctccacagccctgtttaatggaatagtaattaaagaatcgtcatcaataccataaacatacaagcaaagaagttattctacttcaaagagtaaactaaatgacgtatcaaggcataaagcaaacacttacttaacagcttggttgataacttcaaatggattggttccagcatgcatgtaaacgaggtgaagaccttggttggtctcaacagatttgtctcctgcaaaaccaaatcaaacacaaaaaaatagtttgtgtgggttcttctgaactcgaacgttccctatatcttctccaaatgctataaacgccaatattatgattcatttgaaagattggttggagtccttcaatattggccagtgacatgagattgagtaacaaaggaacacagcactaagagtggtactatgtaggcatatatcataagagtagaccaaatatgatgaattgattggccatgattactcaccactctcgaggcatatctcgatctcattcttctcatttccttgcagagcagcacggaactggccttccaacagaggcaagaagactgtgtaaatggttggtccatcaacttgttcacctccttcggtatctttgctttccacaagcatgaattgggtctcaaaaggaatgtccttcccacatgaccccattctttgagtcatccaccataatttgaatcgaaaacaacacatgaaccgaagatccctatcacaataacatagcaaaagcaacttcatttttaacaatgattaacaaaaacaaactatgcaaagcatagttgataacacaacacaaacacaatcatatcttatatactatattaaggaataagtacttactctaaaacgcccatgggaaagacatgaagtgatttgttatcagaagcagtggccccaataaaggccccagtaacaaggccaccatcagatcctggtgtaagcacaatgttgtctggaacacctgtcaatatggtcttgccatgaaccaccagattcccatcgttaatgttgatttttggtgtgaccgtcatctttgagattgattaattgagtacctgaaaatgttcccaaactaaaattttaataccccatgatgtaacatatagagaacaatatttctcagaccaaaattccatggacacgtacacaaatgtagagatatatacttatcataacatcaatcatgcaaagaaattctttattctaacaaccattaaacaataaataaattacaattattttccaattattaactttcttttaccatttttacctaccgatttaagtcaaatctatttttttttttactattttatttctctcaataattgatggtggtaaaaagtaataagaacaagaagtcaaaccgaatggtcagttccgtaagtttcctgttcagtcattagcaaggtgtcttttttgcgtgttataaatatgttgtaattacttttgccaaaagtaaagacttgttattattattatatataaagttatttttcatttttatttgaagcattatttttaggctatccaataaaacggcacagctattttattttatattctttttatctattggccattttatttcaattccaagccaaatttttccttcgaaaaagaaaaatggcaacgaaatttttagggtttttttttttttgaggaaaatattataaatattttaagggctaaaaagtgagaacttattggaacaaaatatggcatggactggaccacactatgaaaagttatgagcccataactgtttggccagacatagagagaggtcttcacatgaagctcatgaagataccagaaaaagattcaaaaaggtcagattcatgactagaaacagctccagcaagcacaatcttcatgattaagaccacagaaaaggactcttttaacgaacaaacttcaccacagcaactttca

SEQ ID NO: 25793 - DNA, 1286 bp, Cannabis sativa
tattgatgaattattaagttgtatggtactttatttaaaaagcatgtcatatggacatgtcttctctctcttttaataaataaataaataaaatataattaagtccattattatatgttcattattccatatgttttttcgagatgtttgagatgtgaatatgaagtttttattgtattgaataatgaaaactgaaaagagggatcataatatgaagaggagtgttaattataattttttagttaatttttatgttgaaaatcacatgttgttgggatattttctttaaaactttttcatagtagtatttgttataattataatatcattcctgtaaattttttaaaaatttcaaatggtttacaataccgaaaatcgagttcctaatatttcagtttaccacatgtttttaaattaacattttttaaagtattttcgacactataaactattcgaagtttttcaaaaatttacaggaataatattactgtaataacgaacactgccatcaaaaaaaaaaaaaaaattaaaaaatattttgacatctattttcaagaacggagattgacttagagattgtaatataagattgaggacattactctctaatatatattaaaacaattacttaattgagtaattattattactatttttttttaattaagattagttcgttcattcataactttgagagtaattatcatatctctcattcatacagatacaagtattataattagtgtttagtacgaatgatctcagtaatattttattatatataatttaaataatggaattatatttaattatatttgaatagtataacaatatttgttagtggttgaattgttgtcttaacaatatttaatgtcttgttctttaccattaatcatactatattggatatttactatatattgagtattattttatgcaaaagtactcctatataaatctaatggttcaaattctgaaatgcttttatatcaaggaattattgcccaacaactttgggtaccacctttaattttatttccttacatgtcctcttctctttttattaacttctaacttttaaatttttggaccttgaattccaagtaaaaaaattatgaggaaaacaacaaatgaaaaagtaaaaaggaaaacatattttccacgttatataataaaagactttttttttaacatataactttttctttttcctttaattttttttttttcatgtctctataactatgaagtataaactatgagtgtagagaaaccaaagcaggaca

SEQ ID NO: 25794 - DNA, 2750 bp, Cannabis sativa
atcttcaagttgttgtttgaggtttactgtttgtgctatgaacattgttagtgttgtcttttttgaggatttcaatctctatttagattattattcagttatacagtataactctgagttctaaattagcaatgtgtcttcttgattttttttttgtttttctcttcttgattctgtgctatataattttaatttattaatgaatctctttacggaacgaaatactaaaattatgtttatttgactctcaacctttaaatgaggagttaattatcaaagaaagtgctgcttgtattttagaatagaattctatttatcgatgttttcaactctattgtagttactgatattttttttgttttttatggagttgtggataatattttgtcttcttctttttttttttttctttcattgttccattttttgtgccactttatttgaaggaaataattcaactttttgaatatgcccacattcataccaaagattttacaaataagacacatgttttcgtatttattgaggccatatactagaaaataagaacaaccgtaatgtataacaaggttgtacaatttcttttccgggaaaaacttacctaaaaaaaccaaatttctcagcatggtgaaaagtttttgcctaaatttttgttgccctatgcaaatgaattcttgacatagtgatttgtcattgtattttttgcttcatatgcgaaagacataataatacatatagctattttgagtttattgaaagtagtagaatttcaaaatgacagatttattggttgagaagtgaagttaggtttcctgaggtatgaatttttgctccaagtatgggcattcaatgaaagtggcttttatacgagttagactatactgaacaattcggtagttgtttatttctttgagaaacctttttatttatgaatgatttgaaccaataacattttactcatttctgttagttttgtatttgttcattttttgtactaattctattgataggaatatagtacaggtacattaatgctaaacactaaggactatgaatattgatcaaattatgataagctttagcatttttaccaaatttatattttatgttggttgtatctgaatttaaaaaaaatggattttatacatatcttttaattagtgtcgcggatatcatatctgatcggggtagaacatggttagaatttgagattaaaacaagaaattgccaattacgtagggaggctctttgacatgttctacctaaattgcgaagaacaaatcggaggaaacatagctttcgagcaccaaaacatgtagaagagagtataaaacattgcagctagactgaaaagggaagaaattaatattaatgatattgtttttttttccttaacatgtaattatattgttttattggtaaacttagttgtgtattccttttgaaaaaatccatatttatgtagttatgcttttgatattggtttatttctcttttccctccttttattcatctacttgttcgttttgtctttttcttttcagttgaggcataggttgtaagaatatcctctgtggatagatattttcacaattgaagatagtatcatatattatggttgagaatagtgttatattaatgacggtttcaattggtttgcttgaattatttcttgtaaatgttgttagttttgggcctacttgtgtctataaagatggaaatgctatatgacaaagtatgtacttcaccttgcttttcatttctcttcatgttttgtgtaatttatgttatttttgagtattttattttttggttgttggtagatctaatttgtatgaattatagatttgttgcagttatataatgaaaagaatgggggatgctacagatagggagacatcctttatttgtagtcgatgctcgccgggtagagttgtgtcgattattagtcagcttagcagtgagcaaaaaactttagttaacgaaattggatttggtaacttattgggtttaaagaaatgtaatttgaagaggaaattgatccagtggttggtagataatttcaatgtagaagatggttgtttaagagtccatggaaaagtgcatgaaatgaatagtcatttattttcatatattactggtattcatgatggtggggaacacttatcggattccaaatctgataattgtaatgatgggcggatattgatctctcacttggaagagaagttgaaatgcaacaacaagactgatatggggtttgtccatcagttcttactttttattgtcagtgtgttcttgatgcctaaaacaacagtttatgcgagtcgggattacgaggctcaaatattagcattgaaggatttagccaatgtgcgaagaattaattgggcttcaatgtcgtttaagtatctcgtgatgggtttgagtgcattcaaaagaagtagttcaaaatatgtttgtggttgcttgtactttttgcaggtaaataaattgtttaatagaataattctttaaattttacttttaatagttattgtagttatttcttattatttcttggttgatattttattttattgtttggataatttgtaggttttctatcttcatcatgtgcgatgcagtgaatcatttgtagacagaagtttatgtccgatttggtggtggtctgattgtgaaactaataatatgattgaatggattgataagaatgggggattaggctcttcgacagtaagttagttgtg

SEQ ID NO: 25795 - DNA, 4091 bp, Cannabis sativa
tgtaaaaatatggtttttttcttagaaataagaaaatcttagaaaaatgtaaaaaaaatattgaaaaaaataacataaggtacctagttattctcttatagtagctaccttctagttactataagggtacctagttactaaaaacccataaatttgtagtttactgaaaaaaaaactataaatattataactgtatatagaattgaatttttcccatgcattatgttcgctctacaatggggtccctaattttcaaagatgctactttttttacatacaaaatagtctttaattttttgaaaaatatcattttatatatacaaaagaaaatcagaaaaataacaaattttatatttgttttcaccctgtcaacctataattgtgaggtcaatagttgaatcaatcgaacagagatgtattaattattgtaaacctaattacattaaattaaatctaaatacaaaaagctaggtagagacctcctacaacagatatttggtttgttaagccactaaggctagcttagtggtgagggagggatgggaaaaaaggagaggtcatgggttcgaacctaggaccttgaagctattaagagattgtaaaataccattacgctacactcaaaaaaaaaaaaaaaagatatttggtttgtcaaaaaaaggaccaaatgatgtgtattttgtttttaaatgagatgggcaattcaatattgaataaagaaccatgtctagtaaaaagaaggtggaccacactcatatttaataaaaccataataccaatttttagtagttttatctgaaaagttacaagtagcacgagcaaggtgcattaatgttatcaagagaaattaagtaaactagtttgacttggttgacaacggtaactaataataagcttttggattggctatttcaattattaaatattattaattactgtcactttttttaatgaagtccaaaataatgcatcttagatagtatatataaatatatatatatatatatctatatatatatttaagtgttttaggaccatatatttaagtgttttaggaccacaaataatttccctaactctctgagcaagaaaacctagtgattttggattcttaacacataattggaagttgatcattatcatcattatgtgactaataatatatatttttttaccaaactaaattaataataatattattattatatggtaaggaataatcaattacaagtgccttttttatgcatgcttctgcagctttatactaaaaaaataatggtatatgagcaagagagacaatgacaaaagtacaccacacaatatacaaataaatcattagaattattttttttggccaagaaagttcatgcattgaaaatagaaataaaacatatgcacactctatatgaatattgtagaatatataattgactaaaaaatgtagaaataataattaaaattatttataatgaatcaatatttaataataaagaaaattataagatatgaattattttcttaccctagcattgaaatggtaccgatctacaccaatccaattatcaagatcataggctgtgtagtgcttgcaacaagcagcaaccttgagcctatttcctgacccggcaccttggagtcccttaacataattaacggcgtactttgcagccaagacggggtcttcaccgggagtttcttggcctcggccccacctagggtcccgaaaaatattcacatttggactccaatatgtcaaaccggcttgtcctccattgtacattgctcttgcttcatctgacactacctgtgaatccaaaataaaataatttaatatttattagagccaaaaaataaaaaattatgttactacgtacgtaaatgtatgtatttttatatggtccataacatattatcatttattgagatttaaaattatacgtaaccccaaaaatgtttcattgcaattattttgaaagcaacaatttgtacaattgtcaattttgtaaggctgaaagagtcattttgggttaatttataaactctaactattgaaaattatatattaatttagaaaaagaggccaactttctagattacttgtcgaaagaaaaagaataattgaaatgaattaattaaaggataagaagaaaaaataatcaaacaaccacctaataacttgttgaaagatgaagatatattcttttgttgtctttttgtagtagttaattttcatgatgacataaaggacttctcatatgtgttaataagtaccattagttatatatatagtcaactttctttttcaatttgatatcatttaaatcatatggaatatattatatatataaatatttagtaagtaattaattaaaatcttaaaatatagtggtgggaccaaaataaagtttttaattaatatattattctcttaatttagtctcaagaaccaaaaattaataaagtttacaatctatatacatgaaaaaaagatattatagattatcttcttaaattaatttcaatcacataataggccatgttatattatatctatatgtaaatatatggccttgttgattgtgactaccagtgataaaggtcttttaataataatataagagaagaaaatacttatcaaattaataacaagaatcttttagttatagtaaaagacaacgtaaaaatgcctttaatctatctttatatagatgtataattaattaataatctaaaaaaaaaaacgaaactagatattgttgcaacttgctacaaccataaatttcttttttatatatatataatctattttactcaaaccaagcataacaacgtaagatatatatgtcaaaaaaacaaaaacaaatctcaatttacttccaaccatatatttaataaataaaaaatatatatttttaaaacgacgtaacaaattgactgagataaataattaaaattctacctatcacacaacccttgccagagttaattaggagagagctcatatatatatataaagctaactcaactgatcatttatatataaattaatatgttttaatatgtcccctcgttttttttaattaaaaaaaaaactatcgttttattatagaatttagtaatttagaaatagcattgcatatttctccaaaaacaaatacataatttagttgtaaaaaaaaaaaatataatccacattttgattatataaataatcaaaattacatcaatgccaaataattgttatatgtaatacccgatactaaacttacataatttaatttaataagtaatatcaaaaaatacttaattaattttttattataagagagagagagaggaggagaaaaagactgtggtgcatgttagccaataaatatttattaatattattattattacaagattagagagagagagagagaattaatattacccgtccgatttgttgccacaaggattgattgaaagaagcagcggtggtgatgacttgagggaaactagtggaaccagggaaggccccaccaaacttaaccccaggaccagtgttggaaaccccatgaagagcctccgaccaccattcgtagccttcaatcccaagcctaggcacagaaattgcgttgttaaccaacagtctgatcttctcagccaatgtcagccgtccgatcaagtctctagctcttacgtggattggtagtctcgtttcacagaatcttagactctttgtgataccctttttggggtcacaagcaaatggttgccgtgcttccactactattatgctactaatacaaaacgacacacaaaatagtaaaacgacaagtgtgtgaccatatttgaggtcgttaatattggtggttttggccataatagctagccagattttttagatggaataatggaacagtgggaagtgctactgctatagtagtaatgagtttgggttttggttttggataaaaatgaaatgagataaaggggtatatatagtgttagaaaatgcatgaaagagaatatatatatatagattattaacaaattaattggatggatgagtatagcgttacaagatggcaatatcatcatatatatat

SEQ ID NO: 25796 - DNA, 2827 bp, Cannabis sativa
atagaattcttttgactgttttatttcaaatttattacttttaattaatatattgttaaagaatgtgtcactttagtagttttttataaggtaaaaagaaaactaaaccttccaaaaaatataggtttcaaaatattgtacgtctcaattttaatttggaaaatacacaacattctaaattcatatataactttttatgttacttcttcaaccataaatttgagttgaatttgttgtgatatttttttaaggggttatttcacaaatatacaaaaataataaaaaatacagttttacggaattttaaatatttttacgattttttaattttatttacaaaaaaatacggttttttttttgttgtacttttgttaatttgttgttgattttttgttatttgtatgttaatttttgttgttgttttgatattatttagattttgtttttaagttacttttatgtaatttttttattgttttcgtattgtttctatggaaaatcataaaaatgtaaaaaaaaattctttaaacataaaaatgtaacttttttacaaaaataggtgccttatataattatctttatttaaacatcagttaaagaaaaaaaaaaagaaaagtaaaaaaaatatcaaacaaatacaaattgtaatatttaggtgatcccttaactatatctgtcctatctatattctaatatgaaaataaaaagattttatgatgacttttttattattaaaatttaatatcttaatcttacttataattttttttatatatatataatatttgtacaactaaactaaaaaaaaattctgtttcagaaaaaaaaaaaaaaattgaaccatatcctaacatatataaataaataagaaaaattaatagcaagctaacctaattctcaatttttttttaggaaactgcccctttaattaatagtcttcttctattactgattgactttaagttttttttacctttctaaattttaacatgaattaaatcaagcccgttcttaaaaaaaaaaccacacccttttaattttataggttgttgaaatttcttttaaagtattgaaattgttaaatttaaaaattttggtctaatttcatttaattttactaatatagtgattgtccatgtactaaactatattcagtgaactttgacatgtaccaaattatactctctgataatttttaaatccaataatctcaatatctatagttctcaaaaacatttaaatgttaaaatttaaagggctaaaatcctaattaaaatggaccaatttgaagaataaaaaaaagtaagagttcatcttgccaaactaagtataatttgaaaacttgctacacaaataagccaatattttattattttgaaatgctataactcaattattatcacaacaaatatataaaacaagaaagtattagtttcattttcctttctcaatttttttttttaatttctaaatatctgaacaagccatatcatagcttatgtaacattgccatcttctttgtccataatacaaataataataataatattattaaaattatgaatttatattatttttttaatgaattaataattataataataataatatgaatagaaaagggtctgtgacagtagctctgtaatggatcgtcttcttcttctttataactattaaccattaaaacacacacacacactctctctctctctctctttcttttcacaaaccaccattcttctctcgagacaagctttcctcgaacccttaaaccaaaaccaaaaacagatacccttttcagttttcagtctttatctcttttttctcaattcatttcaatttacagagttcgaaacaagagagatataaagatagcttttttatcttcttcttctttttcttcttttctatatagtgttctctctctttcactgcatgaaccagattctctcttaaagcttcaaacttcaacagtaatcccatctctcccatgaaatacattaggaccaacagcctcaaaaggcttttctcccttaaacgacgaagttttgaagaagacaagaaaactccaaaccccaatgctcatgaagaagaagaagaagaacacagtgttggaattgattattttcaaagacccatttggaaatgcttcacctttgaagaaatctctgaggccacagatggtttcagctcaggttagcttcttaaagttcttctcttttttttttccttagtgccatttttggtctttttttttttttttgaataaagttgttttctttttcagataatttggtgggtaaaggaggctatgctgaggtatacaaaggagttttaagaaatggagatgaaatagctgtgaaaaggcttacaaaaacagcttcagatgagagaaaagaaaaggaatttttgactgaaattggaaccattggacatgtccaccataaaaatgttttatcactacttggttgttgtattgacaatggtctttacctcattttccaattctcttccataggctcagttgcttctcttctccatggtaccaaccaaagctttaattttctttctgggttttctttcttttctccaatttcataatgggatttttttgttttcttcttaaaggtgagaatttggctcctatggattggaaaacaaggtataagatagccattggtacagccaaaggtctccattatttacacaatggttgtcagagaaggattatacatagagacattaaatcatccaacattcttttgactacagagtttgaaccactggtaaaaaatttctacttcttcatatgaatttcttcttatgt

SEQ ID NO: 25797 - DNA, 2599 bp, Cannabis sativa
ataaaaaattttgaaaaaaaaaaacgtttcctgataaattaaacaagataaattataattattttatttccaaataattttattaaatagcatattacaaatataaattctcattattcttcatttatctcagtatatttttccattaatttattctaatcttaaataatgtgcagtaaacgtcatgaattcaaacaatagaatttcattcattcctataatgattaggatggtaaatattttgatcatatttgatagcgctgatatgaggcacttataaagtgtcgaacacaattatgaaatgtctatcattggttaacaattcttgataatatctgttaaagtaaaacaagtggggtctcgtaattaattatactaatcataatattatacttcataaggatcctagacacaatgtaaaatgctactaacataattctttacacattatagtacataagtgttattcaatacaaacacttagacaacaacgctttaatgtcaaaaaaaatataacttctaactcattaaagtgcatataagccttattcaatactaaaactagcgactatcacaagaaagagatgctaggcataatttcatcaaaatagatttcttatgttagtcgcaattttatactgtgacctatggatttgtttatatgctaggcacaataaagagatgtgaccggaagtttagacaacaacactttaatgttagaaatatatgactcctaactcattggagtacatataaacgttattcaatactataactaacaacaatcaaaaattaacttaatcaaggagaacaaaagtacaagcgtaattcattcccatccatagagtcaaagcttttgctagaaatgttgaagaattacctataccacaaactaaaaatatatcgtaaataaatacataagctaaaaatattttgcaaataaacaaccatagtttacaataaactcaatttaacaatctaaacaaccgattaaaatgaaaataaaaaactatttaaccataaaagagatccctttaattacaatcctaaaatgttgtataacttatattgataaaataatttacatgctaaacattatgttacaatctcaactcctaatttaatttagatagtattttttaacataaaaagatttaaattgaattttaaaatttacaacaaaaataacataattcactaccctacggtacttccacccaccataaatggcacaaaccatccaatattttatgttttctccaaaattaaaattaaataaccaattgaaacatcaataaggaaaagatataaatatattatattatatttaatttaaaattattataacattaaagaataagtaataatagataatttatatatttttagaatttttcttaagtgagaacatcacttttggttacatgtaagcagattttttaaacctttaatttttaatctgatggtaatggtttgttgtagtttatttgtagtttttttatttatttttctctaaaatgatgcatgatattattattattttttaccaactttactgagatgatgatgaacgagatgagttgggactagtgcaactaggttcatgcgaatatggtgataaggccatggttcaggtgaagagaagttgaggatgatgatgagatgagagtgaaggtgggcggagggttttcttagctcaagtcaatttctaggttttgtgatggtgggggaaagaagagaggatgattagggtcttacaatggggtttttggcgaatggaggtggtgaagggtagatggtggtggggttggtcatggttcaggcgaggagaaggtagacacaaggtggcaatggtggttaggacgaaaaaagaagacgatgagaaaatagggttttataagaaaaggaaattcacggtatatgagattgttttggttaggatattatttgagaaattatattttggttttgtttgttttttttttcaaaaatttcatcacagctcgtaaagaatcctaacttacgcctgttatggtaatattttcgcgaaaatccagcaaaaatattactgattgctcttttaacttgtaccacttatgctaaaattttgctagaaaattgctacagcaggcgaacttctccaaatcagcgacatttgttcaagtcgaattttgatgtagtaaaattcaatcaaaaatctagcaaaaaattcaaacctccaaaaaacatccaaaattccaaattattctctaataacccctaaagcaacacacaaaatggagataaaaaatactagtgaagagatccaaagaatttcacatgaagaggcttcaaacaagcactaaaaaaaaggtgctttagaacaatcattactctatgcgattgtttttctcattcccacatcaacgtctttttctgtgaggggttcaagagcagtcgtctgagggtggttttgttttcatttattaatttactaagtttaattccaattaatgtttatatggggttagaattataaggagttcattccttaattaattttaatgctgtgatcgtatttatgtgttgaaactaattatttagtttttccattagtctt

SEQ ID NO: 25798 - DNA, 1220 bp, Cannabis sativa
ttttaatattttatttacaatcttatgacttaaaatttttatttgtaaaaatacatttgtaaaattttaaaattacaaaaactacattttttcaacataaaataagaaaataactaaagaaataacgagaaattaaactcacgataactataaataaattattaaacaaccgaaaataattagaaaaataacctcatgacgactataattataatgaccacatgattaatataaaaattagcagttaattagtaaattatgaaataggaaatagacatttatgaaataattttttaatgattagattttattgaattcttggtgtgctaaatatgttatatataaaatttgattttatattttttgttcggcagtactaaaactcgataaattggccaaaaatgtcacattggtatagattgatattctagaggtatgaggaattattatggatagttggtaattatgaggttataaggggtgcttggttaatgaccattttacctttaatttaatgtttgttagtagctaagttaagggtaaaataataattttaccaaaatgattactcttagttgataaataatgattttatttttcattttcaagatagtattatgtagaaaattttcctttttaacaaaaaaaaaaaaaaacaaacaaagttaatgagataaatacataattaaagaaagagttagataaacacaaggaatagactctctctattgttccttttttcggccagaacaagaacccaacggaaactagttttttcttccgttcctcaagagttcttgcccatcaaagccaagtgaatcctacaagttctaggcatgtatttacgctttattctttgtttttggtgaaaacattttagtttctatgcaagttttggaggaataggttctggttgtttgatgagggtggagattgagagttgaattagttgcatgttttaagaggtgttttcagtttgtattgtatgtagttgagcagctatagctgttgaagccaagcttaagttttgaaaactcaaagcttgatcttcaatggtattttttaattcttgatgcaattatagattctgagctatcttatatgtttagaatatgtcatagggctgttctaaacaatttggaatgatttggttcaggtttggggtagtttgaaatagagaaaaattgagttttcttgttctctggtgcaattcgggctac

SEQ ID NO: 25799 - DNA, 2420 bp, Cannabis sativa
atgttctataaaattatttttattttttttttaattttttaattaagaatctaaattttaaaaatacaaaaaatcacttttaattttttttaagaacaagatatatgggaaaattataagatgttacttttttatggcataaataaataatattatgaggttatggatattttgatttttttttacatttatatgagattttttatgtcatattttttgtgaaaaaatgtaaattttatatttttaaggttaattaggatttttgcctcttgaattttgacatgtatcaaatcatctcctgaactttcaaggtcattaaaaatatctcctgaactattaagattgttggatttaaggacttctgttaactgttagttgtaagagtagtttttagcttgtataaatatttatataaatcatcatctcactatagaatctaccctttcagtttcaattcttttctcaatgtttaagaactcataattaacaacctagaaactcaattaatttgatttcgctctaaaaaaagattttgctctattattgattgttttgttaggggtagtggttatagttacattcattctgtgtgtgctgataggaggagggcacatcctacactgattgactatattgccaatgacaatcaacaagtgtaatttgagcaataaaagtaaatataactttaatttcttatacctataatttaatatttttaatatacaaaaatattattaacttgtaatgggtttgtttgtttgttatttggattgtatagcttttctcatataatttgactggttattgttaatttttatctttcttttaatatataaatttttatatttaatatttttttattactgactaagaagtaagcatataatcagggttgtctcaatctttaagagagcttagggcaaactttttaaatggggcataaaaatactttaaacaattaaatatatatatacatatataatgggcacctataaatatgtattaaaataaataagacaaaaagtattaaattgaactattttttttaagatacaccttttggacctaatcagacctctttgggctgggaaatagtgactcttgttgccccactcttcagctggcagcataatggaaagagccttacaaaaaaaaaaaagaagcataatggagagagagagagattgagaaaaaaatggcgaaatgaagagaagcatataagatttcttaaatgctccatcattgatgagtaaaatttaattttttaatagttagtagtattagtccaagaaaagagaccactattctaaattatgctttattaattaattttatgtaccaaataagtaaattgatctattccctttagtacaacttaatggttttcctatattgttatgacaattaatttttctattaactattagttgttagagtagttttcggcttgtataaatattttatataaatcatcatctcactatggaatctactcctttagtttgaattcttctctcaatgtctaaaaatttttaattaacaacttagaaactcagtttaatttgaattttatgtatttttaaatataaatttaattataattatttttgtgacatattttgaaatggacttaaacggtaatacctcgtggatttgtgagggtccttttaaaaagagttttcttaatttattattgactattttgttagcggtaatagttatagttacaggcatcttgtgtgttgatagttatttgccacacgtacaaatctaaccctatgaatagcaggagggtacatcctgcaccggttgacgatattgccaatgacaatcaccaagtgtaatctttaatcaatatattaaagttatgaaatctttaatcaatagttgttagtataggtcactaatgcccgttcttcggtgcaaataatgttggtttggattacggatgtaataagacatcgaagtgaatgtactatatataatagagattatatatgatgaggaccaatatgaataaagttgtctttatcaacatgctgtttatcataaagacatgattcatatcataacgatgatcaatagtagatcgacctaaatcatgagttatcatgaactcttgttcatgttattagtttctttgattcactcattaaggtttctcagagaatatgattattacaacttctctttagggaatctaataacatggatgactgggggcatgatgtacaattatagaatcctaacttttctaacggatcgaatgttggttctctttaagtgttaattctggaactgaaatattgtgcacaaattcagatgggatcttgaattatacttctactagtgaattaatggacctaaaggtaaagaaataattagaaaaggtaaattggtattttggccaaaataattac

SEQ ID NO: 25800 - DNA, 3349 bp, Cannabis sativa
ttggttgttcttcgtatgagaaatttggttgtagctcaagattctcataactctgatcatgagtgggatctgaaacgtatttccgtaacataaaaacattaaatacgttatgaaatgctgaaagtgctggaggcaaggctagacggtaagctaccaatctaaactttttgaggatctcaaaaggctctgtaaatctagggcaaaacttgcactttttcctgaaaattttaattccattcatcagagacactcgtaagaatacatgatctcctacctgaaattctacatttttgcgttttggatcagcataagtcttttgcctactctaagaggcaaacattctggccttgatcttttctatagcttcattggtccgttgtactgattctgaatctaaatatttaatttttagtagatattttgggtatatcaaagttccactttgaaaaattagaagcaataattttattggtgttcttgttatataaaaatgtgtgtgctcaaaatcctcaaaggacctctttggtacacaaaaaaacaagggagccaattggctccaataaaggagttgaatgcttctactactcaccaaaggagctaaaatgcactaaggggagctgaatggcaccaaaggagtcgaatggctccattagctcctcaaataaaagcaaaagagttgtttggtcaaaaaggacccaattagcatgattagttttcgaaaaaaaaaaaaaaacaaacttaatgtaatcaactgtatatatttttatttatataacatatgtattaaagggtttgttttacttttatttttattttatttcttaaatcttaaatagccacaaattttttccaaggtgcttaaaaatattggtagtcttctacatatttattctcggtagtaccaatatttgcgggtatggagtcccaaagtgcgggaattatttttctacaagtctatcataatattataaaattatgataaacttgggtgcaaatattatccctataaaatccaagataattgcgcatgaatttttgttccagatatggaagtccaaccaaaggagcattttggcccattgcactccttccaatggagcactttggcacaaagggagcactttggcacatatggagcactttggtgaaagggagcactttggcacaaagggagcactttggcacaaatggagcactttggcacaaatggaacactttggcagaaagggagcactttggctgaaatggagcactttgacacaaatagagcccattgacacattgcacctcctaccaatggagcactttgggtgtactaagctctcggctccgtcagttgctaaggcacaaagagctcctctaccaaattaactaaaggatctaattggcacaaaccgacccgattggctcccctcgtctttccatgaccatctgggtccgctaaatgcgaaagacacgtgctcttaaaggtattccaaaaatatagtcaaaaaatgataagtgaagagatatttattctttgaatgattattttattattattttgtatcttaaacctaattcaactatagttatgggaaggtgtacctatgattaaggattttaaatcctagatgaaaatctatataaggggagtgaatcacttgtaaagagacattgaagttgatactcacgaaccatactcttgagctcccattcttaaattccaaaaactcacttgaggattgaactcttggagaacataagtctaaagaactctcctcaagcattgagatcaataacactccaagtggactagcttattaccgctgaaaggggtgaaccgctataaaattctcgtgtttgtctttgttaaatttatttttacaaaccgatttactttgattaactattgcttgtgttcaccttgctcgttttacaatcttcttagatccattaatgaaaaaccgcgttaacatgcacattatgaacccacttgatctagagattttcttttttcaaagttaacgcccaaacaaatttccaaattgcagcaggattccaactaataatgtccttgaataccaatacacctgctgattttggagtacaaagtttgctccaagcaacttttcctataccaatcgactctgcctctcctttccacaaaaagctcctacaaatagcatttatcatctagagaatcttctttggcagaatcataatttgggaccaataaatatgaattgcaatcaacacataattaacgaatgtggctctcccagcaaaagagagattcctagagctccataatcgcactcgttgtatcatcttctcagttagactttcacaatccagtttcgaaagtctcttggagaaaattggaacaccaaggtatttaaaaggcataacaccttttgaataccctgaagcttcgatcacccttagttcctcatacctatccatgccacaataatatatcgataacttagcttcattaggaaatagtcttgaggtcttagaaaagagctttaaaccttggagcaaaatatatatcgatttaaagttaccatgacaaaacatgagtacatcgtcagaaaagcataagtgattaagagcaagacttttgcacctgtaatgaaatttgaaatcctctttttccccaattttcttcaaaattcgagataaatattccctcccaagcacaagcagtaagggagacatgtggtaaccttgtctcaagcctctttttgcttcaaaataaccctgcatggtaccattaagcatcaaggagaagcggggcttttgtgcagaaaatcaagaacaacattacacacttcctcacctactgtctctcaattatcttgaaaaaagtaacttacttaaccatctgaacctggagcatttgtgccctaaatgtcaaaaactattttttttcacttcatcttttgtgtatgttactaaaaggaagtcagtttgggaagaaaatatggttggaccctattccacaattacttgatcactttaattttttataatattttattcattaataataacaacaaacataaaattaaattaaaaaataattataaaaattaaaaatatctaaattactgcacaaaaataaatatttaaaaccactatataaagagcgaccataatacctaatttaatataagagagatatattacaaacatttttatgattttgtttattaatttagtgataatttagactcaagtcatcatttaaaatataattgtatagttgtatatatattttgaaatacatacatatatagactagatagatgttacgtgtcaagttacgtatgttaattttactttagtttttaattttttttaa

SEQ ID NO: 25801 - DNA, 3087 bp, Cannabis sativa
tgtagaatcaccctataatatataatatatatatatatatttatataaatgtatgaaaaaagtgtgaaagaaagaaacaaagatattaagagtatgagcattgctatattatatatgatgcctaactggctataaggtgttttgctctaaaacaacaaaaaaaagacaattttttataatcacttaatattattaaagtaaaataactgaaatgatattaaattataccaataattgaaatgatattaaatgatattaaattttttatagtcaaataaattaataggcaccaaattaatatggatgttaaaaaaaaaaaagtaatagtatccaatactatttatatactttatgatagtgtatagtatagctcacaataccaatacttagtaataataatccacaataatacataaaaaaaaaaatccgaaatgtggtaaaaattggatatactcaatcactcatagattgcttccccattaaattttactaggtatagttatgcctgtcatcaaatagtaattaattgtccaaattatatatttaagagaattgctaaaaggtattattggtaccgaacactcttctcagtgtcataccgacgcttagtattgtgtcccatataattgaagaaaatagcttttatttatgatatttctttaaattttgtcaaacggtctacaaacaaagtaactcatttcttagcaagaactactggtgctatttttgatcgtgtttattgagtgaataatgctccttcggagttcatttctgtaatgatgaacaatttattgctttattgaagtttttttcttcttgtcaaaaaaaaaaaaaaaatagtttttcgaaaatattgctaactaatcgtgatacgccacctatagaaagtgttggacaccactagttctcaataataatgctcaataattaaatatacgtcatccgtatctagctattaatgaagtttatatgattagttaatgagttagttggccagtacgagtatattctaccacacacacaaatatttattatttttgtaggaacatggaacatgcatatatatatatataatatatatgactcgtacataattaattatatctttgtcaatttatgatatctatcgactcacacttgaaaaagttgttactttttcagtcacaatatatataaattttttgtgaacttttagtcacaacaaaaaattatttgtgactaacagatagtatttaaatacaagtttgtcactaatttagttttagtcacaacaattattgtgactaaaaatatatttagtcacaagaaattgtaatttttgtgactaatacttttagccatggacttttagtaacaacataagaatataatttataattagtcagaaaatttttacttttaatcacatgttttatattgtgagtaaaaaatagaattttttatagtgtcatctccatcatacgtgtccatacctagctattaataaagtttatatgtttaattaatgagttggttggccagtacgagtactattctaccacacacacagatctttattatttttgtaggaacataaaatatatatatatatatatatatatgactcgatcgtacataatttatatctttgtcaattcatatcgatatctatcgactcatcaccatccctttctttcttatattctacttaagcaacttttttcttgctataatacaacgttattcaaaggaaaaactataggtaaatatactatacatataaatatatatatatatatatatttgcaaatcattctatagtaataacatatatgcttttgttaatttttcacattattgtgatgttgttattatgtatagattttgtcatatcatatatgttgtataattattattttcgttatctatcaactaaaccaaatcttaacatagatagataaataattaattcttctcaatatataagatttgacttatatatatatatatttgctcaaaaagaaaagtaaaattaatattgaaaataatttatttttaaaatataagttaacaaatttagaattatatatgataaaaataatattgaataatgatgcatgcatgatcgatcggatatatttagaaacaaatctatatatatatatatacacacatgacatcatatataatataatataatgattagtttactataccaatcaatttttatgtcaagctatgtttgatctcatgatatgtagatttgagagagagagagagatagttaattagggcaagctatgtggaagttgaagatagccgagggagagccatggcttaaaacggtaaataatcacgttgggagacaatgttgggaattcgatcccgatgccggcacaccacaagaacttgctcaaatcgaacactttcgtcaacaattcaacaaaaatcgattttgcaaacgacaaagctccgatctacttatgagaatgcaggtatatatatgtaattaggtagagagtctcacactgctaatatactgctaatatatgtaataccatgtatactcaccttatatactatagtacattaattcttagcaattattgagttgcagcttataaaggagagtaatactactagtagtagtaattgtttggagagatcaatggaaattaatattgaagaaagtaatgatattgataatgttaagatgagagaagaaggagttttagtgaagaacacattaagaaaggctcttacttacttttcgtcaattcaagcccatgatggccattggcctgctgaatgtgctgctggattagtctttcttcctccactggtaattaaacaatttactatatatcatggttccattaaatatcaattaattaattgactttattacacattaaattgttataaatttctcaaaaatttacaaaacctatcttaaataattatcactacaacaaaaaagagttttatatatgacgtgcactgtcatataaaagaaataagattaaaactagttgaatatcaaaaacactatcgatacattcatattaagcggtgcactaagtttctctatatatgtatatatatata

SEQ ID NO: 25802 - DNA, 1499 bp, Cannabis sativa
  modified_base (74)..(75): a, c, t, g, unknown or other
aactaagcgggctttacaacataagtgtcattttagaaccgtcgccaaaaacacttgttgcgtcggttaaaganngacgcatagcttgttgtgtcacttcaaaactgatgcaaaatgctttagttattttttttgtgttttgcgtccgttgtaaaatgacgaaaatagttttttgtgtcattttataaacgacgcaaataaattacattttccgtctacggctgatacatcgattttttaaactgacacaaaatatttattagtcacttgaaaactggcgaaaatacccttttttgtagtagtgggaggcccactaaagtactcgacctattaactagtccatgcaaatgaacaagagatgactactcatctcctgaatagacacggattcaaacaacatgtctgagaatgatatggatctaccaagctcccgaaagtatagttcaactctaattaaattccaaggataaagtaatgttgggaacccaagatggatacccccaagggtcatctaggagtagtagctgaaagagttatccacaatggtctaaccttctagatattgcctacgtggcatgcctctaacataatccttgaggaatttaatgacttgtacctttgttagattccagaaaggctcgtggctaaaggatggttgccttttgtgcattgcacccacaatctgacattctctttccccataaaaatgacacaccagttgtcattatcaataataccatgcaccgtacaacatattaattgggccctacctacccaactcaatagcttaaaaaagcacaaattcaatgtattttatcctattagcgggctttattaaaaataaaaccttatttgatgagtctatatttgtctcctaaatatgactaatttatgtattaatattcttaaattaattctttaaattattgattagtgtgattataatttattaggctatttgaaagattaatcatacatttagagtcatttggagggatgttagcacattttggtggaaaatagtgtaagtcggcaagctcggttttataaggcgaaacttaagtacaaattttgacaaccttagaagcaaaattagacttggagctcaacataaaagttgtagatctcgttctcggcttttcggaatatcttaaatagtccaattccaagttttcttgaagaagttatgaccaaaatactaatcacgtgacaaattttttcgacaggaagtcgtggccgtgatgaggatggtgattttttgggaaaaattcgaatttaatatatttttagtgagatatttttaagggttttaattaggacttctagggtacgaatttcagcacttttgaactacaaaattgaaagaaaaactcagagagagagcaagatgaagatagagattgtagctttaagtgttctacatcatagttctttttcttctccttaaacttttactatttattatgattttgattataatgtctagtttcgagtagttt

SEQ ID NO: 25803 - DNA, 2459 bp, Cannabis sativa
attctacttatttatttttctttgccttaattcttatggcttttgtattatcagggaatttttattttagtatttaaacaaattatcacaacagtaaatgaattattttattttttttaagaaacagctttaatattaaacagtaacattagaatttagacctttgggtcattaaaaaaaattccaaagtatttcgtttacatttaatgggtaagtcacttaaccacattatgagttacattattgcaaatctaaataacattaaaaaaaaaaatacatcttacaaatcaagaaaaaaaatacttaaacagtgacttgagtagtttgtaatttctcatctaatctctactacattgagagagttgataaatatcatcttaattttattttaattttttttcaaataatttacgagtttaaaataattaatttggtaactatacacatatataaaaacatactaataactatttaattttatattttatcaaatttattaattttataaaagcatactaataaataattaaactatttatttttattttttacattctaataattttttaaaattttccgaaaactaaaaaagtctcctgtaattatttatttgccaaatatatatatcacgttgacatttctcaacaataatattctttttctcttacatttgcatacgtactaagtaccaaccccataagccgacttccacgtgtttagcactgatcatatcaaatctcttgtaccaacagtctgcatatctatattattaaacattttaattttttagtttaatttggtacaataaattatttaaattttatgtttgatgtcttaattatttttttttttgaattttttaaattttataattttttttaaatatttacaatatacacgaatatttaaaaaattctaaactaatttttctttttgtcaaatacctattggattgttcctctatatataattagtttgctactataaaaaggaatacaatccgcatttcaaaaataacagctggaacatttttcgaaaaatatatattggacacacattataataaataagcaaagactttatttattataatatcatttcatatagtttttgaaaagtaataaaaagtaaaaaaattattggacgagtctaacgtgacatgatttaatattatttataagggaaaaaagcagccatacattattatcactattttttttttttttttttttatgttttttaatatatgggttttacaagaaagtacatcaatcaatttctttctttctttttttctttttttgtaagcatgtgtctatcaattttaagttgaatggtatgtaaatatcattggaccttttctttaaaaagagtttctcacgcaaaagataccccaccaatacatgtatattttcttaattaatattatataaggaaaaaataaaaataataactaaggtgtccaattattatgttcaaagccataactggcatgtataaattatgaattaattgatcattgtgtccaagtaaacctaggtgtattagaatgaataagattacacacataactaaatttatcattataatataacgtctacataatagattgagatgattttggaacaaataaaaaatacaacaaaaatggcaaactcattcattccatagacgactcccttacgtagaaacaaacaaattagtacgtgtatggtatatcacccatttttcgtaataattcaattagagctttacttaacaaaaagtaaaagtacttatgtaagtctaatacattacaaaaatactacaatatttttttttaaaatttgtttattccagtgtttgttatgcttacaacactgtctctgtaaatttttgaaaatttttaaataatttactatacaaaaaatattttcagtagcgtaaactattcgaaaattgttaaaaatttaaaggaataatattgtaccttaacgaataccgttataaaaacaaattgaaaaaagtattccggcgtgatttcaggcttgaaagttgactacaatattataataagatattataattaacactcctcataacacaatataatattagagcttagctacctaaaccgtacatcattactttcgttgttaattaaaaaattagatttaattattattgaacgaactatacgtttagtctaagctttcgaaaaattgtttattaaaaattcttttaaaaaaatccaataaatacgcaaaattgacatctcgagtgaagtctaccaaatctagctgcgtgagagacgagaatactttctgtccaaaatgtgccgaaattaggaaaagaagaaacaatgtataaatgtataaatatattttgtatttgatgaaaaaaaaccccaaacacttaattatttgtcaatacttacaattcgaaactaaacaaactaataatcccaaaagaaataataa

SEQ ID NO: 25804 - DNA, 2511 bp, Cannabis sativa
ttttaggaaaaaatgacatattctgccaatattgaatagtttaggtttagaaaaaaaaaattggtccaataaatgcataattagtcaaatttctcaatatttttttggatctctaggcaagatgagctctaggcacaggcttaacccgtctatgcacatgacttagcctgcacaaatatcaactaaatacataatgttgccatttttattatctattaggttatattattatattttatgggatattatgtagggtaacctctagcactagtctaaatgtaatttaatgaaaatattatgtgaaaagaaaaaaaagagtgatgcttgcaacttaagaaatcgaaatcatacactaatatgcatgcatgcatgcatagcatctcgattttgtggctgaataattcagtaatcagttagaacaaaagtggtgcccctattgtattgtgttgattctctaattataaattactatcaaaagatctttagattcattggaagaaaataaagaaaactacttatgaaaaaaaattaggaaagagataggacatcaccttggttttcttcatcgacttgtttttgtgcatcagttattttttctgtctctgttattgaaattaatttagtcagctatctttttattaatttaaaactagctataatgtcattatcttttttatttttatgtaatggtataaaaaatgtataaaatatttattaaaaaaaaataattcgttgttcaaatatatatatttgtatgagatatatatatatgattatgagcaatgcatttgaaatgttatttgcatatgaaatgttattcatggtaaaaaaatcatgatatattttcatgatgtacttaaaaaaataagaagtttttcctatttttggattatgtgttttaatcaatcagagttgtatatttatatttcttaataatatttcatttaaggcccatattttgtatgaaattatcatgtataacaacttggattttttaaaaattctattttgtaactaaatatatacggtaaaaataaagtattaatacttgagatcaacattaagtactttgagtattaattaaatatattattactttttaattaatttattaattcatctacaaattcaagggtgtgtttggtgttatgtttgaaaatatattgacttaaaaattaattttagttttttttagagatcatataattttaatttcttattataatctttcccaaataataataataatttattgtacataccaatctttacaagctttcgtagaaaattaaaacaggtgaaggtggtgttgtttgctggattttgatccttctgcttttccactttaatacctagaatccacaatcaaaattcttgggaaaattaattaattaattaattaatatttttttatgggtggattttaatataattcaaactttggatcttcttattaatgatcacatctaaaattctccaaaagtaattttaataattttaaaaaaaaaaattacaagagctagaaagcgataagtgagacaggtattacagaaagtaaaaagataaaaaaaaatgagaagaaagaaaaagtaaagcaaaaaaataataaatgaaatgatgaaagaaaaaaaaaaagtaacaagagagctaaaaagcaactattcagacaattaagaaagaatatgagaagaaacaaagagtaatatgaaaaaaaaatatgtgagaaaaaaaaacaaacaaaaaacaattttgaaaaatatgaaaataaactttttgttaccctaaaatatgaaaagagtaattatttttaatgttatatatatatagacatttataaaataatgatagtgatatattggcttaatttaacctaatataattagatcttctttttatagacaaatttagaatttacaatcccaagtaattaagatcggtttgctcaccattgtgatctcctcctctagggctctttgtatgggaattaaaaacagtcactgcaaattagtgaaacttaattaaaatctacattactaagctagttgaaatctagacaaattatacataatttagtttatacatacctatttttacaagcttccatagataatgaaaaaatgtgaacaaaacagtgtagttttgtggatactttatctcatcgcggggaattcttgatggtgtttcatctggctttgcgtttttctttaggtttttcacgtcaatacctaattatcacgccaaaaaatattgagaattttttttcttttttgacattggagtaagtgaggattcgaatttagaatcttcttcattaagaaaagatagtgtcaaactattaggttatatgctattatatgagtatatcaaaaaaaaaaaaatggaaaaattaattatgtatgtatatgaattttattttattattttttttgaaacacatatataaatataaattattaagataaataagaaaaatttacactcaatatgagtttaattattttttatttaggg

SEQ ID NO: 25805 - DNA, 2663 bp, Cannabis sativa
gaaaacaccaaacaacaaggttcactgttgcaacaggggtgcaacctcccccacagaaaacacacaacaaacattcaaagaggcgcctgagttgcaaggcgatgagccaccccatttgctgtgtgagggatctaatgaacaccaaacaacccctcgataaaaaaaccaaaaaatagagaaaggaacaaattagacagcttccaattaggcaccatcctcttcaaaactacattaacaaggacctagcaattcgagaaaacacaacatttgcccaaccacgaccagcacaaaaagaaacaacatggtgaagggccagagccttagcttcaaggtgagtagtcacatgggccttagtcgtgaaagcatcaatcaaaacctcctcactgttaaacaccaccacagcaaaaaaaccaatctctccatggacagtggcatcacagaacacattaaactcacaagtagagaaatcaacaccaggaggggggcattgacatgaacggggccagaggcagccaatgcagaagataattcggcctcactagccaaacaagaaacttgatgtagcaaagctgaaggacaggctggagtcccctcatggaaggccttatttcgggcctaccacaaaaccacacacaaaccagtagcaaaatgtaaaaactgccagaaattgaaggagagagtatgattagagatacctggatcaaaaaaccaatttaccagatcaaggggggaactaatggatagcataccacttcgaataccccaattgctacccaaataacgctgttgagccaccaagcaatgcaaaaaaagatgcagcaaagagtcctcatcagcaccacataaaacatagtagagggaagaccccaagacctcctaaagtctttgtccacatgggaggatgttacgagcaactttccataggaaaaatttagttcgatgatgaacaaaggccctccaaatcttcttccaaatcttaattgaggacggaagtctcaacttgatcaacacacgatatgccaatttaatcaaaaacctcccatcaagagaatctctccagaccaagacatcactagataagtcctccaaaaatctaaaattacccaatctattagccacctcagggacgaaccaactacacagggtatcaccacgcaaaaccccattggaatcaaggagagacctgagagtaactttctgaggatctcgaattcttggattgaaggcatccacataatcatcccaagatagcctagggatccagggtgagcaccacaaatcaatgtcccccccattactaaccaaccagcagctctctttacggataatggcccgacaagaaaagataccctgagccaaaagagaagctggagaaggacttgagaaattccaaaaattatcaccccttttgcaatatttagcccggaataccttacaccaaagggcagagtttcgactggccaaactccaagccagtttagagataagggcaaggtttaagtcataaagcttcttgatacctaaaccactacaaacctttggcaaacagatagagtcccaattttccaaacaaggaacctatttttctttgcggatctgacccataagaatttacaagccaatttatccaggccaaacaaatagtcttgggaagtgagaacgttgacatagtatatagcggggtactcgagataacaaaattcagcaaggtagtctgacccgcttgagatagaagcttactacgccaaccttgaagacgtcttttaacccaatccaccatgaactggaaatcatctagtttacttcgagagaaaaggagaaggctgcatagattacaatctttcggggataaccgcctataccccaactggttagagatctcatcaacagtcatacaatacttatcaacaatcatgactggacatttttagaaaaaaccaaggccgatttggccacattaatcacttggccagaccacatacaatacttatcaaggcaatcttggacccagtccacttcctcattgttggccctacaaaagacaaaggtgtcatccgcatacattaaatgagagatagcggggcattgaagataaaccttgtatccatgtattaacccctcagcatccgctgtgaaaagcaaacaagaaaagactttgcttcccaagataaaaagatagggcaagagagggtcaccctacctcaaaccccgagaaggcaaaaactgttttaggggtctgccattgagcaagatagaaaaactcactgaggacacacaccaagcaaccaacttacaaaactttaaattaaaaattgaaggcttccatcacacgatctaagaaaccccattccatgcaatcataggccttggacatatttaacttcatgcccataaaccccacaccagagcatttcttattaaaagaatgcataatttcctgtgcaatcaagctattctcagcaatctaacgacctggcataaaagcagtcttttattcttaataatgaccaccctaatagtggctgctaagagtaggacttataaagtatgaaacaatggtataagatcatgaaatcggaatgaccttgactctcgcctaaacaggacaacgtcaaattctcttttcgatcgaataaaaggttgctagaatagtatccatttta

SEQ ID NO: 25806 - DNA, 1841 bp, Cannabis sativa
tagccttgcaatacaagaaactatcatccgcaaaaagcaagtgtgatacaataggagcgccattagccactctgcacccatgtaaaaactttctttcctcatagtgttgaattggagccgacaacccctccgcacaaataaggaaaagatatggtgaaattgggtcaccttgacgaagtcctcgacttggaagaatcggacccatagtataaccactactaacgatatgatattggaccgaacaaaggcttccatatattagccgaacccatttgtcacaaaaacccaatctagataacattgctgtcaagaaatgccaatccactttatcatatgccttgctaagatccagctttagtgccatacaaccttctttcccaacctgctttcgtttgaggtaatgaagcacctcaaatgagaccataatattatccgtaatcaaccttccaggaataaacgcactctgatttaaagagataatacgagagagtaaaccttttagcctattagccaaaactttagtgatgactttcgcaacaacattgcatagggaaataggtcttaactcactcatttgatctggttttttattttttggaattagcacaatattagtatcattcaatccttctggcatcccctcattcgtgaaaaaatctttaacacaagcaatgacatccggaccaacgatgtgccaatatttttgaaaaaacttcgggttcattccatctggtcccggtgatttatccgggtgcatctgaaacaaagcatctttaacctcttggtcttcaattgggcggattaagattgcattttcatcatcagtaactctggggctgacacaacttagaacttcactacaatttccaggttcagcagtaaagatttttgaaaaatagtcaagcataagctcccccaaaccggtgtcccagtacttaggagtccccatttcatctttaagacaaacaatattattattacgtctacgagatgaagcctttgaatgaaagaacttactattttgatcgccattttttagccacaactgcttcgaacgttgtcgccaaaatatttcccgctggtttagagtttcaaacagcatctgtttagcatccgaatacagctttttcccttcactgtcacgccttcctttaaacactttcagttctttgttgcaatgtttgattcttgcagagaaattatcagcaatactagttccccacgtctgcaaattctggccacagaactgaattttctgctgcaaaaaagtcatgcccgagttgcaccagctctgccgaataacttcctcacactcttggaatcgagtccagtgattttcaaaacgaaattgcttcttcccagcaacttgaatatgaggcattatatccaaaaataaaggagtatggtctgaaggagacacttccaaattaaataacttcgcatcagaaaaaatggtaagccatgtgaaattgaccatagcccgatcaagtcttgcttccatccaagccgaggtatctctccccttctcccaagtgaaactatgaccatgcatgtctaaatcacacaaaccacaatgtcgaacaacctcttgaaacccgtccaaaagcaaacttggataaggcttaccccctcttttttccttattatgcaagatattgttaaaatcacccataatgcaccaagcttcttgataccttgcatgaagagtacgtaacaattcccatgtgttttcccttagccttcggttgggctcaccatagaagcctgtaaaccgaaacttcctatacccctcaaaatggacaaaacagtcaatatgattcatggagaaagagtcaataacc

SEQ ID NO: 25807 - DNA, 1620 bp, Cannabis sativa
  modified_base (37)..(45): a, c, t, g, unknown or other
ttaattaatcacgtttttcataaacctcgttgattannnnnnnnntgcacagcatgtttaaaaatcacgcaatacgcctatgctagttagggtgttacaattattgaccatatttttagttaattaaatgacaatgaaagtttttgatatttaataaaaaaaaaaaaaaaaggataaacgacacaaagtatttgtagatgtttgatcccaactttaataataacctactctcattacttgatatttcttgtagatatatcaagatcataagaactcggttaagtgagtttcttgatattctttttgaaagaattatagtagtagctttgtagtgcaatagctgtttggaaagtcaagaattcgatcctcaaaacagtgaatatgatccactatttatagggttaaaagtaaataaataatattaattacaagatattcaataactgttatttactccctcaatctcttaattgtagggaaccattatgacatattcttcatgtatctaaaagattgattttgtggattttgaatacactcggtcaagcctaactgatcggtaggccgactagggtattgccctgtgaatacttagcaacaaattcttgtcgaatcatgctagttagaagccactggtcagataaaatgattagtcgagcaacatgatcacatgatatggttgagaactgggattagggtcattaccttaaagtgagcggttatatggcctagggttattactctagtgattaaatgattttgaatatcatgccatgctatatatgttgaaacaaaaaattatgcgttcaaggtataattaatttagactcgataaattagtaccctaagtttagtaataatatggtctagggttattaccctagaatatatgaggataagaaaatattagtgtactgtaatatataatattgctaatcaaatgaaagcatgaattaggattattttcctcctcaatatgtattattttgagcatgctataatttgttgtatgagtaatcgattagtatgcaagttagggttattatcctaaaacttcatatattagagtatatattgaaggtgttgaatgtacgcatatatgtcaagagttatgtgtataagacataactgggttacacttggtaaacattatcaggataaaccactgaaagaacataatgtatggattatgtatatatgagtagggttatgcgggtaaggcataatcaggttagactcgataactataatcgagacaaaccctagtaaggccttaatgtaaaatagaagtgtgtgtgtaacacgtgggtctatgctatatagacattaatagacgtgtgagcgtaacacgtgagtctatgttatataaacattaatagacgtgtgagcgtaacacgtgggtctatgctatatagacattaatagacgtgtgggcgtaacacgtggatctatgccatatagacataaataggtaggtgagcgtaacacgcaggtcaaatagacagtaagtgcggtgacatcattaattatgtgatatttgtttattgtgtatattgatatttttttactatcttgttgggctttgctcacgggtgctctactgttggaaattattttacc

SEQ ID NO: 25808 - DNA, 3029 bp, Cannabis sativa
agtcaatgaagcattatttttagtctcctattaatagaacacaattttaaacatgatggccttcaaagttggagatacaaagtcatccagagttctagatacttataattttcgtaacctctttttcaaaaccttgtccttctaaacctacaactattgaggtgaaaggaaactcttaacagatttctagatagatcctattctagaactcaaacccttatcattagtaggaaaacacaggcccaactactcaacgctcctaaaagtatttcaaacaataattttgatgtgttgcaagtaaagtttcaagtgcacaaacctgaggagcagcttcaaacactcgaaactgcttattaagattttcatccagttcaagaatcgcagctacattaccacacctacaagatacacatgctacaaatgaaattttgaacctgggaacactggaacaaatttaaaaattaatgacttacctgtaacagtaatttggagctgaccacactgtcactatctggctattgaacatccatttatatccttccataaccaactgatgagcacgacatatataatcaatattatttgtgtggttaaatgaagtaacgacactgccaccaaagaggaaaccagcaccacgaggactcaaaccccaaccatcgacaatatcttcgggatctgaccataacaggtcacacattgcaccatcatgaggtacttcttgctttcgatcgattatgcgtatctgtcacaccagaacaggtcaataataatatatgataattgtaaagagaaaactatattaatttaaaagtgattgtcagacctgatccaatgttgaaatggctggggaaagaccaccatggacactaaaaattttgttctcgatgagagctgatagactgcaatatattaccaaagatttgagccataagaaaaagggaaagaaaattattttgtcactgtcctggaataaattttactaaaagatgaacattagagcaatatttcatgctatcatcaaagcttttcggtgaagaaaatgaaaagaaatgaggctttaggagtacaacagtgcaatcccatttagtttcacctaagaaacaggcaacacctacttcctaaaccttaacaaattgtttccagctttcacccatgatttttaacaaaagggagatctaataagtccatataaaagcacgaccaaagtaagcccacaagtcaagtttgccattaggcttagtgtctaaaaggaaagaggtggcttcaactgaagatctgaaaacaatttgaacattctaccagcctcattaacccataatcacataatttgatacatatttgacatggaaaaatgacaatttagtgacatatcttaatctttggacattcatttaaaatccaaaagaacaactcatcttgcactaagataatcttacttacctctaagttctatatgtatgcattaagtgattttatgttaatgattgattttccttgatttatttttatttgtaaccgcgatgttccttagccatgagcaaggctccctaattaatttgggagtaggtcagtctctgacggatgacctcagtctctttttcaaaaaaaaagaacaaacaaattaaaagtgtagcttctaacaaatagtatgagaatattaaggtgacaattgaatcaaactgataaataaaatctcaactttctccagaaactatatttgagtctaatacctagctttatgccactcaacctaaacaaactgtatcaatgttacttcatcgaaaatattttggcaaatgatatacatatatttataatgctaatatcgaatcatctcctaataactcaattgccagtttgccaatctataattttagtttgcttcacagcaaaaaagatgctgcaagcttttgtatgaaagaagtaggcagcacaccttaggtaatcgaatatatcagtgcaatatctccaaacatttgcagaaccatatttacgaaggcactcgtcatagaatccatatacctgtttaggcagggtaagcagtaaatatatgagtgtgccctaagcttcactgcaatgatgaaataaacaaaagtagttagcaccaaccaagatgcccattcatagaagcttacctgtgtaatctgacgactctcatgattccctcggatgagggttatccgatctggatatctcacctgatcaagtatatttgcataaagaaattagtatgcggcatgccaatattttgcaaggaaaactcagaaaactgaaatgatttttaaacagtaaagaggaccctatatgcattgcaatgaaataaaataaatcaatgaggttatccaactgcaataacagggaaatcaagtggtctcgtctctaatagaaatcaaatggcaagcatgctatggtgacttcctttttgtacctaggtgttctttgtcaaatgatatgtataactaaaacaatttttccaccaagattaaccctcttaagacaataatgatatattattttagttcttgctaaatgaattattattattactctaccaagatttgtttatgagttacatatataaaaacaatggagttgtacaaatgttaagatgcgtacatatataatgttgaagctaacatgtacataccaaaaaaaaaacagctaaaaagtaaatttatatacaacttaatcatttctccaatcgatgatttcaagtagaagcaacctcgaataagtaaataaatacttcaaactgagaatacatatatatatataatatttatatatacgatgtgctttacaaaataacaacaataataataatattgaggtgtagtacagtttaaatttttaaataaaaaaagacctaagtgcatattttggaaaccagcttaaatggagaacagggaagttttcaagataagctcttcaatattttgacctttatggactcgtttagaacgtcgcattaggttgtattgtattgtattatattatattgaattgaattatatatcatatttttatat

SEQ ID NO: 25809 - DNA, 2164 bp, Cannabis sativa
cagaatttttcaaaactagtttattagtattactataccaatttatcaatatcgattcctatcattttcaactaattattagatagtactactaagtttctccggccaagattttttactttttggtcaatataatcgttctatatacttttttttttattctttttgtagcaatcgttttatttttgtttatttatacatcgatcacatgtgtatatataatatatatttataaagagagagaaaaagaaaccatattgtataatacacgccttcaatataaacagcagaacactacttgatcacttcctttagagaaaccaaataaggaggagccacataacagtatgtatatatatatatatatgaccatgcatgcatgcactttatgcatgcatgttgcacatatagctatatataattttaatatttaccatacggtgttgaagacgaccccaccataaagctgtgctacttcatcacaggtcattattttaggagcagaagcaggagcagaagagagagcagggttatttttcatggtgatgagttgatgattaggaagttgttgttggatgatacgactacgtcccatatgggtaggccgctgttggtggtactgatgatgaacagtgtttattacttttgggggagcaatcactctagtctccacacgaggcttcatttgattactataagtaatatggcatggattccagtagcactgctccacgtaattattgttattattatatttattatatggcttctcatcatcatcatcgtggaaggtaattgggtagtgttcttgatcccagtgaaactcgcgttgtacttcccttcggacagtacggtgtctctcttctttcatcataacaaactgtgccattaattaataagctaggaatacttataatatatatgtgtctgtgtgtttactactgatgatatacaaaggctttgagggtctatcctccttatatagatgagctcatatatgtataacaagctagcgttaataataagtaattaatgctacgtgtattaatttcatgcgcactataccattttatcttctcgctattcgatccgatagttataattttaagaaaaatactaaagatggtatctaataatcttttatgtgtggatattattgatttaattaaatatcgaatctaatataattaaatataataatttttaagcagtatcgctagttaatcataataacacggctagaaaatactagtatctagtaacaaagctctaattttaattatatatggtgtcaatttaaaaatatattatatacgtacttgatttattttatacatatgtaaaataaaaaatttaaactatatattgtaagtaaattattcttataaattctcataaatttaattacaatgtcctaaaattatttttttcttaaaattgcttgaaatttcatgtttttttcgaagttttgttattaattcatttctatttatatgtaatttatagatattacgatgtaaaaaaacaaaatgaataatttttctactacagattctttaaaattttattatctagttatctttcagtattttaaatgctttttggaatgacgataatattaattgtttggaagagattctctcttcctttttcattctacatgagtagttctaataaaaataaaatatctagtgggtgtaccaaaaaatcactaaaaataaataaataataattttatatgcactaactcatgataagcaaataaagtacaacaaaaatcattaccattagattaaataaatgcttaaaattatgtcctcacatttaaggacaaaagtttcaattacctcaaacaatcaatatttatatggaagaaaagtaagaggagagagagcgagtgagagaaaaaaggtgaaagaaaatatacatatattattattgtttcaaaattaactatgatatttcttaatttgtaattttcattctttatacaaataatttttgttctttttcttggtgatatataataattggtagcgagaactttacatatatattattaatatgaaaatttgagatttattaatacattttatttaattaaatgtcctttttttttggctcatatcaggagaggaggatttattttaattttttttttttt

SEQ ID NO: 25810 - DNA, 1943 bp, Cannabis sativa
  modified_base (1677)..(1695): a, c, t, g, unknown or other
tttctaagggccaaataattttttttttctatgacctactaaaagtcaggatcggccctgcatgtgatcaaatttacaaccctcatacattctggtttcttggagaaaattagactagggagagttacatagattcttctaggtgctgagttagttcttgagttgtatgtgttgatgtttatttataggtattggagttagttggtctaagagagtaagaggaagttaactatccaactaacttgttatccaaagtaggtgttgttggcatcatatttgttttagtgttctaattgtacaacaatatcacctgaattagatcagtaaaacagatgagagatagtgtgtagtgatgcgtattgtatgccacattaaatttactattattttgactctaatacttctaattattttagtataaatgtaagtaaggatcgatcatacgaggactatgtttattcaattatttaaaaattagtaacaagaattaaaaaatgagattttgattatgagaataaaataacataaatagaaacaaaaacgaattaaatgtgatactaccatatgagataaatagtagttaaaggttattctccaccctcaataattattcttaacttttattaatgaatgtaattttagttctctaatcaaactattaatcgcgcagataaaactaaagtaatcaaattatcccaatctctctgttacatgtaatcaaggtaaaacactcaataattaactctattatctaagtagtaaattcacgaagtatgcaatttatttaattttgaattaagttttttttaaaataaatttaaatcgggtcggatcagatccgatccaggaaaaaattaggcggggcagagcggatctgatccaatatccaataagtattcgaaagtttcagatcagaggtgatccgtcggatcggagctccaaccggctccaactaaatggatctttttgacatgcctattgataatattagaaattgtaatttatcacaaacacttgaaatcctagactattaggtgaatagtaatcctaagatgataatagactaaagtaaaacctaatttagggatcgtttaaacaagattaaaacgataatcatgacattgaacatagaagaatagaagcaattttatataatagaaactaaaaattaacattcaccaatgaaattagaaactcatgtttcgggttttgaaataacccttaactaaaagaaaattactcagaactagacattataattaaaatcataataaatagtaagagtttaaggagtatgtggaaaaaataatccattaaaaacctttactttgttttgtctccaaatagttgttccaactatttttctgttacaaactttccctatttagaaagtcggttatgttagttaaaaactaatttgttgagctgttaagtatatatttactaataactcttttttttttttttgtactaataactcttttatttttattctatataaaatgtggctatgtaaagaaatttttggtttaacgataatttttggatttctacattaactttaacagaatatcttattactcaacaaaatattctttattaattttataatattattaaactctattttaaaaatttaaaaaaaaggaaattaccacatatactattttttttaannnnnnnnnnnnnnnnnnntttacggtttgagtttctaaagtgcttgtagcgctagttgcaataggggtttctgtacgatttttagttacaatttaggctggagcgctagttgcaatagtttctatctacaatttcgtaaaaaatacaaaaaaaactattttgaagtttaaaaataaaaaatccaaaaaaaaaatattacctaattaaaataaattaaacatacatgtattgacgtgcattggacgtaacatcaacctaacttacta

SEQ ID NO: 25811 - DNA, 2519 bp, Cannabis sativa
  modified_base (694)..(695): a, c, t, g, unknown or other
aataaccatattttcttaatatgatattgaaaactacttttgcttaattatgataattatctagtagtatcataaaaaatagtaattactctttataatataatctcatttggattctatttttatgcctcttttcttttcttcccaattaataatgaatcaatttatttagtgtaattaaacaatttagcatatttatctggtaatataattacatttacttacgtgtaatttgagatgattaatgattttacattgtatataattattaaaaactttctattataaacattaattattaaaaaaaaaaattcgtataaatactagctacaaaaactattatcataattatttaattggtgccgaaattatataatattaatttagaaagtttttttgttttatagaactgttttggaaggttatatactgtaatattagtagtaaaaaaccatagaaaaagtattcataatataaagaaaaatcatgtgataaatatagatttccattttttacgatccatcatttatttttatttttttctctctttttgttacatataaataatatagaattcttctgcacttggatgttacactctttatctatttggatatgcaaagaatttttagtttaatttttttttcatatatgttataattatttaaaatatcttacaaaattttaaaaaatnnagaataatttacaatatagaatatggtattcaaacagtttaatttacatgcatataaaataaaatagtcacccgtacaacatactttttgaactctatttcggtgtgttaaatttttctttaaataacaaaaatttgactaaaaaattatttttgataacaagtgcataagtttaatattctttattgtagaattgtttaataatatatatatcgatttaaataaactataatttaaaaaaaaaaaatcaattagacataaacaggcaaccttaatttataatgattgtactattgaataaaataataaaatcaattcattatataacaaagtctctgctttttattcttcttcaatattcaatcatggcttccatggaaaatacaaaaactccaactaataatactaatagtaaagaaccacctaaggatgacaaaagatagaaatcaagaaattggaaaagaaaagcaacaaacaagtcaacttctccaaacgatgctccaatttgttcaagaaagtcgtcgagctcagtttcttttgtgtctaaggcagtgactgaggaaaaaattgtgaaaaaattaatttcaggggcctattatgatatatatatatttgttgcatttattatacatgaaaatatataaaaacaacaatttaagggccctcatatatagtctccatgtgcctccatcaccgatctagggtggccgaccaccttcgtcttttctccgaatgtcaaactcttctccttttggagacgcactcgtggatcatgtcgtttttaatagtatgatatttttttctgtcaaaaaaattaaaataatattcaaaatatattattaaatattttttattagttaatgatcaaaactaaaaacacataaatatattgcatactattttattttatatcataactaccagtaaatctatgaataaccattagtaataaataaataagaagaaaattaaaagttcaccaccacaaaataataccgtcagacgaaggcggccaccttagacacgccaagaacgctaagctcgccgactttcttgatcaaattagagcgtcgtttggagaaggtgacttgtttgatgcccttcttttccaatttctttatttctatcttttgtcttctttattgtgattctctactattattattagtagttggagtttttgtgtcttacataaaagtcatgattgaatattgaagaagggtaagaagagagactttcttatattttttttgagaataggctttcttatataatgtattgatttaattgttttttttctttgacgcggtattttattattttattctatagtaaaatcacaataaattaaggttgggcatttatgtctaattgattttttttaagaaaaaaataaatatgattgatttattactataattattaaaaatatagttataaataatagatatattatttatcgtttaattattttttcaatcaattaaatctttttcaattgagtaattaattaattcacattttatgggatagtatttttttataaaagatttaattgaataatgcaatcttaatttttccatgagaagtggagttcatcttttattttgcaatttcaaacaattcaaatcacaaagattgacagagttaatagaagatttgttcaaaccctaatagttgttatagttggtattatcatcatgttaagtcttgtgcatacgtagtctttataatatttatgaaaaaaactcctttccctaataattttgatcatgtttttgtttatatcaattaaaaatacttttatattatattttattaaaa

SEQ ID NO: 25812 - DNA, 3913 bp, Cannabis sativa
tattaataagtaaatttgattattttgaaatagattttatttagggcacaaaacccaacacctacaagctgggaaggtacaatgagagcatggagttattctccaactaagatattggaatggagagcaccttcacaaatactatcagtaaccagcttacagaacactactctaaagtagaagtgctaccaactaaacattagagtgtaaagagataatacccacatccttatttggcgtggcctcccaccgttcttcaacggtggcctctgatatgcaagccaagcaggggtagccatttgatatctagacgtaaaactttgttatgtaagcttgtagattcaatttatgtaagttgacaacaacaaagaccaattaatgaataaaaaaatgtttatgtttattattgtgtctaaataacttgctaacaagattaaatttttaaacctattctcagttccacatgcgtacacccaataaaattccaaggtaaggtctatgaaacctggtgaattataagtgaggaagagactgtaagtttgcgtgttcacttgttgggcacccacactgtataatgcctctaaatatcatagagaacttatgcagagaaattttaacaattagaacgagctactaaacctacatgtaagtcaggggtaggcatacttcggcttaacataaagaaaagtaaatttggaacttacatgtcaaggccataagaagatagccaagattaaagaccgctcggtcaatcgcacaatctatgataaaaaaaacaacagggccaaacaatagtaatgttcaaaaataaagtgcctatatgccaagagtacgaacatgaaggccctgggctgaaaataagtagtgttcaaaagtaaaaggccataggccatatagaacatgaaaacattgtcgatattataaaaccataatgctaaaaattaataatttgaatctacatgtgtacaggtgctggtggggctaaactggaagctgcaaagtttggatccctagagtgtgagctggccacctggtcaaagttctggctggccacctcctcagtaggtgggccgaccatctcctcatcatagtacatctgaggatgacccctctagctggacggtggtccaacccgcttccaacctactcttaaacagtggtttcccttgggccaatgtgctctccaggaaagtcgcgtcacccatgtatgaaagatcaaccttggatttatgtaacttgaactcatagatgagttctgaagataaggttacatactcatcccttatggcctactggccatcaatggctgctctcaacttctcctcataccctgtgaggtcagcctctcacctgaagatgttagaagcttgcatagttttctcttgattcctcatgccaagcatggcctccaaaccagaaatcatgctccagttctacaggccgagagcctccatctcagatatagtctggtccttccctagaagggaagcctctaggtctttgttgaacctaaaaattgatcaactgatagcaaggtcgtatagatatgatgtttgccacatgttacgcaattataatgagaaagtaaaacacacaaataattgttatagaggtttggccccattagatagcgggtaatgacatactcctcttttagttgtaatgatactaaggcttaatactattcatatcactaaaggtgggatctgatatagcacccttaaggattcaaagtaggaatcaaaatttgaaaatctcaagtgatgaggaagcttgtatgggggtgttagagagagtgaggaagagagttatcaaacttatgcttagagcttggaggctagtattaggcttaatgacttagtggcttagttctcacttaggttttctaggttagagttaaggccttcatataggaagcctaaaacctaatttacaacttgagaccctagatatttttatatttaattagttaattaccgaagaccaaaatgcccttaaacatagatattattcaggtattctattgggcttttagggcccaattcacaacccaatcattaagtccatgtgttgagttgcaccggaaacactataggccttctctcggctggccagacacctacagggagcagactagccggccatggtgctgtctagaggctggctaggcatagggcgaggcaaaggtggccgaccagcttatgtgaggaagctggtctcccgtttgatacatatttgagtgttggggtccctgtttgttgaggtactaacttggccttcttgtgggcgagctgtactaccacgtggcactaaatccgaggcctagctactacaacctgtatgatctaacacccttaaaagccacatgagaaatatgccacctaccaattcaacagtgtgatttcatccctacggtgatccatccaaaataacccatgcaagagagttggcctataaataccctagaggaagcacaaagaggggatctttttttgaaccttcaccttcagattgaagacttattcctcatcaagcaaacacatttttgtaaccccactattaaatctagagtatttctactaagttcctcttctttaagaggaacacagtggaaaggagtgaaagtccactgtatttgtatttgtataaacaatcactggccgacgagcctagtaaaatggagtcgtggactaaggatagttaacgcctaaaccacttaaaaatatcctatttgttatttcattatttatgccctctttactttcttaagctctaaaaatattcgtttacagaaaaactcggtaaacacttgcctatcatgagtgattggtagttaggtaggaggttgtatttgtcattgattcttacaaattgcctctaataccaactaccattcgtagaagaagtatattccccttcaaatagacattatgtatccatcttacccataagttgttttgttttgaggaaatcaccctttcatagttagctaatgtcgttgtattccaaatcattctgttttgaatcctcaaacctccttttgacttttgtttacaaacttgctcccaagctacataaccaagagactgagtctccactaggctgcaccattaaaatgctctacaaatgaagttaatcttttttagaatagtctttggcagcaccataattttgtgcctagtaaaaatgtatggagaagaggatagagttaattagagtaactcaacgagcaaaagatatattcctggatgcccatacccaaatttctcacaccattttctctaccagtatattgcattcagaaactaattgtcttctagcacaaattgggactcgtaagtacttgaaaggcatctcaaatcaaggaaatcctaaagcatcaagaactcttttaaactcctcttcatccatctcacaacaataaagaactaagttgctatcattcggatgcaagcctgaagatatgaaaaataatttcagcccttataataaaaaatagatggtttgaaatcaccatgtgaaaatagaaaaacatcgtttgcaaaacaaagatgattcaactttaaatcagagtagcggtaattgtatttgaaatcctctttttgttcaactttggatagtatcttagataagtattccatgcagagcacaaaaatgagaggagacattagatctccttggcacaaaccccctttttgcctcaaaaaaaccatgtaaggatccattgaaatagagactgaaacgaggagttcaaatacatggcatcactagctatacaaatcttcctggaaaatttagagccagtgcatttcttctatgaaatcccattccaatgtgtcgtatgatttctgaagatccaactgctgggttatatgccctaaataaaactctgtttcaatgtaatccagattat

SEQ ID NO: 25813 - DNA, 6748 bp, Cannabis sativa
  modified_base (1888)..(1892): a, c, t, g, unknown or other
  modified_base (2795)..(2835): a, c, t, g, unknown or other
  modified_base (6699)..(6712): a, c, t, g, unknown or other
atgtgccaaataatgaaaaagcacacctccaactttttcatcttctttttttgagatttgctcaatttagtagctgggtttgctttgatttcttcacacccctaaaaaacagtcttcataagatagaaaaaaaaaaattaaaaaacactttttagtaatttgatcaaggtgttacaagggatgtaccaagctcctccttttttttttttttttaagtttgcaagatcaaagcattgttgtaattatctttcaaactacaaaaacaagcaaaagtaataagaatgacatattgaataatggaaacactaacctcattttagtatgctaagggtcagtgtgctctttaataaacaaaaataagttatctgaacatttctttttttttttagaaaaaagaaaaaatccaaattggcctaaagtcttaacagagtctgaaatctatcacgaggatccatcatccaacagaattaacaaaaatatgtaagaaagggtaagttacaccagtgaaaggaaatcacttaccaggttggtgatgatactacaatagtgagaagccattggatctgccttcttaataacaagatttagcccatcatcaagttgtacaatccaaaccacatcaaatttatcggcaaaacaaatatatagaccatcattactgattgcaacagcagtgactcttttctttgagcaccttttcaaaaatctaacacaatatactatttagggtttgaactcaaaatatacgaaatcacattcttgccaaaagggatattactccttgtgaaatgtagcccaatgtattgtatatgtattgtagcatgcaaatgtagatacataacaacttcattctgtctaaagtaaaacacacgtgacaaaataataccacataaataaaattgtaaatttcatttccataaagttttgttccaacactacgaaaatttaaaggaataaaatatgatcatcatgttacatcattttttactttaaagatatacattatgtaaactttggcatcgaattccatcatcaagtactgccccttttcataattaacaaaagaccaataatcgaatgaggaataatatcagcaacagagatagacaaacatttttggcattcaaaacatgaattaccattagctatagcaaaaaagttcttggcaccgaaaaaaacaaacacagagatagagaagtagaaaaaaggagagaaaggcatcacaaaaattagtcatcaataattgaattgaaaatttattattggacatacccataacgaataacgaataaagcaaaccttagcaccatcgtgaagaatagtccgaccaaagtaatgtgtccttgttccaaaagagaaagtgaagaaaacagagcaaagctaaaattgcattgtgacaaaactaacaacagcctgcagcagtgataagaaaactcagttataataataataataatatcacagatcggaaaataaattcacaatatcatgctggaaaatatcacagaaaatggttgtttaagaaaacataaattacctttaggaagccttgttccaatatgaagcctaaaatcattggcacggcggtaaagataccaatttgaaagagaaattgtgtattcatagcagtagtaagagcagtattatccataattcgagctctcacttgaattgtttcaccaactccagatagcgcctgaaagaaaaaccatctcacataatcagatatgcagaatacatagcttaaaccttaaaaatgtattttccaaatgtgaagttatcaagcattttattatatatcaaaatttagggatatacggtttatttattagagagatatgtggaagatatttttttttaattttaaaaaaaattgtttaattttttnnnnntaattattgggtttatttgttaacggtagatgaaacctattaacatcgttaaatttaatagaatattcttttatttttaaaggtataggcacttttaatatataaagatatatttttataagaaaaatagatcaggaataaggaaaccaaacggaattagagtaaaaaatagagcaagtgatttttttttttaaagatcagcaatatgactttttaaaagaaaaaaaaaaaacaaaaaagattttttaaaaaaactgtgttctcacagtaacaaaacaaaacaatttaaaaaaatagaacatcacgtgagctataaaaaaattagacaagtgtcatttttttaatgaataggtcagaatggtgacaaatattttgggacagaattttttttttttttcttagggtttgaataagaattgtgtataattgagaggtaataggcatatataaatttttgctcattgggaattgttgaaaagaatgtgatattgtatattttatgaagtatacttttaattaattgagaaacctagtcatctaacaacagtaagagaaaaagaggagagaatacgtatgtttttaggttaagtgattttcatattatgtattatgtacaatatctataaatacttttagctaaaataaaaatgtttagacctatggtcataaatatttattttataaagattaatattaaaataagttacatagagctattatagagttttctaatataatacttaattgatatttatgaatctaattaaaaatgagaaaaatgatagaattatggaagattttagagtgtctagttgtgtcttcccatatatatcacaaaccattccctttttgactatatcgtatattttccgtccgattaatgagaattattattattattannnnnnnnnnnnnnnnnnnnnnnnnnnnnnnnnnnnnnnnnattattattattattatgaattaaaaacaagaatatataagtttcgatttatatagattttgtatagagaggcagaaaccctaggtaggaaagtagagtactagcggtaaggaaaagtaaagtgcgatggagttggatatggagatactgaagaaattccttggctgtaaagatggtctaatgaaaaaaaacttgatattctcgccattgtcaataaacattttgatgagtatggttgctaatacactgaaagaagggcctgagttggagaaatggttgtcccttttgggatccaaaaccatagccgatctcaacgcaaactacacctctgatattcaacaactcactgattattgcaacaccgatgaaggccatcctaaattttctttagttaatagctattggattgacaagaaattcaaactagacccttcttgcgagctattactctcaacggtatacaaatctaaggtctccaatcatctagattttaaaaacaaggtacgtatgtatatataatcactgttattttagatcacccaataaagcgtatgtctattcattttgattatatattatttataataacaaccatatatgaatttatttgtgaattatttatacacagaataggttaattaatcatgtgtaggccggggtgaattgttatatatatatataaataaatatatattattggaaaattcaatgcatctcaaataatttttttgtaaaatttttgtaaattatatttatttaacgcattcggccaaattttaaaaaattcggaaaaatttaacatactaaaaatttaactattttattttataggaacatttggtggtgtatcgtagaatcaaactatattaacttttagtgaaattatgttattatggatctatatatctctctctttatatatatgactttggctccatcactcaatatatagggaagggaagcaatatacgagatcaattcttgggcagaagaaaacaccaaagggcttatcaaaaatcttctcaagtataacccagagacaactaaactaaccatagcaattctcgcaaacgcactctactttaagggtgtttggcttgatcaatttgacccttcaagaactctcatagaaaaattctacacactcaacggcgatgtgattcaagttccatatatgacccataatttttcactgagtggttgctacgcaccattcgatgagtttaacgttctacagttgccctatgacaatccttcttatggaaaaggactgacatttgccatgtacattttcttaccgaaagagaatgatgggttattgaacttaatgagtctctttggttcaaacccaaaagattttctaactcaaaaatttaagtttaatcccatatattatattggaaaattacggatacccaaattcaacttcaattataaatttgaagtttcgaagactatgaaggagttgggattgagtatgaatgcacaagcaaaattacttcctttcactgatgagacagtaaagaaagtttatcacagtgcttgtattgaagttaatgagaatggaactgaagcttcagcagttacttatgaggatgacaattatggatgttgtatgtattctccacccaaaaagtacgtagattttgttgctgatcatccatttttcttcatgataagggaggagaattcaagaagaccaatctttttcggagttgtggtaaatccactcctagctaaatgaacaaattatttagctttctttctccagctatttggaaaggtaatttgatgttttagtgtttcaaatttgggtccatatatgtttatcaaaaagacaatttgtgtctatgtttttgtttaagaaattagttttgtcgatatattttctttagaaataaacatctactatttatgatctttagtttataatttttgttttattatttacatatttaaatttttataaaaaaaaataataaaagaagtattaaaatttaaaggctatgctatgtgctaaaagtttttaaccaattgtgccatactagacgataaaaaatcttctatccccaattacatttctgccgccccttcaataaatatctgccatgtgtctttttacatattcacttaactcattcaattttctagattttttttttgaaaattcaattttctagattagctctgttagtttttttttttttttttttgattaatcgtgcccaaactagcacaaagaaaaacaaccagagttcaaaagaactaaacaaaacactacaaaatactaacaaaataacgaccataactaaaacaaactagaacaaactacaaacagccatctgtcctctcatccgacaggaaactgtcaaaattgggcaatccaactctaccaaagatgtaagttcggattgcccattgcgccacctcatgggccacaccattaagtttcctaggaatccaattgatctcccataagacaagcttagaagttagaccttggaatttggtaactagctgctgaacgttatgattcagcgatgctatgctttgactgttgctctttactgcctctatcgccccaacagaatcactctggaagatcaccattttgagcccaagttgaaccgcagcttccgcacctgaacatagagaggctatttctcctgccaatgaatccctgtaaaagagttttgttgtaaaagcattcgttatagtgccctgttcatctcggaacacagcagcccttgctgaaactcggttgccgatagctgcatcagtgttgcacattctccaattgataggtgggggcaaccattcagtttgaagagaatgttgagcattctgttttccatccagctctgctaatctgcattgatgttgtgtaccacgatgttgattggtgtaaaggtattcttgtgcacaacagaattcctcaaataccatattctttccatgattatagctgccccttccaggatagtatcaaagttgagagacgggggtcttttatccttctgcttgaaccatctaatccatcggtcccaatctgtgacttgggtcagagttgttctgatattccagttacttccaaaccaaacagctctggccactggacactcccaaaacaggtgaaaggagtcttctattgccattgagcaaagggggcagtagggatccgagataccaaaggctttgagaattttgtttcttgtgaggaggcagtcggatagcactctccaccacatcatttttgctctgctatgcattttggcaccccagatcagacgccacttctcattggcgatcgaatttggctcgatattcttggtaatcctataggcagacttgacgctgaattgcccattcgcttcaggcagctatagccacgaatccttcccagggatgtttggcaatgtgatgttaaggattctaatggcatcttcctgtttaaaccattgtcttaccaaatcttcattccaaccattatctctaataaagtttctgaccatacttattccttccgttgcatctttcagtggttcaggttgtaaatctcctcctggaacccaagggtggaaccaaatagatgtatcctccccatttccaatccttatacaaattcctttgtggatatactgtcttgccttgagaattgctttccacattgttgagtctgaaggttgagcttcaatatcaaagaaatctttgtttctcatatatttggcattcacaatctggacccagagactattgtcctccaccagcagtttccaagcccacttcattaaaaaagccatattggtatctttggtagtcctaaagcccaagcctccatggatcttttgttgggttttatgcccnnnnnnnnnnnnnnttcaatataatcagatttacttagatcggaagagcg

SEQ ID NO: 25814 - DNA, 1733 bp, Cannabis sativa
agttaagcatttgagagaaaggttcatcgaatgcactgtcatataagggtgtttttttatacagacacgcatacacccattccttcattgcaactattctttgacattacaggcagctgaggagctaggtcctgaatgtagtgactccaacatatatgctctttcctaactgcgcagttgggttttgttatagaattagtaaggtctttatagcaaaaaatgagtttcttctacagcacaacacggaatcccaataatatgaattttaccattccctgccctaaaccttctcattactatcattaggaagcacattagcttaatgaacttaggaacacctaaaatatgccagactgagagaacatggaatgagaaagaaaaaaacagtcatattgatcgcctaatttatataaaactcattcataacatgctaaaatagtcaacacatataatctcagagaaaaaaggaaagattaatatactaaccactcttgaagaaaaacaaatatcatttcaaacgcatcttttggaaggattacaccaagctcctcttgaagctccctcctgaaagcgcatgttacaaattttcaggaacaagtgtatccaataactacaaaactaaagtagtcattcaacaatctataacaagcgattggttcctaaacaaactcacaaaaccatataattctttagttagattgtttgggctctaatggcaaaggaatttgaggatacagcttttttaattactctcgactagaaaaacactttctttagtagtactcagtttttctttcttctagctttcgtttgtatctttttccctcctcttgttttcattttggctttttggttcacacgaacaaaacttttgtttcatatttgaaaaagataaaattatgatcaaagttgacaatccataacagacaattttttttcctattgttctaacaaagttagcaattttctcacatagtttttcgtcaaaagtatgaacaaaaaaaaaaaaacaaattttgaaatcctattaccgagctgtaagaagcgaggagtcgccggcagatatgtgaccagcactggagatatcccacaatccagcccaagaatccttgcagtcagaacgccgttgaagaagcaattgttgcgtattctccgcccaaatccacacatgaactgctcgatggtaatccccatctcgatgaacctctcctctgcaattttcacattaattcatttaaaagagaaagtcaataattgaaaagagagtaagatcgaataaatggttaaatgaaagaatattcaactgtttgttgatttatattagtgaagtgaagtgagtttgccttggttttgaaagaccagtcttctgaccggttttggtgaggacgtcgaagtgttcctcctgtacggcaccatcgccggccgccattgttgtcaacttgggtatctagtacaagcaatggtcaaggggagaagaagtggaggactttgcttttcacaggagtagtactaggagagtaggaatgttggctgtcgtggaatatatataggaattattatattaaaaatataaatttacacttaagttacaaaaacacttttacactatcatttatacaatcagttgtagggtagtttgttgcgtgattatgcggtggttgtgatacgaatggtcggcctcctattagatttacttatgctagaaggtgtaagcaaggtaaaaccaatgatgt

SEQ ID NO: 25815 - DNA, 2780 bp, Cannabis sativa
gcccaagatatagccaattgaattgctcgagtttcagcctccaacgaggaagaagcttttgtctgggcagagcagtacacccaactgccatttgcaaaattagtcattactgtagctaaactagtaactacagcctccctcgatgcatcaatgcaaataactatatcaataccttccctactaggcccgaatatcctgtctaaaaagttatttggtgatttagatcaaagcccaaaaatcagcaaacgaggttgctatcttgaaagaaaccatgtttaaatcagtaattctccccttcaatcttataacgtttctttgctgccaaatatctaaagcaacacaactaaagtacaacaacaccataagtcaactggtgtttggaaagatgagaaaaaaagattctatcacctgagacaaagaactccctagaatagcatctaaacggcaaaggaaagggccagaaaactagaaggctttcacaacattacactctttgaatagatgaaaataactttcctccatatcaccacacaaaagacacactttttctgttaaggcttgtttggtagatagaattggatttggaaaattatccaataataaaacaccctaccggctcaaaaaaaataatcaattttatttctaaatgttatttccaacataaatatatttaggtggacttcgataacacatttattttctaattttttaatcacaaaatttaaagtagatttttttaaaaaattttacttttcgaaaacaacatttggtaataattttttaatcaattttttgttttttaattagaaaagtgaaaatattttttaaaatcacgttcttataaaactgttcttactttttaattttttaaataaaacaaaaaaaaaatcactttcaaaaaaattttaaacaattttgtgtaatcaatattttagatctcgactctaagttggaccttaggacctggacttcggtcctaacctcattctcagactccgacaatggcccagcccaagacccaaatctaaacacgaattaaataaaataaaaaaataaaaatgaaaataaatttgatagaacacatttttcgttttttgtttttataattaaaaaacaaaaatggttatagaacacattttattttttaaaaacacacattaatttacttttacttttgtgattaaaaaaataaaaataaaaaaaaaaaatgttaccaaacgccttcaaaatgtgttttataactacttttatttttttattttaaaaacaaaaaaataaaagtatgttctctaattatttttgttttttaattttaaaaacaaacaacaaccattttgtttctcaattttaaaacaaaaaacatgaatttgattttttttttctttgctttttctaaataaataattatgactatcattgaatattgataataaaaaaataaaataaaaaagaaaagtaaatacaggactatacataaaattcctaaaaaaaattacgtttacaagacttatgtgataatgaaatccaaaaataacaatacaaaataatcaagttgggtcaaatctgaaaatcctgcaaaatgaagtgataatgaaatctggccggactaaggataacccaagacaatccatgtcgtaaggtcccaatgagcaggcatgaagtaaaacatgccaattattatgtggagctaatgacatctacttgtaagaatactcgacccttgttactctatattgaacctgggaacacaaaaaagtcagaagcagaatccttcttcctcttcttcttgtttaattgaaatttgctttctcagattagtggagcagagcttcaaggttgaaattttaaaccaagcactagctgtccactttagcaccttctttctatcactctgagtcatccaattaatcgaacttttgctcttctttttcattgttgtttctccttatttgatcataataagaaactcttgataacaatggaatcatcaattcgtttaagttctccattatcagtagtatgaatgaaaactacaacttccagtaagacctcaattccttgtaggcatgcaatctccttcaaaattagttaaaacttttgcgtaatggtacaagttgatcatagaaaacatatgattcacatatataataataagcagtcaaaagacaaagcgatcacactattgtcactaaaattgtaacctaaagatttcaactaaccaggaatgatcatacacctattttccaactaattttctttgttggattcttatatctctacatctcataaaggatagaagaaaaaaatagtaatacaataaattataatattacatgaacaataataatagaccaaaagcaataagcagaaagaatggttggagtgggtgatgagatgaagcatgagagttcatcaatgactgatttgtagtggcagatccattctttattctttcacaaatcaatcgcaagcaaatttacatacatacgtacgtacgtacatacatacatagaaatttgacttatatacataggccaaaattagttccctaaacttaagcttagctgaattggtagaacaggttaacttttgttatttttctcaaaatgtcctccccatttacatcacccgctctttcttccctctttctctctttctgtctcatcactgaaacaaacaaccccctcccatttttcatccgagcacttctccaccacaaaaaacactacattcctttcttttcactcattctctcactacactacattctttcactcatt

SEQ ID NO: 25816 - DNA, 2709 bp, Cannabis sativa
atttctggtatgaccagttgtgatatgagtgggattcatggaggaagcctagggaataggttgcaggctgatctaccaagcttttcttttggagaatttcagaggaaatcaatcaaagagcttccaagggagtcagacttcttgaatgcccataaagatggtagatccaatctgagtttgttaaagattagttccgcggagcaaagttgctggctaactcagaaaactggacacaatattcataataactctattcctagaattgttggttttgagtcaaccacctcatgtactcctctaaatgtggtagaaggaaaccaacatactttaactgcagctagtgttactgatgcagccgaggcaagcgaatcgcttgtaaggaaacaattgttgtctcctttgaatggaatgcttctgcaaagtctttgcattgatgatctaaacaatggcaatgaagttcacaagagtgattcaaggagtaatgggagtatagatgttactcctcagcaagataagaagaaagctcatgttaacgaccctgatcgtttaagtagtcctgtctggtctggttcttgttttgcaggatggaggaattcaccagatgataattgtgtgccaaactcgatttttttcacagatggccctttacttgaaaacaaggattcgcagtgtcacaacaatcatttctctgaggagaccttcaaagaaaaatctaaaccaagggcaataacaattactcaaaagaaggtggcctcacctcctctctcattgtcccctcttggtccaaagttttcagaaagagcgaaatcaggacgaacactcagtgataccacaaggaagttagaagaggatgatggtatcacaattaaggagattggaagatcagtcaatggaactgtaggctccttatcatcctggaatgaaaatgctattatgaagccaagtaaatctcagcaggaacatgatgttttacataactttgacccctttactggaggagtcaacttggaaagagattgttatcacaattttgacttcactcctcctcaaggttgcaaacaagtgagaaatctgagtggacttcatgttagaaggtccttggttggttcatttgaggaatccttgttatccggtcgttggttgtgtgggaaagctagcaaggttggcggttttatcttcacttgtgattcaaagttttcattttttttacttcataatgaacacttgtgtgaatgttctttaattaaagcttctttattgcagacaattgatggtttccttgctgttctgaatgttactggagggtctttctcaccacaaccgcagaaactaccattttatgtaaccagtgtggatggagataactgcttactgtattattcctccatagatcttgcaggaagtactgaagcaaacaagtctagaggctccaagatgaagaggagcctcagcattgataggtcggggatgataaagagccaactgcgtgttcccatgaaaggacgaatacaattggtaactcccaatcccattaattataaatgaaaaaaaaaacacaacattgttcttgtttctggttcagaggaacatattgaaggatcttgcctttagtgttaaataggaaaaatctatgtaaatgtcttcaatgcaagacaatagagttggtttagcaataattgtagtaccataaggagaagtagacaactgaaattaacatctatttagtagttagattggcagacatttgttgtcattcacttataaaccgaaatttctatggcaggttttgagcaatccagaaaggactcccatacacacattcttttgtccttatgatttgagtgacatgccagctggtacaaaggtactgctttatttatagaatgaaaagctgtttttgggctatttagaccattctagaggttatagaaatggattctctagctcataattatggctgctgctgaaatatttgttttgttgaactgaatgtatctcacacattacctaagaagggtaattcatattcttaggcttgtggtttgctcccacagagtctgaggttcgactttcgagtcccttctaagcttagtctgtttcacattgaatttcgtattcatttaatatgcctgtttctgttattatggttattaacattcagtcccaagtaagattcttattatattaatgattgtaaaacagacatttctgcgccaaaaggtcactctggcctcttcgcctcctgctaacggtgctggtgttctgcgttatgcacttcatgcccgctttgtatgccctttaccaaagaaaaattcaaaatcattgcagagatgtaaatctgatccctcctctgctccagattgtaaagagatccctgatggggaacgtcgcttctacttgtataatgatttgagagtggtgtttcctcaacgccattcggattctgatgaaggcgaggtatgtcatattatcagatagttgccttctcttgtaaaattttgtagttacattttcatttcagctaagatatggtatgtgaaaatgaaaagcttcaaaactttccatattttggttatatagttttatttcaagataatagttttgtatgcaattgtttttaaagggttggtttaggatccaatgtggctcaacctggaatggtgaaacatgtcaaatgaggagatcatgcaatcttgttccgaatgttct

SEQ ID NO: 25817 - DNA, 4215 bp, Cannabis sativa
tttgctactgtcttttgctcttctttcttgagttgcgggcagtctccttgtactatccaggccaaccataatgaaaacatcatcaccctttacactctcccagatgaggcttcttatggttgggacattccggctaagtgtatcgagttttggaaccaccttgctagttggctcgatccttgttcccttagaacctcttgttcttatttgagctaccaggtgcagatggtgcccttcgcttctggtcaacattcgagtcactaccacccctagcataactagtggtaggaagagtagtggccccaccaacaacctgagttccttaggactcctagatgcactcaaatgcaccctcaactcatagtgcctttccgaccatctcaacataggtgatgttatcatcgattgtgatcatcaggtcgtgtttaattttgggattcaacccattcagatacttctctttcttactaaagaagtatctgtcactgattgttgtccagttatctaataggcttgcttgatcagcacagtgtcctgcctagaatgattgttaattgcttcttgttgggccctcatgatttccatccattgatccatctactcttggaattggcatttttctgttcaaaggaaaaaattataaatgctcaggtatcttcttgatcagggtgaagtgtattagtatgttcttgtatctgccctagaatagctcgattctatagtttggtgtcattacaaattttccttcgaggatctccagtagatggattttcagtactacgattagtctactcagcctgggtattggtggttccaaattcttgcacgcctggagtgaactcggccggaggagttgtcactcctagtccttttgattgaggacctatcaaaggctgaggaatagtagggccaggatccttccttactggatatcttcgatttgcaagagtttgcacattaggatccgtagctatcaaatcagttgtctcattgggatttctcctatgtgtttgtacaaccatcttcttgtgtcctgaaaagattcaaaacaataattatgttcttttgctctcaatgaaagtactaaaatattaacctcgattttagccaacaacaataattcaattaaagcgattagaaacaattaataataatgatttaagcaaacagagcacagatattgttatagaggtttggctctgtgattatggtaatagtctactcttcttttacttgtattgaattgtggaaaagaaccaagaagtgcttgatcttcctctaaagctcttacaatggttttagtagcttaagtgctctatggaaatttttgaatccctgaatagcgaaataactctactatttataaggaataattatattagtttggtttccaaaaacaaatcagaaataaattaagaaacttaattacttttctaaataaagagaaataaaaaagagaaactaggtcagtttcctcttttctcgtatcaatgtgaatctatcccataaaattagagatgtgatcgagacttgtatgtttggacaattagagaaagtatccttgtagatattctagatgcatttactttggtcctgcgagttgactgtaaaatagatgttagtcggacggtgtaacattctttgtgtatatattacaacttcttctttaaatcatttattataagtaataaatcactctggacggtgtaccatggagcgaactgcccatccaagttatgaaattctcttcatgtttcatctagatggatgccacatcatcttgtgtggaaatttggataacaccttagtttgtaaacgtaaggttaatcgatattttattcaaagcatataggtttaacaaacatgcattaaattttaagctctaggaacttgaagtttgcttaagttcataaatgaccttattatgcttacaaattttctttgacttttccatatactttaaattcttgcggtttcatccatattaatgaacttatcaagataacaatgctatcttaattttatttgtcaagcctcataaataagagttgcagttacggataagttacagttacggataagagtatactaatggatttcaacatgactattttagaaaaagttttctttaagtcaattttttctctttagataaaactcttagccattgtttgagtctcgaaagtctcaatttatccattagttcttctcttcttcttatggattgacttgcatcaaatgaccttaaaaatactagttgcatccaaaagattctagattgagttagagtgtgtgaactccattttctattttgtgaatttaattcaaaaatctttttcagaactaccatcattcattgaagaacaacgaatcatcacttcatccgttgtcaaccaaaaaattggtttcactatctaaatcatagtgtatcaaattcctaaaaatcctcccactatgataagactatgtgataatctaaattggacttgcagtttctaagtttaccctattgactatcatgatgacttattcctaatacaaaattgatactaagaatgaagcttaacagattattataagaaaattttaagacaaccaaaaaatatgcaagcattctttgcaattctagttttcttaaaacgatagtggaacacctttcaagtgtcataatgaagtaactaagtttaccatcattcgttcttatgatattttggaaataactttaaatgacgtaatattgttagatgtgatttggaatctaaatgtgcatttccatttaaaatattgataaaactttatagctaattttagataacataatttccattaacatatgattacgatgagggcttatcaactacacatattttagtgtccatgagttgatcacttgagataatatcttaattgcaaccttaatttaatgattttgaactgattatttcaaatttttcatccttatcgtatcgcaagatctttaacatattttttaattggttttgaaatcactgaaatgaattctcgaaattatcaaaatttcttattaatttggttcatatgcaagtgtaattttcaacaaaaatgccaaatatttataaccaccccctctcttaaacattcatcgatcacttaaaattatttttattttaacatgacaatggtctaaacgtctacatcaacattttatttgccacttgtgacaaaacttaacaaaaaatgccaactttataatattgggaatagtttgaggaatattttcaacactcaaataattaagggcacaataatccatagaccataattggagaggaaaaaattctaaataaaatttaattaataacttttatacactcatatgaatatctttaagatcaaaaagaccaaaatatcctttttaagaaaaacttctcatcttaaacacataagggcagtaaagtaaatgcaatttaaattaataactagtcaaacatattactcataatattataaattaaattgtacctctaaaatacttgccacgtgcagaaacttaccgattgtaactatatcgtgaatcacctaacgagacgtatctataccgaaacaaaaatcacactatataatagtataattctcgtgcacatccaatttataattatcacaattatatttctaatgagatacaattactaaatgcccctattaccaaaacagggactttaaactcaattaattacatataagaacatatatatactgaatgatatgcataaacaattccagttatgccttctcgaccaactaaggtacttaaccatattaggagatgtggttactatagtagaggaatccagttctcaagtgctagtcttttgctctcggctggtacatatctagcaggagcatgcattttgggaggatattcgaagaagcgaaatgggtcaatggcatatatgctggtggaactatttttatcaatgttggttgagatatttgaagtgtttgttgcttgtttgtggtggatctaacatgatcagtgagttgttgcagaagaaaagctctataattgttttattatctttattgtatatgttaatctgttacaaatgatagtttgccttatataggcagagcagggtaggtagaaacctaaccacctaaactaacaataataacagaaccaacataatcatgtgtctaatagcccccctgaaggtggagtgtataagttttgta

SEQ ID NO: 25818 - DNA, 2847 bp, Cannabis sativa
  modified_base (1941)..(1955): a, c, t, g, unknown or other
ttttgtcatttaacaaaatacaggatccaatcaataatttttgcaaaatacaggatccaaaatggtatttacccataaatatattattttaacttatattttggtgcattacccatttgagctgtccttcccatgttttattttgatttttttttattattaaatatgctttttataagaaagaaaagctccaaaattttacttgttaacgcaaatttttgctaataaaaaatattaatattctggtaataaatgaaccatagaattaattacagcaataaatgaataacataaagtttttaatgtgggtttgaagttaattctttagttcacaagtccatcttattaaaaaaaatatatagattacagaatacaataatatcaatgataattatttcttattttttctctctagattttttgtcccttttaccctgggtctgtctctatttatagatgtgtatggtgacagttattcccttgagatctattcattcataactgctcatgaaacgtggacatccccacgttttattattgtgcatataggataatgttaaataactattcaactgctcttttatctttatccatagatggttatgctgactatactagatgatcctcgccaagtatacgttatctttttttaccgtctttgtagaaaaaatactaagtacaaacatacaatgcttctcatgattctcttttaccatttagaaggtattagtgaggcgtttacttcaacgtataaagagtgagatggacgaatgtagttattctttgtacatacccacaagtatgtgggtcaatgagttgtaagctcttattcccgagtatgtgagtcaatgagttgcaagctctttgtttacttgtcttgaataaccttcattatatattctgtttatctcgagatggacttgttgtctcaccaatcttactcgttaatagttattattagggttgtacataaaatatttgattcaatctaattcgcacgatccaatccaatccaatttgtaaaatgcggatatccgcacttgtacggattggattggactgaaaaatctaaaatctacacttgtgcagatcgagtattgtttgacctcaaaaagtaactgatccaatccaatccacacttaattacacatattataaacaaaaattataatatataatatatattaattttctagtaatattaaaaaaaagatataaacttctaatttcttaacttgctaaaatctaaattagtaatatattgagttggtgcattttatttgttataatattttataatagaagacacaaaattattcttattcacatagatccatacacataaatttagatacatatatatactaatttatttattttaataatggatctaaatatatattgtaacgattattttattttcatttgagatgagtacatatataccgacatatatgtatattggtttgatttgtatgtaaatggagatggaaatagatgattgttggagattacgaaaaaatagttttttatttttatttttatcctattttaatgaaatattaaataatttatcattaaaaataataaccgagcgactagtatcattttgggggcagtttttccagcccgtgtcttgtatagatcggatttattttgcttgtgaataatgaagttatttttttctcgataaaaaaaatataataattgatccaaaataactgatccaatccgctatgggtagcaattcgtgttcgcgggtcgtgttcatgtcatgtcgagacccatgtataataggtacatgcttgacccgaacaagacccgtttaataatcgtgtccaaaaataaaatctaaacacgacccgtttataaacgggttgacacgacacgacctatgtaacccgtttataagcatattttgtttaaatatgtcaaccaatnnnnnnnnnnnnnnntattcaacacgtttataactcatttatgacatgttaaagtactaaaataactttaaatagatcattaatgggtcaatatcgagatagtcgtgtcaacctgaacatgacccgtttattaaacgagttagacgagtcaacccgaacacgacccgaatccatttaaggcaaacccaaacccgctaactctcgtgcgggtttcgagtcgtgttcgtgctgacccgttttgctagccctacaatttgcactattgcggattgaattggattggattggattgaatttaaactgctatgcgaattggattggatccaaaatataaaattcgcacttagtgcaaattggatgttatttgaccaaaacaatacaaattggatcgaatgaacaaccctagttattattcttatctcgcttctacctatgtggtagcaagtttgaatatttctatcaatcgtaattccgaggtgaattatttaatatgtatttaataatgtaattcttaaactgattcatattttttctttggtacacgtgtcaacttttggttattagtcgaaattaaggtataacaattctctactaaaaagtactttttaataaaaaatgactttttaaatgtacttttgcaacctcgcctatttcacatggcctatttaagagttcaatttcttactttcttttcacattggcttttttttcaatgaaatgaaacattaaataaaatgaaaatgtaagaaataaaatagaaacaattattacttttcactttttaaggtgacgtttggtaacatttttttaatcagttttctgtttttaaaattggaaaagtgattttttgtttttcaaaaacatgttctataaaactgttttcactttttaattttttaatttagaa

SEQ ID NO: 25819 - DNA, 2480 bp, Cannabis sativa
gccagccttgaacataccctctcctagggtatggctgaccaagctctggccaatcaaaggttgtagctcaatcaaggaaggccaatcaaccaggcctctgcagcaacagatccctttgtgcaagcacagttggaccaaatgagagacatgagaaagtgcctagctggtccaaaacctttagaacttgagctagacaggtcaataggatcaccattctcggcatacataaatgccttgccctttcccaagttcaagatgccagcatggaagatgtacacggggaaagaagatcccctagtacacctaaaatactttgagatccaaatagatctccaacaagtatttagagatgtgcgatgttgaatctttccagtaactctagctaaaatagcccaacaagggtatttcaaactggccccaggaagatttaattcttgggaagaattctcctgagagttctatattaagttctctgcttcaagacaaataccttcacgactggaggatcttgtcgaaataaagcaataaaaagatgagccttcgaaggactacattcaatgatccatagttgaggccacgaaggtcaaaggcctgatagaagaaggtcgatatacaaccatactcagaggcatcttaccgttgagttacttctagacagatatcagaaggatctgaacgagcaacatgatagagttccttgagcgagttgatggctttataaagttggaagaagctgtccagcaagcctaaacaagagggcaagtcaatgttaatagacacaggacatcatattgccccaaggaccgtccgacgtactgaccaatgcagacgatctctggtaattcaccaacaatgagaatggtggaggtaaacgcatcaacgatggctctgactgacataatggcaaaagagggaaattcaacgattcccttatgccatgaagtctaagcgagaaggagaagttcacatgctttactctcctaccaagactcccaatgcaatgcatgccaaccatccacgtcgactggtgtcaccaaaacctacagcacctggtcaacactcaagtggaccaccgaggctcgaccaatataaggccactggtcaactaagcatggccaacaaaggcccagatcttgccaatttgatggctaaacatagaagcatatctccctaaatctcttaaagttcaagagaaaagcaagagccagagaagaagcgagagcaagagcacacaactgaacctagaaggtgcattgaccacctacccaatgtaggctaggcccttagaacacttggggggcaatggctacacgaggaaaaaggttagtttcaaagcttctataaacgaggtcgacgcttcgattgctggcctcaggctagcacacaaagcgtaggatagacacctagacatacaccacgactcttaactagtcataggtcatgtcctaggtgaatatatagctcaatacaagaagatgatggcctacttaagctaatttcaagacttaaatagtcagtttaaaggctgtactaaaaggcaagtccccaaagacaacataacaactgatgcactcactcgactagccagttgcgccttgacaaccaaggcaaacttggtacctactcagttcttcaagaaactaagcatctttgtttcaaaaggaacagacaggctagacaaccaacattgatacacctacagcagcatacctccaagcaaaaaccttgctagaaagtaaggattaggggatgactgcagggtgtccgatcctaaacaacataacacacagacatggtatctcaatattatctctaataagtgttaccaagaaagaagctaaataggtattgacaagagtgcaaaaaggctctatggcaatcatgctagcggcaaagccaactgagtgtagaagggatcaaactacaacatcgaccaggcctctgaaaggctaaccgaccctggccttaacaggctggcaaaccatagaatcaacaacctagccagccactacctcaacaggttggccggccatagcctcattcaacccaccagacaatgctctctcaacgtggctagccactgagtctataccctaactagcccgatccacctacaatctactctcatacttctggtctatagtgaccaagaggtaaaccactttttgctggcaggatcccttgacaaaacaaaaaaaggagaagagaccaagccaactcaaagtagcatgtttgcccacaaagagttaccaggcccttcaaaaaacaaactgaggaaaaaaaaatcttcgtaagagacttactccatgaagagtatcccttgacagcaaagatcctgcagcaatcatgcttggaccttattgaaaaggttcccattgagttacaagataacaataaatgtgcctacaagcctggcgagtataacgagaacttagagttgactcttctaccaaaacattggaatagagaacatctcggta

SEQ ID NO: 25820 - DNA, 3905 bp, Cannabis sativa
cttccaacaacgaagaaaagcacaaaacaacgattacaggtttacatttagctaagaaagttggggctcaaaacatgaaactctaaagtgattctaaactagtggtgaatcaaatatccggagaataccaaacaaaaggagagaaaatggcttcctacatctcttaatctagagagttgattcaaaacttaaaagatacaccgttagacaggtccattgggatcaaaatgccctcacagatacgtttgtaaagctaacaataaattaaaatattgagcaatgcagagtagttcccatcgctcatctagatattttgagcacagatccactgtgggtaaacatcattgattaatccacctccttgataggcccgatctacaagtttttgagttctagggaactactaattgatagagttatagccagaaaaatccaatatcaggatccaagatatttgattcttgatggaagattttactaaaaggggtaatcagtaccctatttgaagtgcatagtcagaacagaaattagcgatatttatccatgaaatacgtgaacgtttctttagagaccacacatctagacccaatttgtctaagaagtttgtctggagaggatacttttggccaaaaatgaaaggattgtatcgattatgttcgaaagtgagaacaatgtcaatgctatactaatgttccaagagctgcaccaacataaataaccatgatgaatagtttgtggtcattttctagttagaagattgatttggtacgttccctttcaactgggaaatgagggttgaaatatgccattgttgccatcgattacttcactaagtgggttcaggtggaaccaacgaatgcagttacttctaagaagtctttggactttgtcataaagaacatagtatgttgttatgaccttccacacaagattgtatcagacaatagcaacaaatttgacagtggtcacttcactgacttatgtgtcaagcatggaatcacaaaaatcttcgcggcagtggccagaccataggcgaatgggcaagtgggtgaaagtttttaacaaaattcttatgaccacattaaagaagaagttacaagtgtacaaggctcaccagccaaaagaacttcctagagtcctttaggaatactagatgataaaaagaacttcaatgggggaaaattcaatgctcaatttattacaagtgtgaagtcatcatcctagtagaaaacactgtaccttctcactgatgggagacttatgaccctacccaaaatcatgccttacttcaggaatagttagatttaattgaagaacttcgagagtagtcacaagctcaactcaaaatgtactaaggaaaaattgcccgatattttaattcaaaagtcaaaagctagaagcttaaaatcaaagatctcatattataaagggtgtttcaagaatctcaggaactaggagtggaggttctaggacctaacagggaaggaacatatgagatacaacacaaggtgcataacggaacatgtcaatttcaaagacttaatggatccaagattctgcgagcttggaatgcagaccacttgagccaatactattagtaaattgggggtagtcagatcaattctcaattaaggcattttcttattccttttgtatgtacatctcagggcaatagcaattacataaaaatagatgaatttttaagagaaaaatgtgaagtctttttaaatttttagttgtgttgtaataagtaaccaagatctgaggttctcacctcacttgggtgatggtatatgcagcaatgtatacttaaaaattaaaatttcttaagcgttaatgctcattagttagtttgggagcaaaagtataaactaaaatccataaggttcaggcatttaaaactagaacattaggaaattgggagtaagttgctatcttaccatatttagattataaactcaccagttaacttaggatgacaaataaaagaaagaagttcagacttcagtgacaataaggaaaagcaaaaacatcaaagacatgaaaatgaagcctaaaaggttcagggttttagaactgaaatcccaaggatctagaagtaagtaattattttattctttccaacctttattattttattcttaaaaaggctataaagttgaaacctcaaagcttatgctgttagaattggaacctcaaggtgtttagaaagatgacatgtggcgtttacaaagtatgattatcttgatatggcctagagtaaagtccttccacaagggaaggtccaatctaggaagaaggtgggcccgagcccatttgaagcctagaaagcatgtctcccaaaaggaggctcatccaaatcaagaaggcctccaaccttcttgaagacagagtaaacgaaggcctctggatgatcattaggatgaatctagaaaggaattctaagaggcgcctttgtaagccctttgtagagtgacatggttgtcctctaatgcttggtcccacaaaatcagatcttgtctcctacgtcagatcaaggtattgtgcacaccatcaaaaggaatacctcttctttttccaacgattcctacctagcatatttttctattggagcaacaccccgtggcacctgtcctagactacatggtcctcattcatacgaaaagccttgcccaatagccaaattcctgccaatgggccttaggtcatgtatttcagtattttcccaaatagtgggcctaatttgcacggaaatcatagcaggtcacgggtctgcccgaatttggatcctagcctatgaaaacctcttttataccttcatgcagggaggataaaaccctacacattctctctagcctttcttcttctctaagttagaaaaaccagagggaaaccaatagagtaagaagctagggttcattagcataccaaggagtggagtcttgatttaccaatcttaccatcaatagtgcttcattgaggaatatttctttaattggctgctgaactccctttttctcatccccacgatcaagtctagaaaggtggtccactacttaattcttgttcccttttctatcataaatttccaaattgaattcttgaagaagcaacacccaacgaatgagtctcaatttcgcatccttcttggaaatgagatacttgattgcagaatgattggtgtaaacaatcactttggttccaacaagataagatcagaattcatcaaaggaaaacactacaaccaacaactctttttctatgggtgcgtagtggatttaagcattagcgagggttctgcttgcataatagatagagtgaaattgttttctctctactgcccaagcactaatccaatagcaaaatcactagcattacacatcaaaaggaaaagaccaatatggagctacaatgtttgcggtagtcgctaaagccttctttagagtcacgaaagcatcttggcactccttggtgaattcacatgggcacttttgttccaacaaagaacaaagaggctttaaaatctttgaaaagtttttgatgaatcttttatagaaccccacatgcccctaaaaacttctaatacccttaaccgtggtatgaggtggtagcttttcaatgacttctaacttaatcttgtccagctcaatacccttgtgagagactttatggcccaaaacaatgccttcctttaccataaaaaaggcatttctcccaattcaaaaccaagtttgtctactcacaccttttcaagactttctccaagttatccaaacaatcattaaatgactctccaaagacagaaaaatcatccatgaaaattttgagaattttttctgccatatcagagaagattgccatcatccactgttggaagtagcgagagcattgcacaaaccaaatgg

SEQ ID NO: 25821 - DNA, 4064 bp, Cannabis sativa
cctgcgagcatgcttgtgaacagggtcatcaataagatcacggaacggattgtagttgggatcggctggatctcgtaggaagtacagtactccgttacgcaaaacctgcaaaaagatagaatagtgttaataaggcagcaaactaaatttccagtacaaccaattcaccaactcaaggtggagaaaaaacaatacccctcgaagaagactgacaaatatgcttatttgtagcatgtaaacaattccgacaacccaatgcaccaatgaacttgccaatggagatgctgaaaagaactgaactctttgagccattgactttccgaacatccttatggtacatacatctagccaccatccacacattaatgggaaaacaccaagttcaatgacaagaaggaaagcaactttgatcattgtcatcaaatgcctcatggctgctaagaactgcctgaagagggacgggatggtctctgccattgaagcaataccataaaatctccccatagttaaaggctcacctctcgtgtaccgaaccaaagcaatgaacccaaggtagaagaaaactaaagaaaatatgaatatgtatccaacagcaagagttgtgacatcagatagtcgtgatgtgccaaaacttgctgccttcaaaagatctgcagcaagtggtgaacttatattgcttgagagttcatttgatccactagcattagcttttaacacttcagcaacctgtccaagcacaccattgtcttcacctccatcagacaaattagtaacagcagttaaagcattcttcaatgtaatatttgccaaagatagtgctgattctgttagtggcattactgttgacagaactggagcacttgttgtggagaaagcccaagatacataatagaggatgatccgaccaaaagagaatggcacaaagattacaacaccaagaaatatcatattgctggccaaaacctgcaaccaaacaaaaccagttttaatatttagaatcaatgatagtattattttaaaaaaatccatgaaaaaagatgaaattccattagaaatttatagtggtgtattatagaagaataaatattaatagatatcacccaaaaggtagaatttttaaagaaagatgaaatcacttatgaaacaaagcagtaataagtcaaagtcaggtttgccacaaataagtacagcacagacatcacaagctctggtcaaacttccactctacacgaatttcttttatcagtgaaaaaaaaatcatgtccacatttagcctgggtaaaaggaagaaaattaaatatgcaaagaccaaaaatcctctaaataaattgtggaaaagacaaaaggcttaaaattactaagatcaacagggcatggtagaaagaggatggacaatgaatacaaggaagtattagtgtgcttgtggaataaaacttactgtaaatgcattttcaaccaaatgaaagacgggaccctgcatgccaacaagctcgtcaaagggtacatcctctgcaccatcaccatcatctaaaccatcaaacatttgttcaacgtgagcctcaagacgagctgcttgcgcctcccaccgtgctgctacattttcagcattccttctaatcatttgacctgctccggcaattccctgtgcaccaccagcatcttccccatttgcatcaacaaccaaattcctattaacttgtccaggaggtcttcttgcagcacgagcaccatttctttccccttcatcatctctatcagcatcctgtcctccaagttctcgtaaatgcctaaaataatccctcagagatgtggccccaagaaatataaacacaatgctagcagaaagtaggaacccatgcagacaatcagtaaggataactgtggtagataggtgactcagaaataatctatgtgcttcaccaaaactccttacaaaagccaaccgccaaatccaaaatgtaatgaatgggatgatgagaagccaaacagcaagcacaaaacttaaacgcaaaaagaactgcagaacatggcatgctttcatggccatcccaaccacaaactcttgaaaaggaagccttgctggtgcattctcagcatatacaggagaaaaggaaaatgcatgcttgcaaacctgtcatagacatcaagtgagatcattgatctgtcaacagaaatatatcttccgaggcttaacacaaaaaatatgataaggaaaccaactagtagtgcagaataacgttaaattcacaaggcaagtccaaaacacccagaaaagtagtgtcaaagaaattcatctttaaaacatcgaccctgagacattataaacaataatcctcttcagcaataaatttgtcttcaaagaatagataacctaaaagacctccattttcattgatcacgcataaaagcatcaattatttgtggaggagccaatcagtcggtaacaaactataacattactgtctagaacggcaattcctatcatcgggacaactggattcttagttaatcactatgtttgcatttcattcatatctgaagaaatatgcttcacttggacatgccacccagaaaacccaacataagttgtacaaaagctataaacattttgtatcacttatatattcaattgcactaatatcgttgcaacatcatagcatcgataaagaataggcatttagagtagataaaattctagtttcatgattaagtaaaaatagaaattggaaactatacaagacagcagccatttgaaaataagtatttcttttcattgttcaactttttactatgtatgttctccttgccataacaagttttattggtagctcaaacacaggaacgagacaaggtagccgattccctttcctttaaaccctcacaacaaatagaagacaagcttgattccaagtccttgccttggccgactcaaataattggaaactataaacctcaaagaagcttcatgtttcattaaattccacaaaaccataaataagtttttcttgaatcaaaatgacaccttcccctaaatcaaatttaaattctcttaacaactttaaagttaaggatatctcattcaacctaaaaatacaagaaggttcgacattaacgagattaataccaaataacacaattgaattacaagaatattataaaaagataataatttcgcacctcgcactggcgagcgttgctgtgattgagccactgaaggagacagtcctgatgaacgtacttaatactcccactacacgcgcacggatacctaagcggatgatcagaatcagctgggttccggcaaatcctacacgcgtcctcctcgtcctcatcctcatcatacctcgacgccgccggagaagacgaagccacggaggcgttcagttccttctcaggcgatgaatccgaagccgaagccgcggcgacgctatcaggcgaagcagtatcttcataactgggtgagtcggtggccggagtggccggtgcgatctccatggtgggagttggggagtcagatcgggtgcgtcggtaggatggtcctcggaaattgtggcaaagctcggatggaatggagcgaccgcggggggaggaggagaggaaaggaagagagtattttatgaggttccgattgtacccctgaaaatgagatgagttgacggttgtgacctcctgagattttgtaatttacgagccaagacgaggtcggttttcttgagtcttgaccattattaggcttgaaaaccacgcgttttttggatgaggatattatgacttcgatattggactttgggttatccgacgggttgccccattgggcttatttagaaggcccatatttctccccatgggttacctcttaaattacactctatacttttttatattgtcctcttttatttttatcttttttttttaaaatctatcatttttacctcttttttaaatattgtaccaatttaaaattgtgtataatgtaattattccttttatattttaaactatttttagtatcttaattttaaaatattttgacactgtaatatccagattaaaatagtatttaa

SEQ ID NO: 25822 - DNA, 2557 bp, Cannabis sativa
atgtaattttattttatagatgccacgagtaatatacatgacatggtcaagaagataacaatgcaccattttcaattatatgcttacaatcattgctatgtgcatcatcatatgttgaggtggtgccttgtaataattaaatggccggtagagataaattaaggagaattgctaaaaaatattactagttgtttatattgttttcggtgtgatattaatatttcgaatctcgtataatttaataagtaaattttaaaagttatcgttaattaatcgtatatatatagcaccatctatatatgaaagtattaagcatcactagtacttaatatgctctgaattaaattgtgtgaaatgtcatatttaattacaccaataataatttataatagtacttaatgccttttaatattaaaaaatactaaaaagacaccaatagtgcctatagcacccctcttacatatggatatcactaagtcttattaactatcgagtctcatatgatttaatgtaatttttaaagaatatcactctaatcgtaagatgacacgtttaaaaaatactagacactattgatgactaataacataacaatgctctttaatattaatttagaagctccactgcaccatccaaggtgataggtcctgacacaccatcacaaattattatgtagtactatataatatatccttctctcaaaattattgaacaataataactttcccatggagatcgaaatcccatcatttccagttgttcttttctattcattcatcttcttcttgttattactggcaataaatgtaataataataagaaaaactattcaatcttcaaacctcccaccaggaccaaaggcactacccatagtgggaaacattcaccaccttattggctcttcattaatccatcacacactcagagatttagctaagaaatatggacccttgatgcacttaaaaattggtgaagttccaaccatagtaatctcatcaccagaatatgccaaacaagtcatgaaagtccatgatgttgtttttgcatcaagaccatcaattcttttttcgaaaatcatgttatatgatggtgctggtctttcttttgctccatatggtgagcattcgagacaagttaggaagattttcatgcaagagcttttgagtacagcaagagttgagtcttttagatttattagagaagaagaaatgttcaacttcatggaatcgatttcatcgaatgttggcggtgttattaatctaagggagaagctcaacatgttgatgtacaacattatttcgcgtgcggcctatggtaggacaaggattcacaaccaagagtttgtgcctgtgttgaaggaagctattgaggtatcattagggtttgaacttgctgatttgtttccttcttctaagttattttatcacatgagtcgttctaaacctaaactcgagaggcttagagaaagggcggcaagaatatatgaagagatcatccatgagcacaagaagaaaaagccagaagagaagggtgatgaagacttggttgatgttcttcttaagtatcatgaaaatgatggccatggattttctttgacaagtgaggatctttatgcaataatctttgtaagtactttcattttatatcaattagaaatgcatatttatttggtgaaagagcattcgatcggttaacgatattctttaaaaattattttcttaagttaattatgtgtgatattataaatacttaattatattaataacggtatgacacaaagaaagtactagacaccaataatattttttaaccattttttactctgtatttaaccatcacttacaatgtcattaattatattattttttcttttgtgatatattttattttctatttttccactttctctctctcacattttcctttcctcaatattgtacaagagtttataataattttctcacatcaccgtctatattttattcttcaaaatatttcatcaaaacttttacctcaaacatttatattacactaatatacacatatatatacatatcactttctctattttttttttctatatatcatttaaatattatatttctaataaattttatatttattacttatatatatatactattaatataagtacatatatatataattaaaagtagaaaatattaataaaatatttctaaagcaataaatagtactctaaatataaggaagctactattaatcactttaaaaaatagttaaaatagctcacttgaaagaggtgggtttttagtacttttgagctatattatgatgtttgagagcaattttagctcatcaaatgagagtgctcttaatataattattgattaattataaagaaataaagtcatgaataataaattattgttaggaaatatttgctggtggaattgagacttcatcaacatcagtagaatggattatgtcagaattgatgaagaatccaaacataatgaaaaaggcacaagatgaggttagagaagtctttcacagaaaagggttgggaaatgagaga

SEQ ID NO: 25823 - DNA, 2062 bp, Cannabis sativa
tttagaaataacttgcagtacataaactattcataaaaaaattattcatctaaaatatagggggaccataaaaaataaattgttttttttttcttctttaatttatgaggtggtcaatattattttattttatttcaaaatacatttgtcgtccaaaataaaaaaagttaaatgagggtcatgagtataccaccccatgcaatccccttcatttggctctttatacaaatcgaacaaagatacttcaaccatccaattaaatatatatatatatatatatatatgtgttcatatatatacacatggtagatcgatggtcaattaattagggcataatatataaaatttgctatacgtacttttattattattgatattatatatttatatattaatgaagcaagtttttgtataatatattattttgttttctatgataatatcatgattttatttagagagagaatagaaagcagatcatatatatggatcgacctagtatatattataaactgatctggtactagtgaattaataatcataaatttaattaattgtgtggaaattaattaataagagaatattattaattaatttccacatataattaataaacaaataataataattatatatagctatattaaaaaaccaaatatatataataattatttttacgaagccaaatacatattaataagttaataattttttttttcctttttattttgagtccaaaaattaagtaagaaaaagagaaaagtaaaagtatacatgtgcatgtgcctttgaatgttgaatatgtacatatattgatctaatgtacttttgtgtagaatttcaaaccattatttggaccgtcaaataagtcacagtatgtcacaatattatgtgtgtcaattattcaatagtaatgatactatagatatagagagaccaatattaatgatatatatatataataataataataataattagggcacacagtactatatgtatatactaattcaaatcgttttcagttttggccaaatagtcatcatgattttacatctccttccttaattaattgactcatgggaattaattaattataggaagaagatcctgatcatgatatttttaatttgtaagatatatatatatatatatatttgtgtagtttctatatatattattattggtctcctatagagactcgactatatgtatatatgagtttatcatgaccacaacacttgcttaattttatggcaaattatatatgaccaattaccatgcatgcatatgtggaaattttggtcatttttagctacaacatattattcacatcacatgttggtgaatttgtatgcagtgcctatcctgcctttcggaaacaataaggttgaaattaataaatatatttttcaaaatgaaaaaaaagaaatcatggacaaattaaccgcactatatatataataaatattatattatataaatattaaggattatatattgatatatcataaatattaatgtctattaaatttcaagaataaaattgtgtcactgtaaatttattgaaaaagtgtctgagtggaaaaaggaaaaaatattttcagaaaaacaaaaagaaagaataaagataaaaaaaaaatataaatatatacatatatgataattgtttagagtgataataaaattaattattgactataactaaattattaattatatattcatgacgagaaaggctcaaaaagttcgtaaatctttttcctcatcatgttcttgagtaatattttttaagaggcctatatagttaatttgagtcgtaaagaaaaacttaaataaaaaacaattttatagagaggtgagcataatattaattctaagtaattaattattagtcttttattctgaatatagtcttacggtacgtacgtctatatatataataataaattaaaaatgaacaatatgtcaaagagctttacgtacgtatatataaatttaatatactgtatatatgttttcaagtctctgcgtaatctcttaattcttttcaaaaacaaaa

SEQ ID NO: 25824 - DNA, 2327 bp, Cannabis sativa
aaaaatagaattcgatcctaatatttcaattaccactagcgtgttaaataaactttaaaacctattttcaatttttttaaaaaaaacttacataaaaaaatgtagatatataacaaatattgtcataagaaaattgacaaaatatatctttacatatatttttttgaaaacaaagattaactatggaatatataaaaagttgataatagcacttcttttattttatttagtaaacacaatattacaattttttacgcaatctacataaatgctaatattagtgatagtaatatatgcgatgagatatatatttatgatttagtaagtggaccgatatgactactgccaaactactcatcattattcgttataacttatttattattgtaaatttggtagcaatggacattaaaagttttgtagcaagtattattattattggataaaaaaaattgtacgtttaaaagtattttattttcatttaaaaaaatattattttattttttcttttgttttttagccaacaaataatgatatttagtagacaataacagcttcttccaacaaatgaatcgaaattgtttcttgttgggaacgccaaatccaatcaacttgttgaaaataatatctcttgccttttttttatgctgaaaaatatctcttctctttaaacaccaattttctttttctttcttttggttttaaatttgattgcaactttaaattaattaagtatggttattaaaattgtaataaaatatttgatgtgtgtgtcttagagagagagaataaataagaacttaattagtggtcgaacgagtaaagaaaagagctgtttcatctcaattggacacaattttccattaattaaaaagagtaaaagagatatagattgagattacattatatgcctttaaaaataacaataaataatacaaaacctgtttttagccaaacttgtttttaaagaatgttatttatttatttatgcatttttgtggtcaaaccaaaaagtatagagaatgatcaaaaaaaattgaacaggacaaacatcaaaaatgatataattgctataattattattattattatcattatttgttcagattagctttaagatccaacaacaactaatataggattttcaatagaaatttattagaacttaacagttcataacaattaaccatgaactagaagaactcagacccagaaggtagaaggctaaatatatatatataattaattaattatatactatataaatattaattaatagaacaaattaaagaaaatgagaaaaaataaaaataccgaaatgatcagcgccagccatagatgacttgagtgtaagtacttttgatccacctgaagcttttacgaaaagagcctttcatctttccctcaacagcgtaagctttatacccagccactcttttcttcctctgcaactcaggatcgttcaagctccagctcttcgatgtcgaaccaacaccgcttttcactttcttgatcttcgcttcgtttgccggtgccggagccgatgagccggcgtaattggcgctatagcatctcagatcgcgcatactcgtcggagctgctctgttcccgtagtaaacatccatctgcatccctcctcctccgccaccatctctacacgatcgagatctaaagttctccatttgtagagagagagagaaagaaagaaagaaaaaaaggtgagaggaggtgtgaaaatggaggacagagaagggtttttatttttgtttttgagtctctttgctttttttttttttccttgggggcgtgaataataggtatgcaactatttatctatttaattaattaattaattaataatattataaaatataaatgtttttggaagagctgaatttcgtgggtatacatagtaataaaatatagttaatttgatgtgaaaaaagttatgaataatttggccactgtcactaatactatcacactgatgtggcacgttttatattattagaacattcacaaaaaaaaaaattaaacaactgtattaaaaacatgttatagctaatactctaaatacttttattttatttttttaaaaaaattattatttatgttttatattcataagatattatttattgttttaaatatattttattaattattttaaattttaataattatttttatgggaatttgtatatgtatatttgaaattaataaaaaataaataaaattttaatgatatatcttaaaagagcattgctattaggcaccaatggtgtctagcacctttgcgacatgtcgcgttgcgattggctagcgat

SEQ ID NO: 25825 - DNA, 3402 bp, Cannabis sativa
tgagtcctctagaagttccatgggacccataagaatgatgtcttgatttatttaacatttatgagccttggtcaaagtcgcaaggttgacttttttttagttttcgaaaattaggcataacactatataatctttgttttgtattcattctcttaaaatattttaaactatcatttgatctatatattggaaacagtttttaaaattctaatttcaagctttcttcctagagctaagaaccacatatccaaatgctttaaacatatatgatgactactaaatattttctccctataaactatatataaactcaattcaattgtggtaataacaataacaacagatacatattacaataaagaaaaacaaagagaataaagcttacccaggatcttcatatttagcaaagataaattctaaaaaacttttctcacagctcttcaaagatttagtgaattcaattgtgcgatattttacaaaaaaacaagtcaaacatttgacaaaggcctaacccttggtcagcggtcacatattctaagggaaatcaaggctctcataagaccaaggcttctcctagtgctagtggtcgcatgggagaaaggaataaggatgtcatgtgatcaatgactccctcctatatcagtggtggcatgaaagaaagggaaatggattagggcatgcgaccgttgtatttcaccaacacttggaagatgttttggggggactataaagctttatgcgagtactgttaatgattttggtttggtcagttctcgtgtaactcaattaagggagtcttcttggacattttggaagcttaaaacccttcaaggtgtaaacgaatttccaagagatggcgaaagcaactccaagctgtagcgcaagatgtagtacatagccagtggcaccttctagtgtcagtagtcgcctactatattattttcccaaggttgggacttcgtttagcttgtctatcaacatgtctcttgaagatgggagcttctagaagacttttcaaaagtacaaccaactcaacaaagtcaagatagataatatttactttatgtaatttatatattattatttaattatcaatgcgatgcataatagagtatatgtaactatttaacccggagtgtggatgggcaactagtttaaccctaaccctataaaaggctatgatctagacctagggattggatccttttgatagttattttctgaatatcctattgtttagtttcttgagaaatcctagccactgctcatcaagaatagtctgagtttttatagtcgattgtctcttgagagcacatccaaagagagaaagttaaagagatctctagaaagggattttgttattgtattcactcaaacacattcattgagaacataatcttggggtgtttgaccatcgagatgataaataacaagtggattagcccattaccactagatcagaagggtgaaccactataaaattctaaatgtgtttgtattgttatcattaaaactaatttgtttgtttatagttgttatagtgttaatctaatcctctcgtttacgatcctcttagattagttgatgcaaaactgcattaacattttttattttaatttatagaagaaatatttgttttataagtagaattattatttggacacaatatatataattttttttttcttaacttggatataataaaatattttaatttttcttagaaaaaaatagtagaatatatgctatataataataaacattatataataccatttaaaaaaataataaacactatcatataaatattaaatattatatactaataatattttctatgaagattccgcaatatatataaacatatacaagaaaaatttacataatacatcaaaaattaaaaaaaaaaaaattcaaaaatacatcaacacggaaattattttatttttacactttaaattttattatttacaaaaatattttttagtaaaaataataaactgtttttttggttactttatagtttatttagttgtattgtagttgtcatgagggtatttttctagtaatttttggttgttttatagttgatttatagttatcgtgaggttaatttttcgttgtcttttttagttatttttttacttcttttgctaaacaaagtttatttttgtaattataaaactttagtgtatttttgtaaataaaaacagtaggttgttaagttgtaaataaaatattaaaaatgagtatttttaaaaatatttttttataaatgtttctaatgggagaaaaaaaaattgtatacgtatcctctgttataacaaacaactaatgtctattcttagtttttttctttttgtcgccatactaatcctcaattgtttttttttctttttttgataagctatactttgtgatgacataggattgtaatttgtacagaagctaatatatatataaatatatgtaaattttgataaggtatcctttggaatgatataagattataatttgtactcaagtcaatatattttgttatgagtacattatgtaatgcatgcatattttctccacaagatggtcccgtgaggatccgctcctaatgtggtgagattccccatctaatggggaatagagcagggatagaaattattttttatcatcgaatgttaaatggggcaaggacagagatggtactccttgtcctggaaatctgtttaatatttttattatttttgaaaaacatttatattttatatatttaatttttttttagtaaattagtatctttttcattaaattttaagttgagttttggataataattagtattgagtaataaataatgtgtaatattttaatttttatctaatttatattttatacatttaatttttaatataaactttatatttacattagggcgaggatgaagattaaaatctagaatattggcaacaaaactacctgaagtatacagtttgtaacacttaacccccgtaaattaattttttggtggtaaaaccttctgaaccatacttctattatgttatttacactcctgttagaaaagtaatgttgagtgccaacgtgtactactcaagtgtacatgtaatgactgcttagctttattttgaaaattcgtacataattagggatttattgttagaaataggctttaaattattaattttttaattacgaagatgtatttaaattttagatgtattaattatgttacatataaaattttatgtttttcatattttatgctcggtaatggtggaatgcgacgtttggcctataaaatcacttagataagatatagcatcttataattagtggggcaatatagttacacatttgaaatatcgcgagtttttgggagttagggattag

SEQ ID NO: 25826 - DNA, 2212 bp, Cannabis sativa
cgttttaagtttctttcaactcgcaaatggtctcaagtagtcctattttacgtacagcagagtactgcattgagtcattcattgttctaaattccaaaactgatctgaaccaatacaagaagaaatggcattctgcttttgttaccatctattgttccagagctttcacctcactattcaaatcttctccctcaagaaaagctagctataccaaaataccaccctcgtcttcccacactgttgtcgatgtcaaggtagacaatgggttcgaaatcgatcagaccaaactcaaccagctcaccaaagacaaagatgtttctaagcttcaagaattaggtggggtcgatggcctagccaaggctctcaaaactgatgctgagcatggaattcaaagtaacgacggagacatagcccaaagagttgaagagtttggctccaacacgtaccgaaaaccgcctaccaagagtttcttccattttgtgtggcaagcttttcaagatcttactattgtcattcttattgtctgcgctgcactctctcttggctttggcatgaaagtgcatggaactaaagaaggttggattgatggtttaagtatttttattgctgtttttcttgtcattggtgtgtctgcaataagtaactacaggcagaatagacagttcgataagttatccaaagttagcaacaacatccaaattgaagccattagagatggacgtcgccaacagatttcgatattcgaaatcgttgtgggagatatcgtttgcttaaagattggagaccaagtttcggctgatgggttgttcttagaagggcattccttacaagttgatgaatcgagtatgacaggggagagcgaccacgtagaagttaaccacaaacagaatccattcttgttttctggcaccaaagtggttgatggctatgcgaaaatgctcgtaacttctgttggaatgaacacaacatggggacaaatgatgagccaaatcaacagcgattcaaacgaacaaacacctttacaagctcgcctcgataagcttacttcggccattggcaaggttggtttaacagttgctctccttgttctcatagtcttgtttgttcgttacttcacggggacaacaaaagatgaatatggaaacaaaaaattcaacggcagcaagacaaagattgatgacatagtgaatgctgccgtagagattatagcagcggcagtcacaatcgtggttgtggccattccggaaggtcttccacttgctgtgacgcttacacttgcatattcaatgaagagaatgatgactgataatgccatggtgaggaagctctctgcttgtgagaccatgggatctgccaccaccatttgcactgataaaacaggtactcttactatgaaccagatgaaggtcaccaccttttggcttggtaaagattctgtcgttgaaaattcttactcaaagattgcaccatatgtggtagaattatttcgtgaaggaatagctcttaataccactggtagtgtatataggccaagtttgggagcagaatttgaaatttcaggtagtccaacagagaaagctatactttcttgggctgttgaagagttgaatatggatatggaggaagtgaagaaaagttgtgccattcttcacgttgaggcgttcaattcccaaaagaaacagagtggggtatcaataaaaagaaagacagataatacaagatgggtacactggaaaggtgctgcagaaatggttttggccaagtgctcaagctactatgatgcttctggaatcgttaaagatcttggtgaaaatgaaaaaattgtgtttgagaaaatcattcaagcaatggctgccagcagccttagatgtattgctttcgcacacaaacaagttgaaactacagagaatgaaagcttagagggaaatgatcaaacgattgaagaagatggcttgattctattgggcatggttggtattaaggatccttgtcgtccaggagtgaagaaagctgttgaagcttgccaaaatgcaggagttcacgtcaaaatgatcacaggtgacaatgtattcaccgcaagagccatagccacagagtgtggaatccttaagctgggccaagacatgagtggagcagttatagaaggtgttgagtttagaaactactcacaggaggagagaatggaaaaagttgacaaaatctgcgtcatggc

SEQ ID NO: 25827 - DNA, 2421 bp, Cannabis sativa
aatattgttttttaaaaatactaattaaacatcacttatttttgtactcatttctaaaaataattttttaaaaataaaaaataaaaaacaatttgctctatgtttttagggactaatgtctaatggtgcattcaaaattcttggtgcggttggactattgtggctgttgacagcaatcgtgccttttcgaaaagtttgtctggtcgagataaggtggatttgaccttggaaacaaaattgaaagcaattcttttggctttgaattgggctatagagaaaggttgagattcaatggttgtttgctctgattgttggtagcagtttcaactttggagaagaactcccaaactagcgcctcataggtgttttcttcaatattttatctttgttggttaagttttaagtttcttgtgtttaaatttagtaacgtgacttgattacaattgttaatgttttggttgtttgaagacggtcaggtatcgaagaaggattgaccctgtcaatcctattgatttaaatttagtccctgaattgaggttatcaaagtagtttcaatggaaacatcgttgttggcttgtttagcaaaagctaggaatgcttgggtcatcttataaaaacgtaattgatgaaacaacctaatgcatgcatatcacgcttatgaaagcgtttaaacgaagaacactgagagtgagagcccaatacaatcttcactgacaaaaaattacaaaatccctcaatgatctccattctccatagattttctttgccgagctataatactaatacacattcggtaaaggataagtagttccgtgagactaaactttgttcaaatgttcacttcgactcacttgaattctagtaattttgatattaataaaacttattatgaaaaatcatcattttgatttttgcctcagtaagccagtaaattgacatcaaaagaaatcagtcggtaattccaacatgttaactaatcctcattggcatcatcgtaatttcataacaataaagataattatattttatgatgtaatcgcacaaaacggctacatagatcaattaaaacaagatcacagattcctatcaacatgccaaattaaaatagtttttctcagactaatcgtagcatcgccggtcaaaactcttcaagagctaatgtcgacgtggcatcggtccacacaaagaaacatttccttttatctaattgaattgaaacatgttaaatttattataaataaaacaaattaaattttaaaataagaagcctcaggaaagccagtaaattcacatcaaagaatttcagacggtaattccaattgtaaactaatcatcatcggcctcataaaattgatctttttttgttcaaaaatcaagtaacataatttatgtatacgaagatgtaatcgcacaaaacggctccgtagatcaatgaaaaataagatcaacagattcctatcaagatgcgaaaaaatttgttcttggaccaatcatagcatcgccggtcagagcatagagctaccgtagacgtggcatcgatccgtactaaatcaaatgcagtaaaacgttgttaaacattttaaatttcaaacaaaattgccaaaccctcagagacccgtttaaaatcacacacacagagtgagcaccgtactcaaaactcaatcccaaccaatcagcaagagccccggaaaacgacaacgtttccacagaggaaacgaagtcgaaagggttttgtgagtggtgaactgggagagactaatgggtacgattgtgaaccctctgctgtttaaagtgtcatacggcacttcctatcaattttaggggagtgcttcctcattgggatctttaaccctagagctagcacaaggattatccactgttcctaacattggaggcaaagaaacagatagccaatactcaaaactacacagatgattgctataataatataaagaatatcaaactaggtctagagaataacttgaaaaacagacgatgagtgaaagagtggagaggccgctgctccgagcgaagggtaagggtaagaatgagattagcgcagtatttatagataattggattaggtaacatttggtccctccccaaatccgtatgagctcagccctaaagacacaagggccggcaactgttgtagccccaatgggcctggtcctttggcccattaaaaataccttcttcctttttgagatgaaccatcaaaaataagaaatacctgatattgaacaaaagtttaataataacttcgagcacattaacagcttcttctctaaaatagaagttttaaaaaatttaaaaaactgtaaaaaaaacaaaaacactaccgcaaatttacaatttatactctaccaaaaaaattttagtacagatatatgtgcataattttattatataaattaaaat

SEQ ID NO: 25828 - DNA, 3198 bp, Cannabis sativa
ggtggcccgtcaatggcggcgcagccgcagctgggacataaatgcgagcccataggttggtgtttttgtccatgacaacgtcctttgatgtgaccaagtttttgtttagtgaccatgtgggtgggacattggggatgatggccggcctttcgacgcggccgtctttagaaactcgaattaggccttcgatttcttcttccacggtggctccaccatttaggttgtggtggtggtggttcttgtatgagcggttgaaccgtgggtccatggaaatagcagccattaattattttagtagaaataacaaactaagactgtaattaatgttgtagtacttctgggggagtagtattatgaattgtgtgattggtattgggacttagaaggtgtttatatagataggaatacataagagaataagtaagaagaatattattgttagagaactcgtcatggcgatctttctttttctatattttataatatatatatgttgcaagtgggctatgtatgaactcattcactgcattgtatatccatcaccttagattctctcatggatatatctgagatcttccaaatctcatttcgttaccacatgatcgatcatatatttcgtggcttgtaaatttattttgattcccttatcttcaaatgaaagttgattttattcactggtgtgaaaagcagggaggctctctctcgatcgatcgatctagaaaagtaaactttgctactagatatatagctttaatataaatataataaatatatgtatttatataacctaaaacaccacgtgcgaaaggtgttgttaaattgaaattttttagacatttactaacttcataatacatgtagaaaaatatcattaattttgcttatctatttcaaattttgttattcatatgtactgttttcatatttggcccttttcataaaaacaataatataaaagacaaaaggaaattatttccttatatttaagtttatcaatattggtagaatcggatacatttcatcaaatccaattctactccttccatttcaaatatcaaacactctctcttactcacttctctatctctcgttctctgaactcactccaagaattcgactcacaacccaccatccactacttcggtcccttctctccacgaccattgcgaccacaaacacaacgatccacaaacccaatgaccaccgtagacccaatgactcacggacctaacaacagtaaatctaaataaagcgattagataaaataaataatgaaaagtaaaaacaataaataaagagaacactagaatttttagaggttcagccccgtaacggtggtaatagcctactccccttttaattgtattgacttatgagacaaaaaaacaaaatattctccttctaaagctcttgtaatagatctctgaataattctctcttagatcgttatttctctcttgagtgttatttttgaattaatttcgtgtccctgaatagtgagattaaatcactatttatagggactcatatattagaaatattagtaagtataaatttagaaaaatttttttaaagtaatctaaacataaaaaatcaaattttcctattgtaatatatacatggcacaaatatcagcctaatatatacatgaaactaaacaacctatacaaagcaaacaatccatactcacacccagccatactagatcacaaatttattaacttgaaatgggagtagagtcttatactcttgctgatttgtgctttaaatttgatattcgtgtcgttactttacttattataattcgtggctttgagatcatgtttgctaggattgcatgcagcaactgattttgagttaataaaaataaaaaaacactcattagtgagctcttagtttaactagttagtaattttttaatttattggcacgcagtcttcttctttaattataactatttttttttggaaatgtttagaagtttcggagacatattgaaatgtataaatagtactaggcaaccctggctaattttgattagatgatcactatggtaattatgatggatatccatttaaattccaataagtacatcatgcaaatggccaagtcaactttattttgagattatattccactatactagctactttttttttttttttttgttgtactttcttttttttttcaaaatgttcaagtaaattattccatcctctttgtcaatatgttgtttgactaaatcgatatatggaatcccaaaagtgaaaatccgtgtatgctccgtgcaaacgcaatcacaatcacgccattgggaagaagtttctccgatgtcacttgttcttacaaacaatattttattaggggtgtttaacaaaatttacaaactgtccaacttaaataaactgtccaaatcaaaccgaataaatcgatgaaaaatacaacccgaaataatacaatgaaaatccaaatcgcctaataaatatattgggtggtttataaattattctaaaccgttcaattaatccgaataaaccgaattaaaccgattctatatttttttgggtaaatattattttagaccatgtgttttgcaaaagttattaattggaccctctatttttttaaataacaaaatagaccctatatgttctaaaatagtaaaaataacaattttcaaatataattttttttaaaaatatataaattaactttaagataatttttaacacggacaaatatagaaaatttaaccactttgtcataatatctctagattagattattattaagttttatttttacaaaaaattagttcagggtcttatttgtacaattttaaaaaatacaaggctcattttatcatttaacaaaacagatagtccaattggtaacttttgtaaaacataggatctaaaatagtattataaaaaacctgtttcttcatcaagaaatcagtttcttagtgattttttctgtgattcatctggcaataatgctaattccgacgacttttttggcgccgatggcaacttccacgacttttccggtaccgttatctactccaatgactttttcggtgccgacaacaaactccggtgactttttcagcacaagtgacaaatctggtgatcactgtagtttcattaattttttttttttttttaaaaaaagataaatatgaagggaattttaata

SEQ ID NO: 25829 - DNA, 3166 bp, Cannabis sativa
atagccatacttatcaggagctttagttgctcttctctctatctcgagcaagttggtatgttctgagactggtttgagagtcactaacaatgctattttcagcagtgacttcattagtctctgtaggtctagatgaggttgtgtccacctcaatttggtctttattgctactgttttttgatgcagaaaccatgtcatttcttttcatatccatttctccctcattgaacacaacatccttgctaataatgcatttcttgtgcctacttccaagcaccatagcttgtaaccctttactccatcagggtagcccaggaacatgcattttagggccctaggttggagtttatcctgcctgcagtgagcataggcagagtagccaaatacccttaggtgttctatcttaggtacatgaccagtccaaaattcttgtggagtttcaaacttgaatgggatagatggacacctgttcactaagtagcatgctgtctttacagcttctccccaaaaagatctatccaaaccaacacccttcaacatacaccttactctttcaataagagttctattcatccttttagcaagaccattttgctgaggtgtatattcctaacaattttagagattgtcctagctatcccatgttccttacaaaattcatcaaattgctttgagcaatattcccaaccattgtcagtccttagttttctaattttgcatctggtttgattttcaataacctttttcaagtgacaaaggtattgaaggcttcatccttgctcttcaagagaaatacccacaccttcctagagaagtcatctatgatgctaatgaaatagcttgcacacccaagtgtcttgattccagatgggccccaaagatcagagtgaatgtaggccaatttctctttggtagtgtgttgtcttgtcgcaaacttgaccctgcaacttttagcataaacacactcttcacaaaaaccaagtttgccactcaatccaccttgaaacaacccttgctggtcaagcttagtgaggcctatctcattgacatgaccaagcctcaaattccataaatgtatgctgtcatttttgtcattattgattgcaggtgatgctgtcccagtagttgcagtgccaaccatgtagtatagaccattcttgagtctgcctccaactaccaccagtgagccttttcaaatgttaagagtgccattgtctattctaatagtgtagccaagattatcaaacatacctatagacaataaattccttttgagattaggcacataccttacattttgtatagatcgagttaggccatcatgcattttcattttaacagaacaaattccaagaattttgcaggctttgttatttcccaaaagaactgtaccaactgaatttgcttcattcataacttgtaaacaggtgcttgtttggagtcatgtgaaatgagaaactagagataagaatccattcaacactagaatcttcacttgagacaactaagacatctgcagaatcatagccatttgatgcaatatttgcttcacctctttccttgctcttgtctctcttgagcttgttcttcaacaggtagcaatcatccttgaaatggtcttctctctcaatagaaacatttctttcctactgcatttatttctgttcttggagttagactgacttatgtccaatcttggatttcttgaagtctctcttttctgatcttccttgagcaaataatccttccccaccaatcttaaatttatcatctaccttcttttgaatttctttcgagttgagtgcagccttaactttagacatggtcagtgtatccttttcataatgaattgtgtccacaaaatgttcataattctttggtagagaactgggtaggagaattgcttgatcttcttcttcaattttaactccaatgttttttaggtccaagatcactttgttgaaatcatcaaggtgccttctaagttctttagtttcatccatcttcatggtgtaaagcttcttcttcaggtatagtttattatcctgggatttcttcatgtatattgaccaaagtttattccacagacccagggcagtctcttcttctacaacttttcaaagtacttcatcgcccaagctcaacaggattgcagtgtgagccttcattttagtttcttgggagactttcttgacatcttctccttctttagggactgatttcataatggcatttgaatgccttgatgcacgagtggtgctttcattttgattcgctagagaccaaaatcattgacccctgtaaacttgtccacctcgaatcttactgttgccatctttgtgttcaagctttgatcttcaggattcttggttcctcaacaacaacctgtgctctgataccattagtggtgaatcaaacaccatccaagaacataacaaacatcaacaagatcaattgaaaacaataaaacatgaactagaaaaacaataacagcaagagtaaaaatagagcaagagaacacaatgagttacaaggttcaattacaagttgtaacacttggatcaaatccataggaggaaatgccttgaggctttgactttattacttgaagatgatgctcagagatgctacaattatgaacaaaaccaaaactgaatggagccatgctcctactcgaaaacaggttcactcgagagccatgagttataaacttctcatgctctttacaacaaaattcactctcagctcacacacagatcacacctataatgaatcactaaatggtctttatatatagaccaaaatagagagtacaagaacccaacaactttaacaaaattaactaactaattcaactataacaactgtccaaaaacaaacacttgcaccagtatataaaccccacattcgaaaatggtaaaataagaccatgagctcaatttttaacaatttttttttttaatataactaactttaagataatttttaacacaaacagattcagaaaatataaccagttttgtcataacatcttgtcattattatttaagttttgattttgacaaaaaatcagttcatgggtcctatttgtacaattttagaaaatatagatcagtttattttgtcatttaacaaaacagagggtccaattgataatttttgtaaa

SEQ ID NO: 25830 - DNA, 4178 bp, Cannabis sativa
acattcgataccaaaagacttacctcattatcactttttccttttggatcaaaatcacttccaccagctgcccctcctattttgtatggtgatagcgcattctttaatgtctgaagaagaaaatatcagtttttactgaaacattcatagaactgaagcccctaatctagtgaattccaagtaattgtggtagattgagggatttaaaacatatgagatttttattttattctgtcataatgtagaagataaatcaaacaaaatacagtagtacctgttcaaatccaagaaactttgcgatacttaagttcattgatggatgaaatcgtataccacccctacagggacctaaggcctgattaaattgtactcgaaagcctcggtttacatgtgtctcacctctatcatccacccaaggaattctgaagagaaccatacgttcaggttctaacaagcgttccatgatgttgacataactgaaaacatgtaagagacacattcttagaattcttaaaatcctccattaaaaaagaagaagcagaagatgaccaagccacatcttttacagaactcactgagaattttttgcaatcactctttctagggcatgaacaacttcttgcactgactgcacaaactcaacctcgtgagggtcccttttaagtgcagcttcaacaattgatccagcagtttttgacataagagctacatttaaacataatccaggtgcattgtcaaagagattgcaatggaacgtaactaataaattctaacatctgcagctcattcaacaattacaggggaaatgtaataggtatacaaaaatcaaaactataattatttagcactggtcaatatatattagcatcccaataaatttagcatgataaaaggttttttgtacaaaaatacatcacacaacaacagactataagagcattactcacaaggatcaatttcttaaatgtttaaaaccagaagcaacatcaaaataatgccatacagaaggaatctcaaaatgaagataagtgttcaaacttcaaagcagactgtacaaacctttaacataaataggtttgtcaacaataattttatccttggaagccatctgaagtcgaagagcctctttgtgaagtaaactgttgttgtgctcttccaatgcactcatctgcatattccggctgccctcatttccataagggttccgtctatgcttcctcccatattctctacaaactgagcaaaaaatccttgctgtcccctccttgacatcaacataagcccatttataggtatcagcccattcctctctccatcttttgaccaccttcttcttcctctttgctggttgtgatttcgacatatcttgatcgtcgctgggaagttgagataccattaccatatgcttactatcatcttgttcttcagccgaaggttctcgaggtgggccaccaataagtggcgtgttagaaaatgaaggatcgtcatcgccaggaccaatttctagatcaatttcttccccaatctctctgaccactaagtggtgcctttgagcctgctgaatcaagttcatgtcatccatcgcagaattcatccctaatccactgactgtaagcagcattcagcatggcaatctttgaaaagcctgttaaacataagacaataaattgctttgaataaactactctaatatttttatgcaaatagttttcaaaacatgacaaatgaaatcttaatcttcaaagtaccaatgttgcaaacttcattcggtgggaattttcaaaataaccttccaaaccaagggcagagttgacagctggcttagctaaggtgagctataaaaagcatgtatcttcaattttgcattataacttaccctgcagttttttagcagctaataagtgtaagtatataaaaacatactcgcaaatcgaatccagtaataaaacacataaaagtttaagtacttagcatttcagacatacaacatgatttccatcccctaaatctaataagagattcagaaacaatcaaccaccaaggtgcaattccataaatacatgtgtccatggaactgcaaaatccttaaatttcctgctactctagcagttactactcaacttcagttaccattcgagaattcagtctattaaaacaaggtttatcttgacagaataagctaagcaagtaattcattacaccaaaacaaacttatatttatataaactattttctggtacgaaaatcaagaaaacaaagttgtacggatcccaacagccaaaaataggagagtgaagagaccccatttctagtaaagcataatacctttgactctttgagactccccaagcgcaaacaagacaattatcgatttacacaaactttaaattacgccaaaagagaaaaaaaaaacaaaattaacacgcataaagttaattcttttagctaatattcaagaacccagaactacaacttcaacaaattttcggcttttataagaaccatgctatatctttcgattttaaacaatacccagaggctaatttgcaatttaaaggcatacccagaagtcaagatcaagaaagatcatcttttaccgtagaaatggaagagaaaatagatgaagttagcgacactgagttcagactgaaactggcgcttattaaaaaactcttccttctccaaaacttgaattcacagtaaaaccttagccaggtgggaaattcccgaacagaacgagtgagggtgagtgagatcttactccgacggtggataatttaggcctttgatcagattcttcagggagagactgtagatagtttaacgacaaaaaagaaaaaaatggaaactttattcggctgcgagagaaggatgtgagttctactaactgcaattattttcgtgcatacgtaattataattataatttataaattaaaatgctaatttatattaacaaaatatgaaatcacacattttaattgtaatttgtcgcgcgtgttctgcacgctatttttcaatcaaattaaaaattatgatttacttaaaaaaagttataattcaactactaccaataaataatttattgtaagaagaaaaaatataaattaagttaaagatatacgttttttttttttatatcatatacgaaaaacgaatttcatgtgtaggtatatttattgttgtagtacagtattaaagtttattgattttttaaaaggaaaatacgtaatgtaaataaaatatcagattattttctaacaccacttaaatttaaagcatgagcatctatgactaattgagtatgagcctaatgcaatttgaatataataaatcgttattaccatcattcttattatgtatgatttttttataagacaaaattaagcaatatcattttttaatacaaaaaaaaaaaacaaaactttatgtgtaggtagtaatgaacaatgttggttgataatatggttatatttacatcattgttactaatattaagattttaaaatataatttaaataacattattaaattaaatacttcaatgcagcctctttaaggaaaataatacaatttggtgtcaaatataatactaagaataaatcaaataacccttaaaaaaccaaataacatttgcaaggcaattgacaaattaaatagaatcataatttattaaatgactcgtttttttagttagtatatggtaataaatcttcctctaaagcaataaatatatctaatagaattattagtttaatggtgtcttttaattttctctagtaattttaacaaaatatattattatttaatagaatattattaattaattttatatatttatatatttaaaaataaaaattatataaatattttcatatgagaatattttaatttaaattaaaatacataaaatatgatatatatatatttaaccatataatatgatatattttatcgtatatgtattttttctatattcattcaattgtagattgtcgaatctcacttgtgtttttattatctaattagaagatttgttcgtagagtattcaataatactccaaagttgttgcaggtaatttttatagaatgaatttaatagcgatgcaatattagtttttatgaagaatgaatcaataacgaagttcatatttataagtgaaatttattttgttaact

SEQ ID NO: 25831 - DNA, 2423 bp, Cannabis sativa
ttatttataaaaaattaaataaagagaaaacgataatgaagggcattatgtagagtttgacctgttatcggccgaaactgcatagctgtttaaacccaatgcgcatgaggttgactgcacaaggttggattcatccatcagaccatttcaaatcggaagtcaattttactcgaaccttaaatgtacacaaacaaacaaaaaatacatacctgactatgataatgaatagtatttgtacaaattactagaacaccgccaattggcgaaggaacagcaagtagcttgtaggcatcattgggcagattctaaagaggataaagttccaaaaacaaaacaatgaattgtaaatattatttacacaagaataaaccagcagaaaatgatatttccttcaatgttttcctaataatatttgcgcaaaacgttaaaactataaattaaaatcttagttaaaaaaaataatgttcgaacttcatagcatttaagtaacttgcaagttgcaagtacaaagtcataaaattaatcaccatttaaatttaggttttccatccagaatgatacaaatctttgactatgaatgtcttatattcgattgccaaaatttagcaaataatactattgaagttatcaacaacttgaactcataagccttaccccaattgtacacttataaagctggttgtgtctttcataagtctccattggagatggcgtgcattgataaaatacagctaacttggcaaaaaatcacctccaatggtgttccaaaagtttggcatacaatatagtatgatgcaaaatttgcatcacaataaatactttacttttatgccatttttattattttataatataattgtatttagttatgaatcccaatatagcatataacgaccactttcaatgattagcttaagaattctgatattttattcataatacttacaacagctgaccaaataagaggatgttgcttcaaagatgtgctgatactaagcgccgaaatcatacaagtgtggtgtttccaagagacacgcccagcccaagtaagctctcgttcatgaaggatgaccatcacaggctcaatataacctgagtgaaatttgtccatgaataatataacataaaaagccacctaaagcaaaataacaataaatctaacattaatgaaaccttaaagtaaaaggctaattaatctaaccacaaaaaaccttatcaacaagcacattcactttagttgtatattaagagcttattctaattttctaatcgtacaagttacctatgcatagcattttattataaaataaaacttgactttctcctcactttacaaaagaataatcatcattgtgtgcacagtataaattttggacaaaaatatagatttcaagcctagacaacaaaatgtaaaagatattacatttcgaggaacaagcatatgaactttttgaaatcaattccagatggtcaatcaccaaccaaaagccaaacaatgacaaagcaataaaccaattctactttttggctactcaccgtgtacgaaaatgaagtcttttatatgcttcatgtcaagatcacgcagattaattatgtaagatgattcgatgcgagcagaaacagcacctccagaacccaaagcatcttcttccccaaccaaaccagaaccagcctgacaaccatagttccaacattgcaggaaagaggcatacttaaattactttttaaaagaaatacatatatgaaaccaataggccaaaagtttattgtcaaaagtagaacttgctagcagaggaagctaaaacacacccacccccaattatttttaaagaaaacaaactttcaaagttatcgaaattttcttagaattagcccttaaagcaaagaaaagtttcatgcccagcacatttctttctttgcttcaaaatctttgggagtatttttacatcgtgtatgcttagcgccttaacaatgaactattttcatcgcacatagtataagattgtgatagaagttgaaaagataattaaaacaaacctgtgtgggtttgagcattatcatttgtatatcatacacaagaacacttgcacatcttccttgaggatcaatctttaccaatggacctctcgcaaatgattctctgcctcttttcagatgaagccactctggaccctcaaaacagtgcatagagctgaaaattcaatactataattaagcaccatagactaaaaaaaataaaatcaaaaaaccacgaaatgtaagctaataaaagaaaaattgcaggcctgttaacttgacaaaggagtagagagaggtgggtggggaggcaaaatacacaactacaaacaatttgatggttcctctagacaacattaagtatcgagccagtaagattttaaatgctaaagtcaccaaattctcag

SEQ ID NO: 25832 - DNA, 1761 bp, Cannabis sativa
aaattgactacatcttaatatatatgttattcttataataataggattattattatatacttagtatattagtagtatttagcactatttagaaagatagatgcgtaattctctatcgaaagataccacaatccactcccatgcgtataaatctcaaccattgacatcatcacacgtggctccaaagttatgggtcctcaccaaaccttagacggctcagatcacatcacattctctcccactcaaacttatccgcttcgcatgtcggcgctacccgtttaatttgctgaacagcccctccttttctacttaattacattctggccccatcaaaatatttctcacaacatatttaaccaaaaaaataaccgtcaaaatatcgacacgtaaaaaataaaaacaaaaacacattttttctctttaaaaagaaaaacaaaaaacagagaacaagaaagaaagaaagagagagaaagctctaaaaaagcgggaaccatctccggcgccggcaatatcaatatcttctcctccgttgagtaaatagggctttcaaatacaccatttccgattcttttgcctcaccccaaaaatatagttactaaaaataatcagagagaatccgcatagatcgggagatttttctctctatctgaaaatattattattattatttgttttattttccttttttctctgttagtttacattcaaattaatcgaagaagaagaagaagagggtttgctctgtttctctcttactctgttttttgttttttaaagagagagaaaaatggaacagaaaggttatttgttatcggcgttgagtgttggggtaggagttggagttgggcttgggcttgtatcgggccagagcgtgagtaaatgggccgggaatttaccgcccaatgctataaccattgaaaaaatggaacaagagatgttgaggatgatgatccatcatggcacagaagaaactaaagatcaagtcacttttgatgattttccatattatctcaggtcacacactcagattcaaattcagtattcatcatcatatcattaatttattattatctattatccctgaatcacaacacagaacaatatcttctctcattattattattattattaatgtggataagtataaaagataatgaggattttctagtttgtgttactttatatatttttatgttatcaatgttgcatatataattattgcaacaatatatgctaatgtttatattattgataattacatatttttttattattattattcaaattggtaattacatgtcttcatgttaaaaaaaacattatatatttcatatgatacgtgtcataatgtgtttttgttatggcaatatggtggcccatactctagcttatcacattttattatttcattgcataaatattttatttttattcttttttttcaaaaatgtgtcattgtattgctgaatttttggataaagtttcttacattcccattacttatttgttttatttatttatttatttttgaataaagattcttacttttatttatttattatttttttctctcaagtagatattctttaatttcttatgtaaaatttatcttatgtaatttgaaattgtcaagattacatacaatgtcaaattgattttgttacttgtttcttttttttttgttgttcttttactccaaatttttataaagtttgaagattggttatcaatgacgaagataggggccaatttttttttttt

SEQ ID NO: 25833 - DNA, 2717 bp, Cannabis sativa
  modified_base (46)..(51): a, c, t, g, unknown or other
  modified_base (325)..(355): a, c, t, g, unknown or other
caaatcaaacctagttttctatatcagacaactagtagatgagagnnnnnnttccttagtgatttcagcctcctttattgttcttcaccgttcgaacccttcattgagtgccatgcccacgcatagcaagtcaagtactcaatcatagtgagtaagaaagttgtaaccaaacccgcaggagagaaagagatccaggtcagatattgataatgctctgcgaaagaaaggaatcaagggctaaagttcttgaacataaggagtcattatattctgttgcaatcaatataaggttttcttaaattcttatgtgtttatttcattgttnnnnnnnnnnnnnnnnnnnnnnnnnnnnnnncatacttgttagtaaatctacatcttggtaaaatattcccaacaatataaacccctaaattgatttgcaccatttgatggttccctctaaaaatttggctagaaaaattattgaattgcacaggtaaagaggagtttcaccagtgcaaatttgtacctgcaaaaacgttacttgattaaattggggcatggaagccccctctttggtcgaaaaattttatcgatgcattaacacaaatgcatcggtaaatgtgacatttcttttagtgtgtgccaaagcacagacttcttcatcatgatctagagcttggacatatcttctaattactcattgcgggattttcccctaggtgggctcctccagagattaatggtattctctcgtcgcccttggagaataattgagatttccaagggtgttgttgactattgccctagagccactcctggctagattgaaactccaaggttgcttcgtatgtggagcatgcattgtaggagatgttggccttagaggtacccaaatccattggtgtaaataacctaatttaaaaagactcttgatctcaacttgtatagcaatttacactcaccagcaatgtccccaatatctttatggtattcttactctcctagccttatctttgaacaaaggaggagatttcttgtaatggacttatgtgtgggtggtagggaatacattctcatgaattttaatgagctccatatattatgtgtattgaggatcatatcctctttccttttttgtttccagctttggtgctaccctacctagaacatttttccttcaatagttgctcacttattggatcatgctggcactagacattgttgattaagttggatactggttgtggcctctaagagatacactgaaaccagttggcattcctccatagtccatatctggacaacgtttgtggcataccagactatgagactccataaaccctaagtgtagaagcgtaggagacaaatatttgtaaatatactccctgaaatccttatggttggagtatttgagagggtgttagatactgactcacgaggtatggcatctcatagaaccttgtgtcaaaagataattatgaggggccatgtaattgtaccctcaataagtaacattttgagcctcttccatatttataaaatttagggcctcttttggatttcatctaggtttttggaatcattatcgttaatgacccattttgtattagtgtccaaattattatttaacagatttagggtttaaaattatatttagtcttagatggtgtacatttagctacaagtagaggcgcaatctagtacatttcgtgaaagaaaaaaatgtatacttcattaattccttgattatatgtgtacaaattatatatttatatatattgaggaatgctactgaagttaatttgaattgcattctatttcagaatcttcatcaaatacatgacatgttatattaggctcattatttttggtaggtatgcttttatttgtaatgcttagaaaagtgatagcttaattttgtttttatgacaatgcacattgtacctaaatagacatttagtttacttgtcttttaaaaagtttaaaataatttatagtgttgaatctgggttcaaacattcagttgaaattatgcaaaaaaaaaaagttaaattgctttgtttcctctgtttcctgctctctaagctctcgagctggcgccatggaaaaaatgaggtccaagaatcatgggaagcagccatctgcatcaaagattaccaagccttcaaagaaacgttgaccgtcttcgtctggagatgtcaagaaaactaaatcgatggatgcaattctaggaattgagcccatcaatttcacagatgaggaagataacctacccgaaccagatactaaagccttccaagctctttcacctcgatcatatcttcgcaagctgcagcagcaagacgatgttcgaactgattttgctcacttcctagaagctaataaacattgcagtagggatatctctcaaggtaatacccttgttcctcccatacttcgatcaggcttagtagtttgaagtttaaatttttcattccagaatgttgaaaaagctgatactgagaagtaagtgtgaagattacaatggatgatattgaggaagaggtttcttcctagaatgctgctatatagtatgctatgttttgggtgccaatccaccactggaggttctcgaagggtttgctaggcgaatctggaaggagaaggttgataggattggattcatatcgtacgacatattcttgattaggttttcttctattgaagatagggataatgtccttaatagaggt

SEQ ID NO: 25834 - DNA, 2820 bp, Cannabis sativa
acgggattttgggcatgttgcatctcgtgggaaacaaagttttccatcaaaaatctcatcaataaaatatctagagcgagcagaagtatcctctcgatcaagtttttcattaaacaacctaactttctcatcattcatttctaatttttttttccagatgttcaggtcgaggtgtgaaaggtaaagctagtaattttgggttttcctactcaaaaaactcgtaaaattccaatttcgaaccagaaatagacattcttttcttataaatgtatttgtcttcaaggtccaaagccttaacaccttaacgttaactttaattaaaaaaaaaaggttcaacattaatataaatataacatatcatatctccttaacatttactaaattttttttattaaaaaaatcaaataaaaaaataacatcaatgtcatgcaatagtagcagcaaaattttctacaacaacaaccatttatctccaatgatttagcaccctttagtttaccaaataagcaatctacgtaagcaatcatcctcagaaattgaactattagggctcatttgatatgtcgtataaagattgcattatattaaataataaataacactatatttggataaaacaatataatgtattaattattacgatcaaaatttttaatacaatgcaagttatattatttaatacataacaaatggttcgtattagcatgtattataatatttacaaaggatctaaggtaaactccaatctcccaaccagacccgaatccagactcgagacatggacccaggacgcggacgcagacgcagacttgagacttgaacttggatcctgaacacggacccagacctagactcaaaatctagacctagacccggacccaaacctagagccaagactcgaacccaaacttggacccagatccgggaactagattgagacggggaccgggatcgggacttggactcggacccggaccagatcctagactcggagcttacagatcgaacccaggaaccagacccagactcgaactctaactcagactcaagatcgagacctggactcgggtcctggtccagcacacggacccagaccctaactcgtgatggtactcggacccgaacacagaccccaccatgaactcagaacccaaatccgaattgggactagggacatggacccaaacccaaactccgacccagtcctagactcgggacctgggcccgacttgtagtcggtgttagggtcgagtttattgaaaatatattataactttatataatctattaattaatgcaagtcaatatccaacattgtattgtatattaaataatattaatataatattagtataatacaatacaatccaatataatataattcaacacaatacaatataatttaatataatacaatccaacataatataatacaatacaatataatacaatacggcataccaaaacgagcctttatagacgttgttaatgctacctaatcttggtcgtctctcaaaatttacttgcatttttcataattaaatcagaattaataatatatatttctttgaatacaatttcattaacttctttactttggtggtcatcacaacatattacaacaaattaaagaaaagtagtttcactatacatgtatacagagttcaataaaatggaatcatatgtatatacatcatcttaattctggaaagcagcagcgttgatgtgattggtaattgaaacccttctttattttttccatctaagcttgagtaagtaatgccttcatttcatggtcatgagttacgttactctcatttctcagatagatcaaccaacattttattacaccaagagtttaagaacctctccatacataaaaacaattcagatctaaggataatcttcttgttcacaacttgatgatgattattgtcgttgtaataattaccttcttcatcctcatcagctagtaataaatggggtggaggtggttccaactcctttgttcgctcccattcttcaaaatccattaccccgacagaatcatcatgatgatccgccattgcaagagcttctaatgaaatagctgtcataattttattattgggctgagtagtcatccttttttgctgatgatttttagatgcaaacttctctgctaatatgtgtatatttctctcttcgataattaatggaattaatattttcttgatcgtatattatttattagggtatttatagtagtgcaggggccaactaacgttgaaccgtacgtgcatatatatttttttctctttgactgatgatgatcatgatcacgggttacttgaacatgaacatattgaaaacgttggtcgtacgtacgttcgtgtcaaatcatataaaattcttctcttctacgtatatactaattggatactgtagcatacttgtcaaatgaaacccaataatccttacataatattataagatagctagataaactgatcgactgatgattacagccatgacctggatttttttttttttgactaaaagacgtgagatgatttgatatttatatatatagctttaatttttatctttcaaatgtacgaattcaacccgcacggatgcatgacatgatttgatatttatataaataaatatatatatatatatatttatattatttcatgtattaattgatgataatagcaaagcggcggctgggcagcaggccctctcgcccctggactcaaaaaattctttaacaaaagagctttaaacttattttttaaaatactatgttgtatttttattattatttgttaaaaa

SEQ ID NO: 25835 - DNA, 4410 bp, Cannabis sativa
  modified_base (903)..(906): a, c, t, g, unknown or other
  modified_base (2911)..(2911): a, c, t, g, unknown or other
  modified_base (4348)..(4361): a, c, t, g, unknown or other
actttatactatatttaatactaaaatataaatttgcattaatttttaacatgttatgcaatgtaaaaaaaaaagacccaccccttacttataaaaaaaaagtgttactttatactatatttaatactaaaatataaatttgaattaatttttaacatgttatgcaatgtagaaaaaaaaaagacgcacccctcacttataaaaaaaaagtatgtcgcccccctcaacttaaatcctgggtccgccagtgtattcgtaccaatcttttttggtactacaaggtcttttgagctaaagggcacccgagcctggaggtgtcggtcaccttctgcgcctgagaaggcttattagcctgattcgtgttttttttgaggaggttgaggagcatgcaggttcttagggtcacttacttttgcctttccattgtcctgtggaggagcagaggttccaacatcaacagggttttcccttgtgtttcctctaacacactccactgaggggtcatcgtcagaatcttccctgtctagatcttcaaacttggcatgaaggcgagccacgatcttctccatcttttgagaaaatttcaacagggtcacttacttctatctagtctcaagcaactcgttagacattcagaccactttggagtcttacttataatagtagtcgtctttatagtatccatctttgacataatcttcatcgtcttcttcctctttattattctcagcattcctgtcattaggggtgttcatcaaaccgttcaaaccgcttaaattgcacacaccacaccgcaccgcaaaaaaaaaatgcggtttgaaattctttgcagtgcggttgcagtttgaatttttcctaaaccgcgcggtgcagtgcggtttacgattttgaattgttaatatnnnnttcaaaccgcaccgcaccgcacattataaaaataccaatttttatatttagttagatctaatacgtgaatgtccaaccaaaagcccactaattattgtattattaaaacttaatttttttttcatatttattttcaagccttgtgttatttttgacaagtgttgctcaagctttgttgtatttgcgatagtttaattattggtgataatccaaacctcgcaaaccgcaccacaccacaccattttttacggtgcagtttttgtagatttttagtttcgtggtgcgggtgcggtctgggaaattggaaaaactgcatgtgcggattggttgaaaaaatagtcaaaaactgcaccacctgcaccgcgaacacccctacttgtcatcatcgacatgatcatgccctctcgattgttcacattggacgtattcccgccccttgcatcactcagcagggcatgatttggggataggggtttacttcctcaatgaccgtcttgaggccaccttgaagagtcttcttaggaactgtctttcgtgtgaataccatggcagtaacagtggtttatgtctttcttcagctctcaatgaaagcactaaaatatttatcgagattttcagaaactagatattaagagctaaagaaataatgacttgcaaaaataaagagatgaagattttttacgtggtttgggtattaataaaccttagtctatgagttagtctattagcctctaagggagatattgatgtgtttacaatacatttgtaggaaaccctaactttttaccctaaatttctcttcgaagaaggagaaaacttagagtaatatggacaaagttttagctatgtaagctgttatacccccttcgtatgagaattgaggggtatttataggctaaggggcaggcatggacaagcccataagatatctgctcaaatcccactattggggtaaattacatgcaatgttagagctaaccaaatgatctcgtgggaaacattatgcctgtgcgtgcaacaattggataatggggaccattttgtaccacacagacatgtgtcacgcaaagattcaacctttaaaagtacgggccacatgttgctcaaagcttgttcctttacgagtaggagtttgtaatatttgcatggcaaaaaggtggtagtgctacacacactgccatgctcggatgtaggagacaagatgtgatcttcgttagaaaaggcataaccgtcactttggtgacctgacatgtatgaaaggtcgacatacgcgacacctcaggatggtaggtgtccgcattaagcctttcatgcacccatccaggtgtgtcctcagtgagcttcccttctcagatccctctggattcgagagaagtattttgctttttgcgttcaagaagttaaggcgagtatgagtagccttcgtgtatccttccgtcctagatatatcccaattctaggaagcctcttcgtgacagagtagtatcaaggactttaattaaggaatgattgaatcagtttttcccattaaatgccacatctcgtactttttaaaaacgcggataacaatgggaattaatcaattattatttgtggtaaaactgataaattaattttggacctaaaatatggaccacacgtgtagggtgacatataaggacctatgagtttttttttttgattatttttttattaaaataaatcaaactaaattaataattatcttttaattattatattaaatatattattagataatgtatttaaaattaaaaggataatattaaataaaagattataactgatttttttttaatcagatattttatatttgaatttaaattgaaaatgaatattatcttttatttcataagattaaataaaagtgtttatttgtaacattatatataatatatcaaagaaaaaagcacgtgacttttgagagaacaattagggttgaaaatacaacaagtttttatactcacaacacttctctctctctctntctctctctctctctctcatcccttgctcacacatcactctctctctagagggtgattgtgtctttttctaatctcaaatcacaatgtcttatgagttgagtatacagtgtgatcaaaaaattatattcatttgatttaatctaatagtccactatattcttggagtgttgaggctgacttggaagaccttggtgtgaactcttcaacaagtcttattagattaaatgatcgtttcattaatacgaaaagatagcaagaaaaccctaataggcaaccaaatgtaaaatctctaaactaataattaggtttgtgttatgtattattgtgttgagatctaaggtttatggttcatattggatttaacaattttttttattaaatccgttcttattatctttcgctgcgactctaatatgaaccataaaaaccaacaaacgtatgacttggtacattgagttctgcttatctgattttgattccgtcttgagcatcagtctagttttttatagtaaacaagatctatgaacttagacaagttaaattcacaacttcatattttcacttttccagtaaagtgacttagtcacaaatcgagtagttttgagtcccgattccgcgaaacagcaacatcttcgagacttgatgaacaactttaccaaaacaaagaaattgagtaatgaatgtaaagatatcatttaggcatcaaaaaatacaccctcaacatgttttctcactcatccagcgtccaggttgatgtcatatgtcaacctgtgcattggtatcaaagcagccttcagtaaaacgtccataactcactcaatgatgatttgattggtgagattcaacttgcgttttgaagctatttcaatgatctatcaagacgcgtctcacactacagtcgcaattctaaaaatatcaagtctaaatttcatccttatgagagttatgaattccaactacaacttatccaaagtgagtcccgcagatgcgattcaatctccggaaattgacaactgatcttaggagtcaattttaccgttagatcatcatcaactatcaaaattaaattaaatgtattttttcacatttttttgaatattttattattattttaataagaccttattccctatataaggagagctcatctagcttgatttttacatttaaaaagtacccataaggtcagagcatctctctctagaaattagagctttcagacttagctaattctcttgtaattctcgtgaaaaattaaaattcgaagtagacgtagctctattaccatcacaacatggggagtgaactactattaattatatgtctctctatttactctatttatctcttatttcatcttgccaatctagcaagcaaattttgactactttttagcctcaacacataaatatatataaatacagtagaacctctannnnnnnnnnnnnnattcaagaataacctctaatttattataaaaaaatcaagtcccgatttg

SEQ ID NO: 25836 - DNA, 2044 bp, Cannabis sativa
attgaaacgtctctattactattgataataactcaaatttcgtatcagactactaatttttcatttcttatatgcttaatagacgttctagaacacccaacttttttggaacttctactacaaatgacagttttcaataataataataataataataaaaatattcctgtgaaatcccaaatacatcttcagaaactttcaagtagggtttcacatctgccctaaattagagaaagatcttacaaatcacaatataataagaaaaagaggatctttgtattcgatcattaatatttcagtgatacttttgctctcttttgcgagctaaataaaaagttctctttggaagcctccaaattgaaaaagtgacaaccagaacttcgatagagacttggcagttcttactctttcaagtggcacttttttacattaaagtggtctactcaatgagacgtttagccgaagaaaccaaagacagcttgttctagtttacttttcacttcccactctttcggccacagagaccaaaacaaatatacagtatctctctatctagagactagaggttgatataatgatagtagtggcagccaacatggcaatccctatagccacttttcaagagcatattggaaaccttaaaatattcagtatttatattatatattaaattaaaatatataaaatcaatattgaattacatatgtcacatttttatagtaattgacacttaaataacatttgattagaaagaataaaaatgtaataataagaataaaaatagaaataaaaatgaaacaaaattcaaaatacataaaaaaaaatttgataaaaaaatcattaaatttttttcatctctttctttccgtttcaaaataaaagtcaatccaccaaaataggaaaaataatatttaattagaatgacaattccaatactttaaaatgcattcaaacaaaaaaaaaaaaatgaaaattattttctttccattccattctattttattacctccaaccaaacgccgccttaaagtatctcttagcatttctttttctagagagttgcattttcctttctttgttacactttattcatttggcacttacacagaataggttacacctttttaagtaccaaaatatatatgtaagtggaggtatagagactaataagcataaaagatatccaacacaatttgttttaaaataagtctcaataaagctatacatgtttttttttctccttcagttcctttttttattcacttggcaaaccgttagttgttaaataaacaaaactatttgggaagtcaaaagaaaaccatgtctttggtttgtactccccttacaataagggtactggactatgaatatacatgtgctttaaatgaatctttagttttacataatcaaatcttattaaccagtgatgtccatttacacaatttctattttcatatatttacagccctgagttatctatgaattctcacttttgtttatttatggtaaataagccggccaaaattgtacgtctttcacaaataaatgcgactccatagataaaattttgattgaagagaagtacctagttctctgttgtacggacacctgctcaccaagtccatccgtaaaatacagatgctggatctgttaaccaggaaagaattagcatgttaggaactggaattatgaaatgaactttacatatgtgatgggtttacttacagttacagcactgccatctttgtcccgtaagcatacatttaagtatgggtagcctccttttgattgaagacaacaaattgtttagtaagcccattggtctcaccaattttaccgcttcagtaaccacaaacaggacctcaatagaataattcttcaatctaaccctacttttcaatacctcgaataatttctcccatgaaaagttggtaaggccatattaaatcttcaaaacttggtatccttttcccgctggctgtaaccagttgcagaagatgagacaacaatcaacgatctacctgaacacaaaaaacagtttctt

SEQ ID NO: 25837 - DNA, 1031 bp, Cannabis sativa
ttacaatggttcggattgtagtggtccgaatttaaaccgcggtttcccggtttatatgaacagccctaacctttgcaatagatcccagtctttaagataagagtttgtgaggcctccctcgactcgccatagcaccggtatgaaactgaagtcgcaagccccatcagagctcaaatcgcaaagtgtatttacttggtgcacgtatatataatttttatacatatatattttagtggtggcataagaaaatattaaagagtgtataattgtttttttgtgtattttaatgtctaatttatttttaattacttgcttctattcaattgcaatagttaatttttaattgagtattttttttattaatgcaatgagttgctccttaaaaagcatccatctgggcttcattccgaagagcaccactcaatttattacttttagagagaatttcattgaagttgccaataacaatccaaggaaggaatggagctacatcagcaaatcgctgaaaaagagtccatgatgttgatctgttgctagtttctcgtgcaccgtagaagccattgaagtgaaaggttgaacctccatcaatcttcatatagtagtaaaaaaaaagtggagttgtagtttaaaatggtaacatccacatcatctttccaaagaagcattaggccaccactaacgcctatgcgaggcgattctatagcattagtaaagtgcacggactgtagcacacgattaatagaattaagggagagtttagtttctataagaaacaaaacgtgaagcgattgttgttgaacaagcaatcgtaaatgtctgaacgcactcaggttccccaaacctcgtgcattccagctaaaaaatttcatgataaattgtggcattgcctaacaaccttcgcacttgagtcattggagaagctagtgttgggttttgtgtcctatataaaatccatttcaaaataatcagatttactaattaataaaagaacagaaatcgttttatgttgcatggttcacgtgatttatttc

SEQ ID NO: 25838 - DNA, 2641 bp, Cannabis sativa
atacaatacaatacaacgcaatccaacacaatacaatacaatatattacaatacggcgtaccaaacgagccctaaaaaattataataaaaaattaacggtaacactcttcaaattattattattattattataatttcaaaaacttgtgtgagtgaggtacagttatataaaaaaaattgaaaatgcaacttatatatacatcacatataaaaatatacattacaaatatgcatgtgtacaagcctcataaatatatttatttatgtaatgtaggaaatagagtcaattactttaccaaaacatttacattcaaagaacaaagatgaactcacaccaagagagttgttcacaaaagaacacaaagagctaatgagcaatggagaaaaatggatgaaagacacagcaagttcatgcagtttggtaggttctctaattgctaccataatgtttgcagtagcatttacagttcctggtggcaatgaccaaaacacaggttacccaattttccaacacaaaaaattgttcaagatttttataatctcagatgctttttcactcttctcatccacagcctcagtgttaatgtttttgggaatgcttacatcaagatatgctgaagaagatttccttaaatctttgcccacaaagttagttataggacttcttacacttttcatatctattgcaacaatgacaatagcattttgtgctgcccttttgattatgttgagtggtgagtctgtgtttattgctactcttttcttgcttgctggacttcccattactctgtttgggtggatgcaatttcctcttttggtacagatttttaattccacttataggccaagtatctttcaaaggaatgttaaaagatggttataagaaggtaactatatatatatatatatatactatttgtttgtgtgtaatgagttcttcatttttcattaaagtgtgtgttactagtgcaattacacttttgtatcaaaaaacaatgagaataagctgaaagaatgagagaaagaaagctagaaagagaaaggggttttgctactttgtattgaaaattaagtggttgattctcatctatttcagcttaaattttgggtggtgaatcattgcaagatgctctactaatctagcggttctgatttggtgattatcctctctaagatgctcttctacaatactcacttggcgagactcaaactttttctatgtgtatctatcttttgagatgaagatgattgtattagtgatccaagattatttaattttaatgttgttgtgagcctttagatttactagagagaaactttgtaatctcattattaaactttggtaatagtggatgatttaagcggactacgtgttgagaaaaacgataaaattcaagcgcggcaaaataacaaagaaacaaagtaaaacaatttactgagtttggtaaaactaccaaactcacaaagagagatatatttcactaatcacttcaaaattacatattttctctatctcaatccctctacctaaattccaatacacacttcttcttcactatcactacacaacaaactcacacacacttttttttttcataactcactatttttctccccactcatatacctctctctcacacaaaatatatatttatgaagttataaaattttggcaccaagacattttaaagttttcttaagatgactttttaaaacttgaccaccaaaattttcttttaactaataattacccaaaaattattgtaacttaataaatataaataaaataataaataatttaagtcaaacttcaacactaacaatcctttgtatcaagtagttagttattacaattatattgagtcttcattttcaatttcaagtatttattactagttttgtatcaattatatttaaaaaacttctaaaacatatattaataatattctagaataaataattttctgtgtttggaaataaggttgctgatttgcgataatcaacaataacatttacatgttcacccacaactgagtacatatttgtgaaggtataatgttttataattttattttatacaatatcaatattttctaatctatttctaaactaccatattttaaggcattttgcaaagataccaatatctataaaatggttatgacaccatatttttgcactaaggaggtggttaagaactttttgtatctttgaacaataagataataatgttatttataaatagatctctcactcacaaccaaaacaattacaactatggggtataagtatatttgcaaacactaataaaattttaattaattgggcttttatcacaaggttaagttaagtgttattatagtagccatttccattgtaagcccatttcttattcacaaaacagatccaagagaaaactggaccacaaatgttttgggctaagttttaggtttagttttttaggggtatttatcataaatgcacacattctgaaaaatacataaaactaattacaaaaatacatatttgattttgtaatatttttttacaaatttgtagaaaacttttacaaatttataaatccattacatattggcaaatagcttttacaaaaactagtagagcatatttgtagttaatt

SEQ ID NO: 25839 - DNA, 2957 bp, Cannabis sativa
  modified_base (66)..(80): a, c, t, g, unknown or other
actcttatgtgtttattttcattgttatagaattcatattaggatgttaatcaaacatacttggtnnnnnnnnnnnnnnntggtaaaatatttccaacaccatatccaagaacaaaggctctattgatcaaccacattaaacaactccttcaccatttgcatattccaaccactgcttgactcatcaatcaaatcacataccaacaaattaggatttacttgattagaacagtaaggccaaaaagttactggctgcggtagccaagggtccttacaaactagaatcgtgtcacccgtcccaactcgcttacgcaacccttttgttaaaagagaccttccccaaatttcgttccgccaaacataactaggtgcctgtccaactatatccaaaatcaaagaaaacttgtaaattaaaataattatactcacaataccgcccataataacatattattaaacgtcagatcaacacaccaaaaatagcctaaataatggaaccaacctcgccactaaaaatcaaaagaattcaagcaaaacaataaaaaacaattgatttagatcctttactttaagaaaaaactgattgtagtcctactaaaacaatcataaaaaccccactcttatttaagtcaaagccaaccataatcaagtctataaatatccttctatgcatcgtatccataagacttagacaaagaaatataataccatataataatacaagaaatatacatctaatgtgagtgcttaaaggcacctatggtgcaatagaagataaatatataacaataaatatatacttccaaccccataatagccagactcgtcagagcatcatacctgaagcagtcaaaaaagttgtatgggagaagtactttgctctaaatattctcgcaggcagagagtccagacatgtaagtattctccatgcctaagtagccagtagcggctgggtatgatgctcaaatgttctaaatcctaggccaccttgagtctttggcaaacacattttcctccaagctaaccaatgtgttttctgtttagcaacaaaagaggtccaccaatatctatccataagagcttccaattgattacataaattcactagtaattggaagcaagacattgcatacgtgggcatagcttggatgaccgcttttagcagtatttctctaccaccatatgaaagcaactttgaattccaagaattaagacgtgaccaaactctttccttaatatagctaaatattctctttttgttacgaccacttatcataggcaaacccaaatattggataatgggttcaatagtttccatatacaatgtttcctcatattgagttcacaaattctcaggcgtatttggcaaataatacatgctggatttgttgaaatttattaactgaaaaaaacaattaaaattagcttaatcacacatcttactaaactgaaacatctactaagaaacccaattttggatccgaataaaataagaaataaagtctaaaaggaacatttttttttgcaaaagcataataatagttcaacaaacaattgacccaatgaacaaaaccacatagttctcctaacactatcaagcaccaacatatagcctcttagtcgtgtacctaatacaaccaactagcatgaaccccacataagtcaaaacaaaaaagttatacattacccatgtaatctctttgacaaccagtgagttaggaactgatcccttatagtctcaaagagcatccaactaacaatttcgtattgtaaccaatataaaacatacacatataaatattacttctaaacccagggaatagcgtcaaaactatacattaaaattgatcataactatcccaagtcatccactgaaaaaagataagaccatccaaatataatgacaacctactagaatattttccactagacttactttcctaggcttaggagtcaatgtaataaaatccatataaataaaagtagcatcaaacaactaacctgtcccgaagctctagaatatttctcgaagatgtttagtaatgatatgcaagacctgggcgatacacgggtaaatagaatactatcatctgcaatgaagaggtttgtaattgaaggggctgatcgagcaaacttatacccaataatgtcacgattagtttttgcttggcataaaagggtagagaaatcttcctcacagaaaagaaagaggtaaggtgaaaggggatctccttgacataaccctcgtgttggtacaaccttctctttaacttaaccattaatattaaaagaataactaaccgatcgcacacattgcataattaaatgcacccaaggataggcaaacccaaacttcagcataatgacttctaaaaacccgcattctactctatcatatgattttctcatatcaagttttataacagaaaagcacctctttctcccagtcgcaactcgtaaattatgcaatagcgcatacgataccatggaattatccgtaattcgtcgacctccaataaaagtactttaagaaaaatggatcaattcattcaaccatggttgaaggcgtcgtacgagaacagttgaaataatttttataatacattacataagcttattgggtgaaagtcctgcatctggtttgcagatttgacctttggtatcaaagtgacaatggtggaattaataagtgataactctgcttcaccttgcagaaattccaacactgcctttgctaccaagtcacctacactgtcccaatgcttctaatagaacatagcattaaatccatcgtttcctaggcttttatctgccggcattgaaaaaacaactaacttgacttcttcaacagtaaaagggagcaggaggtttgagttcatagcatctgttactcactgctgaacaacagagaccacagcctcagtatcctcatcggcagggaaagaagtcatgaagag

SEQ ID NO: 25840 - DNA, 3249 bp, Cannabis sativa
aatacaatacaatacaatacgatctaatacggcgttccaaacgaatagtgatagaaaatactattgaaaatacacttattttctctctctctttttttataaagaaatgtaaaaggtagtacttatctcggcactaacgtacaattaagccaggtgatgtttggttgggagaaatgaaaatataataataggaatataaatgagaataacaataggaatggaataaaatttaaaatgcttaaaaaaatttgataaaaaaatcattaaattttttttcttattacattggaatgatctttctttttcttttttaaaatagaatagtcattctaccaaaatgcaaccaaatagagaaatggaatgaaaattatttcatttctattccattctattttattattttcaactaaacgccacctaagattagaatctcgacataacttaattttctaaatatgaaatattattattaattttgaattacatataatttaatttaatatttattataaaatataattaatcatcaataagacgtctaatagctatgtttataattttttttccatgttagcaatttatttctctccataccaaacaaacatatatgtaatgtattgtcacagttgtccaaattgcctcctctttatttatatacatatatatgtgatgagaaagaatatatatgataatatgtaacaagtacatgacgtaagcgattacatgtgtaacatgggaagggaaagttagtttagttaacttaaatgtaaaatatattattttaatatactaccaaattaaaaatagtatatatatatttttaatatttttttctcttaaaatatactcacattttaaaaaaacttctctctcgctctccggcattaaccccgactcagaacccttacagtcgaacacacagacccagaatctcggtcgcaaggccttgctatcatcttctctcgcggcctctctcgttttttgtgtttctttcttttagtttaccatttttttgtaaaatttagcgatgtatttacaatgatagaacaaatttgagattagggatgaagtttagcgatgatttgcgatgtttagcgatgatattagcaatgtatttcgcgatgttgtgaattggagacatttagcgatgttttgcgatatcgtcaaaaactagaacaaaaattcagaaaataagcgagttgatagattttggggctttgggtttcacgatttctctttgtactttcgcgaattccccctcaattttttcatacgtttcgtcttcagagtgtgtttcgccgggagtagtgcggtggtcgtaggtttggtctaggtctggttcggtctgattctgtggtcgtgggtgtcggttgggtttggtgagagttagagagtgagggagagagggctaagagaaagagagaagatatgaggatggtactttggtatttaattaattttagagtattaaattcctgtgtattttaatgtggaatactaaaagattgtggacaatatttaagcatgatttatcaaattttcctgtggaaccaaaataaaagactttttcctatatttatatatatatatatatttttaaagtagatattggcaataaaatcacttaaattttatatttttaacaattaactacacaagttgatttttttatgacaatatctactaaactcatattttattttactctttatgcttcagtctaaaaatttcaattaagtgctacgataaattatttacatgtatacaagtgtatacatagtatgtttttagtagtcaatataattttaaaatataaaaaataattaaaaattataatatttacataattaatattatgtgaactatttaagttccataactgtatgttagtatacatttatgtccgtctatcaagatacttaactgagattttgaacagagtgataaataatataataaaagtgaagtgtgagtagttttactattgaaaaattaatttatataattaattgttaaaatatataaaatttaaatagttgtgtcgttaatattacattttatatttgtttttctattttgtaaaaaaaaattgagaaattttcactataaattaaagtaaggtagaaataatatgtttagagaaagtaggcaaatcctttcaaaaaaaaaaaagtaggctaacgtacgtatattatatagtcatgttgttgttgatcaatgtgtggtactaaacgaacgtgtggcaactgcacaacaaatacacccacacactttcctaccaaacccttctctttctctctctaatattcattaataatataaagaatcctaaataataaaaaggttaaatactattttagatcttatattttgtaaaaaattattaattgaattttttattttgttaagtgataaaagagaccttatattttttaaaattgtataaataggactctgaaataatcttttatcaaaatgaaatttaataataatttgatatagagatatgacaaaagtagttacatttaatgtaattgttcgtgttaaaaattgtcttaaagttagttatattaaaaaaaaattgaaaattaaattcagagtcttatttttactattttgaaaaatatcggacccattttatcatttaacaaaaccaaaaatctaattaataacttttgcaaaacacatggttcaaaatcaaatatcagaatatttttatttttataacagcatttgttatagttgtaatattatctctgtaaattttttaaaaattccaactagtttatcatatcaaaaaaatattccaatttaatgcatgttcaaaaaactttaaatttattttttaatactaaactacatggatgatgttataaataacgaacactcttataaaaataaattattctaatatgtattttaagcatgtatatcgattaagaaattataataggaagtagacagtatcactcgtaataataatttaatatattctttatttttattttattatataattatatataattctaagtttgatttccatccccaaacaacaactacctcccaaccatctacttcccacgctctttcaatgctatctatatatcaaccattcttttctatatatatacaccactacttcttccaaactttactcacttttcttctctctctctctctttattacaaaaatcattataaagaaagaaaaagaaaaaaccccttttaacaaactcatttatatat

SEQ ID NO: 25841 - DNA, 2880 bp, Cannabis sativa
aaaatatttccaataacgggcattagagccatattaatgatttactttcatgtaatatggatttaaaatgatgaatttatttattgtgttgatttgggtgtgttcatggttatttatgtgcatatttaatgattgtatggtgattatgattttacgatgataattatttttagttttgttttgaaagtattttttctaaatttaggcttttacaaaacataattttgatttttattgaattagttatgattttttgagctttgaatgaaaatatctcaaacctgttgcacatgtgcgcgtgcggacaagcatcactcggctttcacacggcttcagacaagcccatttcaccccatttgctcccatgcgtgcgcagagggagtatgcattgcataaatgcacactccctatgccaaacttgttttagtgatattttgagtttcaaaaattatttttcgatattcaaattttggtagaattttgagtagaatccaaattttcaaataaaaatctaattattagaataaattaatatttattaacattttaattaattaaaattagttttagatattagtagcatttgtttatatttttccacaaactagccttattattaattttgaaattttttattatttttgtttgttttattaattttaattataagatcaagtattacttattttattattaaaatttgaaatgatcttattttgatattaaaatacttataacatgaaatttaaaaagttgtcaatttttttttttcatagatattttagggttttccaaccataaaattttccaacttaggattttttattttatttttattaaataaagttcttggtcacttgtttaaaacataacttgtgcaagagataacatataaattcttatgcaaacttcttctacttttcgtttcattatacctaagggtttacattaagaaaggaaatttacaaagaactacatacaactgtagaggaatgttagacccggataccctcagcctattggtaataacaacacaaatggtctgcattccaagaacgagggatttctaatccatccattctcttgagttgaaattttccatttcctactttattatgtatctaatatggcccttcccaattaaatcctaagacccccactccttgttcttgtgaaggtgggatggctgttctcgagacaaaatctccaatattaaatgtacgacttttaactttagaattaaagtgcctggcaatcttgcccttgtacatcttgagctgggcttgtgagtattctcaaagctcttcaattaagtctaatgattcatggagcaaaaaatgattctaggttgggtcgttagtgtctcgtctgtgataagtcactgtggtttacactgggatgaccgattcacatccataagtcatcaaatatgatgtgtgccccattgaagtttcctccatcattttgtatgcccaaaggacttacaaaagctccttcggctaatgggcttaacaagcttggagtttcttcttcaacgttgtcttcagaatcttgttgacagcttcgacttgtccattttcttgtagtctagccacagcttagaagctcttcacaattctatgtggattacaaaagtcagtgaagtgatcactatcaaactgattctcattgtctaagataatcttgtgtggaagtctgaatcggtagactatgttcttgataataaagtccaaagccttcttggtggtgactgaattcatgggctccacctctacttatttggggaagtagttaatactcacattatatccacatattctaaataaatctttgtaattaataaattacgcttatttatctacatatggcaaaatttatactttatactaaattaaataagcaggataataatcatactcattactctctaattaatctcataatataaaattaaccctaattattcacaattaggtgtttgggatattatagctggtgtcttttgtcctgataacttttgtcctaacaaatcttgtcctcacaacaaattttgtcttaacaatttcttgtctttttccttatttaattaatttgaaagaattatttatttatgaaaaaaataaagaagtactattttgccaattcaaaataaatatttctttgaacatccttacataactctttatctcaacccttgatagtgtttcaaggtggcaattcagggatcatggacctataattctaatctccaataaactagattatttattgagtctcatcaaccaaataatctcttgttcattaatttcatgattactccactataaatatagaattgcactcttagtaattatagaactatacttactgagtttaacttcggtgtccattgatataatcaattctagtgattagcccttcatgtgttagttcgtaattagttttggtcaaaatctcattttaattttctaattacttctttacctttggggtgtgtttggaaggagggaaacatgggtggatggagagggaaggagggagaggcgtggtaggagatgaaaaatctatttgtttggcatagagcattgtgggagggagaggggaggtggaatgatttacaatctattcgggcgcaccattttgaatccttcctcaaatggaaggatttatactcttctttctaatttattttaaaattacatatacaccactataaaaaattataaaaaaaataaataaatggataataaagtaattttataagtatatagtaatgtatccttccacctctccatttttctttccaaataacttgaaaggataattaccatactctccctcccttatattctctatcttccttcaactctccatccatct

SEQ ID NO: 25842 - DNA, 2747 bp, Cannabis sativa
  modified_base (31)..(51): a, c, t, g, unknown or other
  modified_base (1928)..(1931): a, c, t, g, unknown or other
aattcatattaggatgttaatccaacatacnnnnnnnnnnnnnnnnnnnnnggtaaaataatttccaacagatcccaccaaagtcatcagactgggaaagaatctgccttcggcagtgaaagaaaagattgtctccatagttaaggaaaacattgatgtattgccttggagttattatgacatgaccagaatcagtcctcgagtaatttttcatgcactaaacatagatcctaaggctgatccagtttgacagaagcatcgacccttggatccagtgagattggaaccggtgaatgcaaaagtagacaagttaaccaacattgatttccttagggaagctctatatcccatatggctagccaatccggtgttggtcccaaatcctaatgggatatggcacacgtgtatagatttcacagatacaaacaaagcttgtccaaaagattttttttcacttatgttcattgatcagatggttgatgaaacatcggggtacaaactcttaagcttcatggatgcatactccgcttacaaccaaataaaaatgcacgtggctgagcaagagcatacaagatttaaaactgacaaaggcatctattactacaaggtcatgccctttggattaaagaacgttagacttatctaccaatgaatggttaacagatgttccagaatgtactacgaagaacatggaggtttatgccaatgacatgctggtgaaaccgtcgacttccatatacctcgcgtaccaccaacggaactgaggatgatgaccttaccttacccatttgctatatgggggattgatctgattggggaacttcccacaaggcgaggggaagcccaagtacacagtggtagcagttgatttcttcactaaatggatcgaggttgaacctcttgtctctatagcctacaagaaagccctcgactttgttgccaaaaacattgtctgcaggtttagaattccaatgaagatagagtccgataacaaagttcgatggagacttattcaatgaaaactgtgagaggaacaaaataattaagagcttctcgtcagtatctaggcctcacgcgaatggacaagtggaagttgttaaccaaaccatgaaggatactatcaagaagaagttagatgctgccagatgaactacctcaagtactctgggctcacataagtactgaaaagacaacaacgggacatactccattctcgctggcatttggctcggaagcaatgttacctgtggaagtaaacaacccgactcatagatgagagttttataatcaagaagaaaaccaagaactcataaaactatccttggatctacttgatgaaaaatgcattgagtcgcaagttactaatgcagcatatcaacaccgagtaacaagatacttcaacaaaagggtcaaaaagaagctattcaatgttggagacttggtgctaaggcgagtatttgcaaatacgagagatgcatttgtaggagtattcaacccgaactaggagggtccttatgtgattgaagcgatagtaagaaccggggtttacaattggcttgaatgaatggctcgctaataaagaactactggaatgtggaacatttgtgaccctactaccagtaaattaatgattgtaactcacatctctgatgtaatattttgaacatcagttatgaataaagttaatcatttcttttttcaagtaattataaagtgttactctttaaatttacttgaggggcatatgtgtatgattaatggaatttatctggaaatacataatataatgcaaacccatcactttaaaaaaaattgaaaattctttaaatttctcgatcaaacctttctggcgagaaaggaggatcaaactattacgaatagctttttgattaaaaacctgtctgacaagaaaggaaaatcaaaagttnnnnatgagatataactcataactcacaatataaagctaaatactaacgactcgcattgtataggaaagtattaaatgagacatcaaggtgtcttgaaaaatgtacttaaacctagtatatgaatagacgatctaactattcatataagcaatcaaaaatataaaaagtgataaaatcattaaaagtatattcaagtttgcttgaaacagattataactgttattgcgaggcagaattgataactgctcacaaattaaaagcatggcaggtaatgaactgctccagcatattagactattaactacttaaaatgaaagtgattatgatagatataccctctgtaatcattaaaaagcactttttattaaaaggaactttttaaggggcaattgttatacccgaaatttggctagcacttcagaggaggacacgtgtcaaactgggagaatatgaatcaacaaatgtaatgatatttatatttgaaaattgaataactcatttaatgcagaacagacagagtatgtttacaacttactgactgtaaggtcttacgcgagataaaaatatacaaatcgttggctcatacagtaacgagaaaccatacgacaccactagtacaagataaggcatcaacctcgctacgcatgaagagacatagacgaggcatgatgactattaaggcacttatcttataatgcacattatacaaactaaatataacgctcaagtaaatccaaataactaataacaaggcatccatctcgctataggaaggcacactcatggtaccttcactaatcagctccagacatctttcaa

SEQ ID NO: 25843 - DNA, 5001 bp, Cannabis sativa
  modified_base (2110)..(2112): a, c, t, g, unknown or other
atctttccatgtttagtaagatataatctgatggacgagatcaatcgtagtctattcctgatactgtgggattcgataataaataaataggaaatggtacttgacatttggatgctcactaattacttcttctggatgtgctgtctaatatcttctagacgtatgccatgctggaagggtatatcacctggacgaggcttctacttatctggtaggactaactgcttatgggtctgaccgagtatttcatttgggtccattgtttggcatgggatatttatattgtgtctgctggtagaattccacttgtctccatctagaaacacggataacacaattttttatgaaatgctttacaagattttcatgtaaatgttttttttaggaaattgataagataaaagaaagtaaagaaaattttactaccattgttttggtagcagagaaaatcttacaatttaaaagggatgtctatacgtctgaaagtggaagcctaatagagttggccaggtcagattttaccgataaagcatgccatgttcccatctttcactcatccacttatgaggattatacaattcgaggcccccttatcgtgaagctcgaccgcaaaatgatagagtaattaaggttagtagatattgctagccaaaggagaaaccatgagattttgtagctatgcgacccctgcaggctcatgccaaataaaatagagtgcacaagtttagggttccaaagtgataatagaaaagaattgtttataaagagcatgatcatgcatagtgtcatattctcataaatatacatacatatgcagaatattacttactgaattttagtgtgtaattgtcttgtattgaaggtaggtttatagataagtagattgatgagttagttgcaacatagtcctgaccctgatgatgtacatatatggcaatttttgccgtgtgggagggttgagccttatacttttgacatgtttatttgacttttcatgagggcatgttattaatctttgtgtgcatgcttttagtactaaagaatgatagcagatacttgtatgtatatgtatggatgtaataaatagtagtaggaactctatttgaagttgttattatgttttaattaaaagttcaaattagccataaattttataagtaattaatcattaattgagtaaacaagttacacctcaaattgtgagagtctaatacattactactattagtaacgcgaaactaagatgttatagatttcactaaagaattttctcatacattttcaatataaaaaggaacttatgaatcacaaacaagatacgcagatcgtgagcatataatacacttgaatgaaaactatttgggaggagctcccgaattataggcccaattatacatgtatcaattgtatatgtggaggagtcaagaaactcaaagaacatcgtcacatagagtacatcatagagattttcatgtggcttaatgttcatactatcaagttcgtggaaatattttttattggatcccctccttgaactaagcagtgcttttcacttggtaacttaagaagaaatcaaagggggtcttctacaactactacaacggattctacttaaattttttctcagtcgatccccaacactttgctatcttgcaagggttgcaagttgttatcaaataggttgactaacaagataccttaatatgattgtattatgctgtcgttaatttggtcaattgtcaggtagtgaactgtactaccttgaaatacataattcaaaatagtctgataagtttaccggttatgttcgtcatttgttagcaacaagaacttcagttaagctttcgggattcacatttcaattctttatacgtccataggtgtaaaaaaactaacatgtataagatagtaaaaatttaaagcttgttcaataacttttttaaaattaaaaaataaaattatataacaggtttttatttgtaaaatttaaaaacataattatttgcagaacacatctgttgagaattatggggtttcatctcaaaaccaattggcaatgagtggagtagcccatgttcttatatatatgactcaattctctaccatttannntatgtgggacaatgtccacaacaacattttttgttttccaaaacaaaaattctactttaaattttatgattaaaaaaataaaaaaataaacgtgtatcaaatgctcctataatgtttaggaaaatttttgtaattcattttataatatatatttttatagttgataaaaaaaagttaagtaattacattatattataaacatccctcttacattaaatgttgttatctaacaaatattgctagtttaatcgattttttttattaaagttatcgattaaaattaccgttattaattatatttttttcttaaaaaaataattttaaatatttaaatttattttaaaagtatcaacaaaattagataattattttttatacaaatttttaatttaaattagacgttcattcaataaataaatcatactttataaaaatttatcaattatattatttaaaatgtttaaatttatttaaattttttaattgtttaacaaaatttgttatatatatttttttataaataaatgtaaaattaaattaaatttaatatatttaaaaagataattgaattgtattttaattttattaattatttaaattaataattaaataatagctactctaaaatatgtgtattttactaatacctagtatatgtatgtatatatatatctattctatataaaatgaggctatataacagaatctttgtttatgagaaattattggtggctttttttttaataaaaaaataacaaattattagatgttgccacgtaaagggtcagcatgcatgtagttagttaaacctaaatataattaatccacctaaagtgttacaattaataataaactaaaaataaatcgcgcttcgcgtgcagttgtaataattaagtcataaaattatatcaaatttcaaaatttgatattttttatttaatttttttaataataaaagtaattattctaataaaaatttatttattttttttctaataaaataaattaatattatgaaaaaaagtatcatatatcgtcaaacgtgaaaaatatattataaattaaaaatatttcacatatttaaaaaaagatacttgataaatttaaagaaaatttattattatttggtattgactattattatttgatttattgaatattataaagtttaaatttatactatttatatatattacatggacatatataattttgaattactttgttaaaaaaattattattataaaaataagtaaataggatgatttagaaaaaaaaaattagtgttttttttttataaatataatgcattatttctatatctgatcattcaatactgtatttctgttgtcatcaccatattagagtgttcaataccgtatctcctctgttgtttttcatcgtatctcacctgtcactatatctttactgtatctcgctcatcatcctcactgtatcattaaaatatcgtatctcacccactgtcatcaccgtatcactccaattagtctaataatttttgaatagtcatctcgttgatgaacatgtcttttttaagagttgtcttcttaattttataatttccactctcttggagttggtagaaattttttggattaatgagcattctagtccctttaatttatagtcaattatttagttaaattctttatttttaaaatttacaaatttgataatcataaattatattaaaaagtagaataaaaaataataaattaaatatctaataacatttgaatttaaatattaatttaaatggtacttaatttacataaatattataatagatactaatgaaaaatgttaatataataataactattatttattcaattccactaatatataatacttgtataataatattaacaaaaattctattaaaaaaaattcaaaaaaacaaaaataaaaaataaaaagtaaattgatggtcggagtcaataaaaacctaaatatatatattatttatatacatgttttatcataagtttttttattaattttattattataaatattttaaatcattacacaatgatatatacaattttaaagtgataaatttttctaaatcttctaattgttattccacttggttggacaatattcccactataataactgatgttttcttagtcaattgactttcttataaaaaaaaaaaggtaatctatatatctatatatttatgtaaaggagaagtatggagcagtgatgtggcgttctaaaaacactctaaatagcattatctcttctctccttaattcacttatgttttcaattttgtattaaatggcgttctaaaatcactctaaatagcattatttcttctctctttaattctattatatttttaattttatattaaatttaaataataatttaattgaaaaaacaaaaatacttaattatattaatcaatttttttaagtatatatattaactattttatcaaaaaatagtaaatataattcattaattaatataaaatcaatctaaggtatatatattctcaaaattatctcactttctatgtattttttcctcataaattttttgaatgaaattgtgagatttaaccttataaaatttttgagtgaaattgaaagatttaaatattatttgatagagatatgaattcactatgttgttttagattttttatgccacataagtttttttaattagttaatattcataatttagatgtttaattttttttattattagaaaatagaataaaaagatagaaaaatggagaaaaatggaataaaatattaaaatcgagagaattaaggagagaagagtaaaatacttttagagtgattttggaataccatgtccccgtctcatatttctcttttatat

SEQ ID NO: 25844 - DNA, 3862 bp, Cannabis sativa
aagggtattttaggtattaaaaaataaaaaaagacatttactttattattttaaaaaagagacattaacttagaaatagggtcatttacttacatttctccaagacaatatctggcaaacacaccaaaaacataaaatacttttttatgttagaaggagaaaacatgatcaattattaaacaaagggagaccatatctatttccattaaggcaaaacagtaatatcactcatcattctattctaacaatataccagctgaacctaaatttgtgaacaaaattcccctgagaagtcaaaacttgagcattattgcctcttacataaacagtatacaagaatggccagaatggattcacaattcagataattagatttggcaagttcttcaacaatttactaaactatgaataaaattagtgagtaaaacgccccccaagatggtatgaagtcacggctaacttatcactctattgcaatacaatcatttacttacaacatttctttgaatccaactctaccattcccttactcaatgaaagaatttgatattcatttgaactttatgtccagctcaaaagaaacccgggatttctccaggcattggagccaattcattcttgccaaacctctcctcgtcgtagaatgaggcacggacagttcttcccccaaagtaccgaccatcgaggtcaattaatgcttttgtagtttcctcagatctctcaaactgcacgaagattcttactgcttcatcaactgggaaatttggctctgttatttcgaatataagaacccgagtaactgttccgtactttgcgcactctgatcctacctcgtcttctagctcatcgtctacctcaccaggtcccacctgcagaaagaatggtttttttgttaattacagttgcaataagagataaatagatacaagcatgatgacagcataaaacacctttaaagtggttcaaatatttattctatggaaatacaaggagagaacggctgagttacaaggtcggacatcatcattttctttaaatatttataaagaaaatgatgaatgttctaaaccctgtgaatgttctaaacctggtgttatggatttaacaagaacatttattttaaaattaaatttgacaaaaggagagaactgatgtaggtgatatgatcagttcgaaaatagaagctctgaactatccactaataattgatattagttattagaagagccactcgggtatagataaagtggttgggtgtgtgagtgatcggggtgaggggaggggttcaaatccaacactgtatcaaaaaaagttaataaaaaaaaactgatattagagagtgaaaagaagaaatgcatggataaagaaatatgaaattttgcagagaatgccatagtcagacttaaattcaaaaaggatacttaacaaacaattattttcgtctccttttttttttggcttttgagagaggtgaaagggtgaagggggtgatataaaagagaatgaaaatacaaccatctctcctggtgatcaaatagccaataaattaggattagagttcattaaaagaaaagaaagctaggcttctaacaaaccgtctcttgaaatttttcgtattaaactttttgtaatttcgtgaaatgaaaacgttttataagaaaagaatttgacacaaagaagtgaggaaataggaagaaaaccaaagaatttagccgaacctacaagaaagtagaacatgaacttaaaccacattgtgtttgtttcaattccaaatataactcttgggtaaaagaaatacaattcaaaaacggcacccaaatgcactgttcagatattaaataaaggggtaaacgggtaattgtaagtggtaaggctaaatgaattgagcagtatatataagagaggagattgaatgagtgggggatggaaaaatgtatgggaattgagcttaggctcttgggagagttgaggtctctcgaatacctctggttacattgctatctttaccattctattcagctaatacacaatatcagatctgcctattcctatctagctattattcttcactgtctagtctattttctagtaccaatctgttctaacttggctggacagcagtaaattcctatcatgcacttaccctaaactaaaaaaaaaacttcacctacaccttaacttattgacctaaacatgtgaaggagggcccggtgaccagctggtcgttcagaagattgtgtgcttacttaacgaaaggttacaactctaatttcaggcattatccaattccaaatttcctagtagaaaagtatctaacacaatacacatcaactattgtttagatatgataagatggaactcaattcagtaccaacgcacgctcaaccaatgaaagaaaagaccttcctgggcatataaccactatgaagattcccattttaacaagggtggtattcaatcaaagagcatgccaacaaatgaaacaactgaatgtataaataaaggtccaggcaagcatgaaaaacagtcatacaatctatttcctacagttcttgtatggtaatagcatagacagcttatacagaatagacataacccaaatcaagcaatttgtatgtataacaagatctttcttaaaaccaaatattgttaacacttcatactttgtatcattgacactatacagatcaaaattgaaatttctctaacattaaatgcaagtagtgagaaaacagaaaatatccaaggaaaaagcataccatatttctaagcataagaacccgagtgggtggtccattaagactagcactcttcaccttcttctccgacttctgttcactagcatttacaatgaccccagctcgacgatcagttttcttggccatcaatggagtagtaatcccttgttcctgcttgccaagcccttgaccctccttccaccccattttcgccatcattctctgtgcagcagtcatatgaccaccagcacccaatcccaatccactggtttccgactttccaatggcaaacccatctacattattcggtggagatggcgacctaggcacaggcactgcactactcatcgccgcacgccttctccaagcttcctcacccgaaatgttcaaccgcgaatcgccatgatctctactatccctactatccctatccctatccttctccctctcttctctctccctcttctctctcttttccctctcctcttcctcttgccgccttctctcgagctctctcctaatctcggcatccatcaatttcttcttcttctccctcctatactcctcgtagtcattgggcctcgccggatcatactcttcaatcaccgtggaagtaacacccacaagagcaggctgcgcaacaacctccggaattatcgaaggcagaggcgccaccgccaccgccggcgacgtgataggttttggctgcaccgaagttaaaggcttgttcttgatttggggctttaaaatcgtttgtggtggggcgaaaattgacgagggtttacgaagtgtcggcggtgccatttttgcgctgcttgaccagacggaggagttggttgatttctcttcatcggcggaagagggcggagggaggtcaccgtacaatccgcctaacatcttgggcaaattactaaaccccttttctcctctttcttcttctttttcttcttcaagttctgaaaaccctagaagttgaaattgggtgaaagacgttagggtttagatttgggagtgaaatttaaggtggaagaaggaaagtactgaatgtttggaggttgaagtagaattgattagagttgcagaaaaacgtaacgaggttttacaacaagttttttttttttttt

SEQ ID NO: 25845 - DNA, 4586 bp, Cannabis sativa
gttggtagtgtattcaaatttgatgatgatgaaacatcatcaattttttaatggaataatttcatttgtggcatttttctaattcaaatggctcaccgatttgtaatttaggaagtgttaagttatcttattttcaaccatcaatttcattgtaaaacaaaaacttaatcgcacatagttttggttccaggtatcttttcatcagtttttgacaattgcttgcaacgtttcactgctttgtttgttttaggttgatgttttctcctttggtattgttctatgggagattcttactggagaggagccttatgccaatatgcattatggagcaattataggtgtgtatttaactagtttcttggtacttgtgaaatttataatcagtttttagaatctttgagaattttttatttattctgttttgataaaatatatgatactaaacaagaagcaagacaccgcaagaaaagataaataggacagtgaatcattcaagtcctttcaacaaagagaaatatatgaaaatctcttcagcaccatagcagttgccgccttcacatcaagattcgaaccttgctctctcttgtagtgctgtaccttttttaagaaaattatgtgaggcactatacatccaaattgcctaaaaaattacaagtggctatattaacaattttcacctccagggcacgtttgaggctatattaaccctcgagagtgtgggttaaacttagtctaggggcttctccaatactaatttcacaagtaacccaaagaccctcaatactacatccttgaagctcttgcataaaagatgaaaatgattcaatttagctccttagaaggtagaatctactaaaacagagagaagttgtgataggatagccaaaacttatactcagttcttgaaagaatctgagattggtatttatattgatattgtacaattgaatacaaatggttccaagctattcgagttgcttggtgtctccctagttgtaaaaagaattagctctagtataagtatttataggtttaggctagggcatagtattgacagctaggactaataatgacagctcagaaaaatacagacaactcagccactaacacctaggactaattggccttaggcctcctaccataggcgaaccgaatttgaggcccaacaagttggaagttgtaatttctatccaatcaaagataggaacaaagattgaggcattatacaataaatgatgtcgaatttattttttactttgagagctaaaacttattgatgcatggaggacaccttgtttagatgactaatggaccttacatatattcatttgatcataacagttttgagataagtttgtagaacaagaaatgtctgtattggagcatgatgttgtcccttaattgcaggaggtattgtcaataacacattaagaccacctgtgccaagctattgtgattccgaatggagattactaatggagcaatgctgggcccctgatccagttggccgtccatcttttacggagattgcaagacgcctacgggtgatgtctgctgcttgccaaagcaaaccacagggtcaccagcaacaaagtcaggtacccaaataagaactctgcaaattcaactgtacaattttagctcttttattaagtcatgttggcaagaaaagtttgttttatacttataaaggtgtgtgtaataatacaagtaaagaacagatatgtgtgtgtgagagagaggctacaagtgaatgggtgaagttttagttcacaattgggttgtaaatcatatgattggatggtttcgtggaaatagtgagaaatttgtttattatgtaaagctattatttgtgttaatagtaaattcgaacttcggttctgattattacttttgtgaacgaaatgtacgaagggtatacatcttgtgtatgatactgactttgaacattggggggcaaaaatctcctattctttcgtttttgaggcactttacctctgaattttttctttagttattttttaaagtgaacctccttcaatttctgttgaaatctatgtagttttgcttgtcttctgccattatggacacatgtggtcatcagttgcctgtccacatcatatattcagattttaggtcctgacaaaaataatgatagctgcagtctcacatcatgtcacatggctttttaatgttttgctgcatataatcacaataaaaaataattcattcagtgttctaattaataaaagtaatatcaaaaggcccattctttaagtactaaaataattggctacgtattttcattagtaaaagtaatttattgaaaaagttcatttggtgaggtttgtaggagtgttcatctaatttaatatgaattattttatttatagtgcatttgattcgcattaagtatagatttatattttagattcaattcaactcgcacaatagtttaaatttaatttaatttaattcgcaaaagtgtggattggatcagttaatttgaattggttattatttttttttagaacaagaaaaataaattttattcaacaaccactaaccaagtacaaaacacatgccaaaaaaaaaaagtacagaacaaagaagactccccagcaacacaaatcaaaatctgtttattatttggattacatctctttccccaattttgtttggaatgattacaataaaaaaactctagccttgagacttggtttgatcttcaagctaagaaccttggccatctcacaaatcccttcaaacacacatttatttctattacaccaaatgtaatagaccactgctgcaatagcagcagatattgtatcatcatcaagttgttctgcttccctttcagtccattcagccattcctcaagatttaatggccaatcaatttgaccaagccaacttgtaacttcaagaataacacttttagagaaagcaataaaaaaaaagatagttgtgagattcaagagcgccaacacaaatcggacagagcaaggagtctagttgcacgaacctggcaaggagatctcgacttaagagattggaattcaggcctgccacaaaaagaatttgtgctttgggactgtaagtttgtattagacatctttacggtaaataacctttgaaacggagatgagagagtgataaaacttcttagctttaaaggtacccgtcatcctctgcatcaaacatggtctgcctactaattttatctcaaagattaacaagcttacggaagtaccagcttatattcaagctcggtttgaacatctaaatgtcctcttccttcaaataaatggcattcacccaacgaacctagagattatcttgtttcatggaaagagcccaaatgtatttagccataagaataatattttatttttttcccttctctaaacctgattcctacatacaccttaggtaggcaaacacactttttctcaggaggcaaaatggagcttgcatcagctaccagagaatccccagagaaaatctctgcataacttgtcaatttccttggtaaccctttgaggcaagataattatgctcacctagcaattcttaatgctcattaaaacagaatggactaatggcgcttaacctacaaaacaaaggtgcctactattccacccatgcagctttttctgaatcttatcaataatgccaacacagtcagcatgcttctattttgtaggccgtagatttaccccaaggtaattcaaaagaaataaactttttttgatattaataatctccaataagtgctttttgatatcagtcgaaatacctccaaagtagatagaggatttagacttattggctacgaaacccgcagcatcacaaaagtcagaaaaagtccttatggacaatttgaagagaggacacattgcccttgcaaaagatgacaagtcatcagcaaaacagagattactgagcctagagacttacataaggggtgatatccgaatcctttggtacctgagtaatatcttagaagtcgagtaaggtaatccatgacaagaacgaaaagaagaggacaaatgggatctccttgtcaaagcccctttcttccttgaaatgaaccatgaagtctaccattcagattggttactttttaatattaaattatttaatatttatcaatttttttttcacataactaacaataaaataaattatcttacaaaagaaataaaaaataaaacaaattattattgttttatgtctccaacatcgaattaaataaataaaattaaaataacaaattcaaatgaagaaaaaataattgtttgtacaaagaaatgtttaattttgcttaaatttatgtaaaaaaaaaataaattatacataaggatggaatatacatttgatttattaagttttggaatatatttgtattatatgtgttagatttttaaattgctattttttttacataaaatattagttttatatatatttaaaattttatctaaatatacgtgaatttaattagatcggttacttttacatgtcaatcaacattcaatccgcacaagtgtagattttggatttttcaatccaatccaatcc

SEQ ID NO: 25846 - DNA, 4146 bp, Cannabis sativa
  modified_base (1342)..(1348): a, c, t, g, unknown or other
tctcatttctaaaaacaattttttgaaaataaaaaataaaaaacaataccaaacatgctcttagtgtctaacactatcattataaaataacgtaccggtaaatagttaataatattatataataattattaaattaaattaaataagatctgatatttaattttattaataacgatatgacatctcaagtggtgtttggtgccttttagtttttttattaattaaaaatttgttgttgtatttagaggcggacccacatataattgaggcggggcagtcgttctcctgaaaaaaaaattaggaaaaaaaatatatatttaattagttacaacatgtatttttaataaaagataatatttataaatataatattaattttggtgtaattgttaagctacttagcatataagttggaggactatggttttaatcccattaaatgtattttttttttctttttaagtttatttttttttgctcccctccccccacttacaaaaaaaaaaaaaaatatatatccctctcactttaaatcctaagtccgccactggttgtatttgagaaattagagagctatttttggacaaactcttattgaatctatgagttataggtttctaacattctatggattttttcaaaataaaaataataaatgtatgtagtagtgcatattctaataatattaaaagtattttcaaaaaatatattattaagtaaaaaatttagttgataaatatcaatttaaaaatttagaggtctaagaaaaatactaattttatattttttttcaccaaacaaaaaagtagatgcaatattaaaatctaattattaatgtcaccataagtctatgaaaagaacaatgatgattttagaaatagttcattcttattatatatcctctaaaaaaggccataaatatcccctctttttatgtttatttctaaaaaatttgaatcattagtagttattttgaaggtcaaatttctattatagtgaagtatttttacaaaatttgattaaatatatcttgaatcattttttaaaggataaatactattttggaccatgtattttgcaaaagttatcaattagaccctgtgttttgttaaatgataaaatggaccctgcattttctaaaatagtacaaataggaccctgaattaattttttatcaaaataaagtttaattataatctgatctaaaagtgttatgacaaaaatgtttatattttttgtatttgttcgtattaggaattgttttcaagttgattgtattaaaaaaaaagttgtcaaaaattaagctctatttttaccatttagaaaatacagggtccatttnnnnnnntaacaaaacacaaggtccaatctgtaatttttgcaaaacacaaggtccaaaatgctatttacctttttttttaaaaaaaaatatttaattttttttgtatgattagttgaaaaaaaaacttgagaagatatacatgtatttttttttagagaacaaatatttttattattattttggcatcatcttgtttatttatttaaaacttatcaataaaaatattcaaaagaatagacctgtctttagtcttccataaaagttacacactattgtctttattcttccataattgtcctaaagtttataagagaatccatttcatatttactttttattattatttaaaaataataataaaaaaaaaagatccaagtgattttttttcctttttcatttatagaaatcaaattatctaatctagaatcaaactctcataaaaaaaaattgcaccaaaagtttttaaaaagaaaaattaccaaaatacatcaacatggaaaaaaattattttttactctttgaacgttttttatttacaaaaatatatttcaataaaaataataaattatcttttttgttgttttatggttgtcatgaggttattattttatagtttatttatagctgatttatagttgtcgtgagattaattttttcgttattttcttactttttgtttagaaaaatgtatttttgtaattttagaactttacaagtatatttttataaataaaaattttaaaccgtaaaattataaataaaatattaataaaaaaagtatttataaagaatttccaaaataaaaagtaagctcaattaatttttccacattaataaacccatttataataatctttttttttcttggaaaatttcctttataaattttacaaataatattttttattgataataaaatgtagagaaattaatttttttttacctatttatttgtttatttttaaagatttttgcctattatctaataaatgctttaagaacttacccactaattaattaatgttaatttaaaccactttctgttgttttagtctacatcaagattgtccctttgtaattaaattaactgcaatgatatttatagaatatattctaatcttaaaaaaggttgtgtgaaaaatgtatgcacacctctttcatagtgttattatggtgtctaacaccacatggtgccctataaataattagtggttttctgtaattatttttaaaataaaataagtaaaattcattattaaattgttccaattataaatagtaatatgagattttaactatttttatagaagtattgttattgggtactagtagtatccaagtattttttataggtgggtgcttatgattagttatcaatattccttaaaaattatttacttaaattatatagaattaatatataattataccgaagagagtgctaagcactaactgtggtacattttagcatttctcttttttaacaattatctttctattaggttgtgtgaaaaataattagtgatgcttaatgactattgatcaccatcataatcactaaggactaccactcattagcatacatacaatttttttttatgagtttcttacaaataaaattaaaaaagtcacatcttatgtaataataataataataataataataatgacaattaataagcatgcttacattgtgtttattagagtaattaagtgagagatgtgtagctattttccacatgatgtatgactttggaactagggtggttatacttattaatattagattaggtaaagattcagccaattaaattacattacataaaataaaataaaataataatgtaataaatgtgttatgtcaatgggctatatataaaattatttaattcctacaatataaacaacccccttatcgaggtttgtaatttaatatgttatttgtacctatatatgtataatatctatccataatcatttaatatgtaacaaactatataaatatataaaatattgttattgggtattagtggggtggtgtccaacattttttataggtcatgtttcacgattagttaataatattttttaaagtattttcttaaattatatgaaacttgatacttaattacactaataacgatatgacactgacgaagatacttgacaccaataatattttttagcaatttttaaatatatagggattaattataaaaaagaaatataaatattgagggcactatactaaaaggaaaaagatattagtggtcactacctatatatctaatatctatctatagtcatttaattttattattgatataattaagtattgagctcacaaaatttaataactattgtacatggaatatcgctaatcatttataagatactatctctaggtggagtggtgtctaatagcgatatgatggaccactataaaataatgcactatttttgtatttttaatatctgaatagttataattgatctctttattttttttttatatgatagtacatactgtgtttatttaagaaattctataaaatttttaaaaaaattaaaataatttataatacagaaagtaggttcaatctatttatttcacaagtgtataaaataagataaacacccgttaataaattgtttaaactttattttcgatgtgttaaattattgtatttttttaaaaataaaataaatagaatgtgatcatataaaaagaaaattagaagagtacacttatttttagggtatgcaccaaaagaattttaggggacttttgctttgtaacaaag

SEQ ID NO: 25847 - DNA, 2071 bp, Cannabis sativa
aaaataaataattactattttaccaattcaaaatagattttcttcgaatatctttatactactctttatccctacccttgacaatgtttcaagatggtgattcggggaacatggatctataattctaagctttaataaactagattatttattgagtgtcatcaaccaaataatcctttgtttattaattctattattactccactaaaaatatagaatttcacatgtgttagtttgtaactagtttattaatcctttatttattaattatattagtaattgtagaattatatttactgagtttaactgcagtgtctattgatataatcaattctaatgattagccctccatgtgttggttcgtaattagttttggtcaaaatactattttacccttccaattacttctttgtcctttagttccattaattcactagtgaaagtataatttaagatccccatgtgaatttgtgcacaacattccagttccagaattaatacttaaaaggaaccaacatttgatcagtaaggaaagtcaagattccataattatacatcatgttcccagtcatccatgttattatattctcaaaatagaagttggaagaatcatcttttctaagagactttaatgagtgaatcaaaaaaactaataacatgaacaggatttcatgataactcaatatttaggccgttctactattgatcattgttatgatatgaattaggtctttatgataaatgacatcttaatgaagacaactttattcatcttggtccttgtcatatataatctctattatctacagcaccttaacttggatatctcaatacattagtaatccgagccaagattacttgcaccaaaaaacaggcatcattgaaccatactaacaactattgattaaagattccataactttaacatgttgctgactattttattcatagctaagtggtcttagttctctgtatagctacaagccacaatctcataaatgaataaagaattataaattattcaataataaatattaacaatttaacattcacacatatatcaagtgtttaactctttattcaacaattagaaatgtctttataggcttttcagggcataaaccctaacaagatgaacccctgaaatagggatgttaacaatttgatcaagtcattcaacgagagagttagatctcaagttgaagatcctttccttgttagggatccccattggggaaaagatccctttgtcctagatggaacttagcgcccaagggaccatgggcagacctcaaggcctaaaggggaaaatatgtcccagacaaggccatcctgttagcccaatgatggccaggtcttgcctgacaaattatatggcagggctgacaatttccaaggcctactcaggggcaaagaaggggttgaggacatcccaccaatacaaggccaaagcaagtctcgtagtgggagtcttaccccaatcctaatgatgatagtgccactagtcacccaagtggtgaacacactaaccagagagatcaaagttctacgcacaataacaatgttccaccccaaaacagcccaacacgtcctagctaggtggccaaagagtctgtgtttgctagaatgggccctcatgtcaaagttgatctttaggctagcttgaatcgaagaaagagtgctcaggatgggtatattccacccctgaacactcaaccaatatgatagaatcaacaaaacttgacaaacccaatagaagtgttggctggccaaccccctgtctacccaccggccatcctggccgactaggggttggcaggtcaaaacatgcccaggaaagcacaagctaaggttggtcctttattccaagcacttctggatcaaataaagaacatgatacaaggcatgtctagcacaaagctaaccaacttagagttggacaatacctgagggtcacctttctctgtgcgcatcaatgcgctgcgttaggttataattagcctgtgtcacgggtctttaaagttagcattatctcgtctattggtgtcttttggagcagttttacgcttga

SEQ ID NO: 25848 - DNA, 3845 bp, Cannabis sativa
tttttttaatttttttgttttgtttgatttattttagtattgttttatatttattttgccatgattattaatttcacattttttttttgagaaagtaatttgacactgatttcactgttatctcgttggaattaatagttattttttaagtgttttcatgttgccgtggtggttctgtatatgggtatggagaatggagctatggttcttgatattcagtgtctacaatataatataaaaggaaaaataaaattataaatatttgtccaaaataagtttctgtttaagcctgagccgaataaagagtgaaaaataagtgggcctgattgaatctaagcccaatttaattcgggtttcttatcgggtccaacaaaatgaatcggggctccgatcagggctttactcggtcctccttcttctcttgagtcgctcaaccgtcaacagagttggggcttagggtttcaaactccaccaccatttgtgatcaactgaactgaaattcccaagccagcatgggtaagtgaccaacagcttcttcaaattcaatgcttttgaactaacaaattcaaattcatatactgttttctggaaaaaaatatacttatttctgggatttgagggatattaggttcatgcaaatcagctatggagttatggagaaagaaggagactgatgttttgaggacagtattgagacagagatggcgggagtaccatgctttccattcaactgagatcaaaccagataaagtaccatttttttgttggcttatttttatatattgaattgttatttattcaatacaaatttactgttgaataatgcagcttacgggtgtgataaattcaagctcaaaaacacattttaatgtaaataagaatgatatcacaaaggtgaggtttgtgggtttttgctccttactttagtttcttctattggttaaaatcaaactgaatgttttttttttgttaatttcattatgcaggttctacttagaattaacggttagtgaattcaaatttactactacttttgttgtgttagttgattactctgtgttgattagaagaattgtgttattgaggaagctaaatagtggatgagaatgagttgttgggcaatttcaggcacttgattttgtatttcgggttatgagcttgttgccagatcaattcacttgtttctgataccaacgataaagagggacaatgattttgtttttcttggcaacaatgtttttaacagaatttactcttcttcatcaaaggcagaattcaagagaatgtacagttcgtccgtggtcgcattcgcaattcatgagaaattattgtgcaaacactaggactccttctctagttagatccatttcatcgcaggctccgaaggaaccaagaaaaaaggccaatgaggtttgagtctgaattgagttcttgtatttatatcttcattgtctaacatactaatttgttttgtttttgttaatctagttgataagctatataactacttgttatgtcacaggtcatagtaattatccattctttaatttagttgtttcatttgaacatttgttctttctacagaatttaaaatttaaattaacctttttataaaaacttggagaatgtccttataatagggataggaatatgacatatttcttgatttcattattttggcatttggtttcccttctattatcagtttttatggcatttggttgttcaaacccttaaagtatattcgtaactttgttctacatgtcctttggcagactaaaaaggacatatctaccgttgaggatccctttgattctccaacatataatattcccgagaagccattatcatttacggaaggttcttcctacagtcttctcattattgcaggacttggtgttactgcagcttcagcatatgccgtttcgaaggagttcatattcgaacagaaagagtaagtatcatagtggttatctggctgttgttgtagctttttttttggcatttagtgtaatattgatgcaaaagtatgttctttttttataggtataaaatatttggcaaggctctaaagagagttcaagatgatgttgaggtgagtaaattgctttactctctccctcctcaacttagagctttatctcttgcaatgctcaaactgaaagatcatttttcatggtatagaaccgaaaaaaagagagataaacaaaatgatgttgtaaatgacctatgcattattgtgctccctgaattttttagcccgttaaaataatctccaaactatttatgatgttgtaaagtgatttttctgtcaggttttgtcacatgtggcaaacaaaatgatgatgtggctgttcgggttttgtcacatggagaaggggattttggcgtcatctccctcatcttcgtcttcttcttcttctttgccttctcctgtaattctaacccaggatgagctgaagaagatagcggcttacaaggctgttgagtatgttgagtctgggatggttcttggcctcggaactgggtccacggccaagcacgcggtggcccgaatcggcgagcttttgcatcaggggaagcttaagaatattgtaggaatacccacttcaaagatgacccacgaacaagctgtatccgttggaattccattatctgatctcgattctcatccagttcttgatctcgccattgatggggctgatgaggttgacccgtatctcaatctggttaaaggccgaggtgggtcactcttgagagaaaaaatggttgagggtgcttgcaagaagtttgtggtcattgttgatgagacaaagatggttaagcatttggggggtagtggattggctatgcctgtggagattatccccttttgttggaaattcacagctcaaaggcttcaaaacttgtttgaggatgctggttgtgtggcaaagttgaggacttttggtgaaaaggtagagccttttgtcacagataatgggaactatattgtggacttgtatttcaagaaagatattggtgatttgaaggttgctagtgattccattttaaggctagctggagttgttgagcatgggatgtttttagacatggccaccactgttatcattgcaggcgagcttggtgtgacggtaaagaataagtaatgactggtataaatgttcttatttttcagtcaatatgactggtatttgttgtaacaagggaacagtttttgttcccacttgattaatctatttatggggtcacatctaattttgattatgtctttggcacaatttagcctcgaagaataggaacattgaattttctagacagctaaatgaggggcttatattgttggctgtactcaattcactcattatttatggaacctccagttccatttaaactagtgatacacatatttggttatcagatatcttatactctataaatgtctcctgttggaattctgaaaaattgtatagactgttcttggctttaatgttttgtcaatcaaaaggttctgaatctggttgaatgggatttcggctatcatgccaatactaatcttttttattctttggtactcaagtgtgttgtgatagagaaatgctaaggggcaccaataatataaaaaattgttcactactcataacaaaatatatcagtttaggcacttttttaaagtgtctaataacaacgctgctcaatatgatattgtcaatgttaatcttcgtttaggattggtgaaattaaattaaatttaacattttcttcatgccacataaattggttcatgccacataaatttaacttttggtttggtccagcatttctacattggaccagagtagtgg

SEQ ID NO: 25849 - DNA, 4870 bp, Cannabis sativa
aatacagtatttttgaaaacttgtctgtgtgacattgacattatttttattatttttgtaaaatttttgtaaaagttttgtaaaagttattgtaaaagttaacaaaagttaacctaaaagttaacctaaatttaacctaaattccagtatttttgtaagtttccctcttcaaatctaaattgggctttaaaagttggcgaaggaaaaagcccacagtattatgggccacagctatactaagccaacattctaacacggcaaaatcgttcgtggactcagtggctgactcagtcgctcaaaaccctagctctaagctcaatatataatctctaatatctccgcttcgcgataagggcaccctccagttgccatttcggagaaagaagaaagagaggacacacagaatcgtatcaatggtgtcgttgaagctccagaagcggctttccgctagcgtcctcaagtgtggaaagaagaaggtctggctcgaccctaatgaagtcagcgaaatctccatggccaattccagtgagtacctctccttcatttctataccttaggtttttgtcatatcttttattggatctggattgtgttgaaacctgtaaagaactttgtttatggagtacttgtttagctgatttagaatcctttaaactgtggtttgtgctattggagaaggattatttaggaagtatggtgtttaatgttttggtgtatattgcttaatgttctgaaatgagaggtttgtgttttcagataggtcgttgattagattcattgataagtaatttggactgtagattttgacccttttgttttcgtttatatcatatgaatatgatgttgtatcgtgtttatgatagaattcggtatcggtattttcattaggttagtgggttgtctaatgttgtttttatattatgatataagtgcaacatgggtaagttatgaagttttaggatctttgtctgtgctgattgaagatgcatttcgcaattttggtttctgtgattaaaccattttttactaccatttttacagggcaaaatgttaggaagcttgttaaggatggtttcattcttagaaagccaaccaatattcattctcgatctcgtgctcgtagaatgaaggaggccaagaggaagggtcgtcattctggatatggtatggttattgtttattctgtttttggtttctttcaataatttgagtaacattttgagaggtttatggtttgcttattaattgtttctaggtaagcgtaagggtaccagagaggctaggctccccacaaaaatcctctggatgaggaggatgcgtgtacttaggcgtttgcttcgcaagtaccgtgagtcgaagaaaattgacaagcacatgtaccatgacatgtacatgaaggttaagggtaatgtctttaagaacaagagagtgctcatggagagtattcacaagtcaaaggctgagaaggccagagagaagactctgtctgaccagtttgaggctaagcgtgccaagaacaaggcaagcagggagagaaagcttgcccgtcgtgaggagcggttggcacaggtaccctttattttgaaaaaccaattgcttatcgattgaattcgacattaggtctttgttgtgtatgttctaactcttaactctatctgaattattgattcaaaatttgtgttggatttgatagggacctggagaaaaggcacctgctgcacccacacctgcaccccaacaaacagagtaagtgtttgcttggatttgaatttggttatattatcaattttggtgccaatctaacattggttttttaatttcgattcttgtagggtttccaagaaaactaagaagtgattagtgaaagtcacctaatatgagcactgaagaatataagtcgtacatgtaaaacgctcttgacttttgtcagtagaagttttctttttttatggcatagtttattttcatgtaaaccataacttaatgaagtctggtgattttgtttttgttctcacaactgcttgattatgtgttcttgagattttaagaatgatatggattctttaaatggtagaattactactttgattttgggattttatgcatttgacaacaacttacgattctatgaatagaagtgaacaaagactaactcaatcttcctaactaactagtaaattttggtatgatggcctttttttattaaggaaaaaggttaacaagacacgtttcttgtttatggtacacgttaaatcatttttcttttattgggataaggtttttttagcccaattcgaatcccgatctctaatatggatgtacattcaaaaaccggctagttataagtgtactcattaaagaataaagataaaatggacgaattggcttcttattagttctgctactaatatgtttttactcttgttaatgtttttatgtaacggtttttaagggaaaaaaaaaaaagaacgatgcctcgtttatgttacatatgggtgtcatcttttaactaactagacactcaaaatttggattttcacctataacctcaccacatcaaaattatgaaaagaatgtaatatgtacatttttctcttttcaatacaatctacattctaagcttacacataaaatgaatattgatcagtgttttttcttcagcattcatagtattattttcgtttgagaaattctccatacaaaaaaaccaaattaaacatctttgacccttgaacattttaaagctctttacttcttttgttcatttgagaattcaccatttttgtcaaaactaaaaattagggtctaagaattatatataaagaaaaaaaaaaacaaaaaaaaaaattaataaaataataagtgaacaaaaacacactttaaataaggtcattgtattaataagaaccacccagaacgccacatcaacacactagtatttcttttttccataaaaaccaacgaattctaattctgatttcagttccaatttctatatatctgtctttgcttgctaatgttggctttcctcactcttcttctcttcttcctttctttcaagttacacgatccaacccaacgcttttcttcattcgaaccactacatatatatatttatatatttatatatctcacatttattgttaaattcttattttgaattcgaaccaccgatcacgaagacaatcaaattcgactagagatcatatggaatcggagcagttgatcacgtccgggagtggctctcgctacttccaaatgcaaccagagccggctttgtctttctctttctcgctccgtcccgaacctactcgaattttcgatgagcttcccaaggccatcatcgttgacgtgtctcgccctgacgctggtgatattagccccatgcttctctcttacacaattgagtttcaatacaaacaggttttgatctccttcttgatttttgttgattcgcgagatccgtagtgattattccagtttgtgattgaattcggttatttgatgtagtcggttaggtttgaacgtgtgtttttggatgccgagaaagttgtgaataaaataagtgaaatttgataaataatgtttttctattttatatcattatgttatttagcggtaatgttctcatcactttctggtgacacagtgagatcactgtttcattatggtagaattatccatttatagacttgtgttgccacaaaataggtataatgaatgcaaaatgattgaagtttgtactaattattaggctgcacttgcatttgttcttgttttagtagttttttttattaatttttttttgaagcatttggttttgatgatatctatttttgaggtttatcattataattatgggcttgtttgttgtattgaggaaattatgatttgagattttctgcagtgaatgttcttcttccttgttagattaggttcatgttgtgttttttattgtactaatattactttttgtatactagtttacgtggcgcttgttgaagaaagctgcacatgtattttacctacattttgcgttgaagaaacgtgcttttattgaggaaattcaggagaagcaggaacaggtgtgtgcttttcacaagtgaacaggtgtaatttttctttttagtcatccgcaaaactttggccagcttaaatatttatctgtgaaggtttggattttgatgtagtttccattggaacattatattaaaggttaaagaatggcttcaaaatctaggaataggagatcattcagcagtggtgcaagatgatgaagatgaggccattcctctgcaaaatgatgaaagtgctaaaaataggtgacaatatgcttaaactttattactataactggatgctatgattatgtttataatgctatggaatttttattgtagagaactaataagttggttcctggttcagagatgttccatctagtgctgctctgccaatcattcgaccagccttgggaaggcaggagtccatttctgatcgatcaaaggttgcaatgcaagggtatttgaatcactttctaggaaatatggacattgttaattctagagaggtatgcttgtgtttgattctttttggtagtggattctgattcttatttaactgtaaatgttggttttggtttggtctatgactgtcttatatagaattttgttgataaattgaactagtgcagcaaacatcatgcattaggaaagtccaattttcatactcaaattacacactaactattgttgtaattgttggtagaattacacttcccaattttcatactggtgcgatgaacttttggtagaatggattcacaaactgttgtatttttttttatgtaatgatagacactcccaatttg

SEQ ID NO: 25850 - DNA, 2919 bp, Cannabis sativa
acattgcactgacaaaagtttatagttagaagagaactcaagagtttaaggtgcaagaggatgtcatcactatcaactgtgatagccagagtgtaataatccatctttccaaaaaaaccatgtttattatgaaaggacaaaatatgtagacatcaagctgcactttgttcgagaaataatttcaaatggatcaatgatcttaagaaggtttcaactgatcataatccttttgatatgatcaccaaagtagtgccaaacagtaagtttttccactgcttgaacttgatccatctggatgaagattaagattgatctcactacaaagtattgccactctaaactcgatattgaagcaatgtggagatttgttagttagttggtccaatcatcaagttctattcctgttggtccatgttggtctaagctatgtttttaattctgttttggtagttattagtttaacacctataaacaaaaactttaaacctcgagctgattaagctttttcatgtaattttctctgtaatactagtgattaaattctcttatctctttgtagaactgtaaaatgaaaaagagtgagagaattgtattactctaagataaatttcatgaaatgaaataaagcgtgtgtgagtttcattttcatctgtgctctttgtctataatatttaattagttgttttctgatctcatcattggtttaagatcaccttgtgattaagtgatttgtggtgaatttttcaatcgattccacaccaaggttctcaaattttcattttgttaagaaattaaattgtactacaaataattaggagaaaaaaaaatacatttggtattcccaatctaatttcccacgcccgcgcacgttaatacggagttaaaaaaacaacaccaccaaactataaggaattaaaaaattaaaccccaaaagaatagctgaaaaatacggctgtccgtggcacttaaaacagcttcgtcttctttcgatctctgctcctaacgtaatctagagagtgagtaagaagaagaagaagaagaagaagaagacgacaatggctcgagtgagctcaggccttcaatacccagaacgattctacgcggcagcctcatacgttggatttgacggatctcctcgctcttccgctaaggctgtccgctccaagttcaaaccagatactgctcttattctctacgctctgcatcaacaggttatatatatatatatattgaatcaattaatgctttctctttgtttttgttttaacaaaaaaataaaattaaaaagtaatcccaaaatccaaattattacggctcttcaatctcaatgcctctacgtcaagaatgtcaatgccgcggttggattgatggctttccttaatttctttcattgttttgtggaatgttgcgatcgaattatgcatttccatttgtgatgggatttttcgttctggtaggcttggagtgcttgatttgcattgatttggtgaatttctgtgtgattttggtttctttgggtgtaattgagttagatctgggatcatgcaaacaagattggcatattctagttattgatctgtgattctctttggttgatgaggcaatcagtgggagaaaggaatagttttgggtagtgttttatacaatgtgcataagtaggatgtatgtatatgcatataaatattatatttatgtatatcttcatgggtgtgtcatgtgttactacagactttctctttcgagtatttgaaagtgcacaatttagcattggcgatcttgagagttaatggagttattgatttgatacaagagcttgtgtacaaatgtaatgttgatagcaggttttaacaattcccattgcaggccaccgtaggaccctgtaatgttccagaacctagtgcttggaacgccattgagaaaagcaaatggagcaggttcgtgttctttaccattttctttcttacgctcattattaaaacccaagatccctatacggattaaacatgcgaatattttgctcataatatctggatatatatcctttaaagttgcattttctgtctagtttttaggtgagcctgtgggctttacttttaaatggccatgcaaaggagatgtataaaattcgtaaaagcttgatgggtatgtaggaaagttaagattatgtgaggaaacacttaatttactcggtagaaatgaagcatgggagcttgaattgatatataagaattatgtattaaatgctttgatggggaaataatttgtaacggcagcttgtgcccataattggtctgtagtttcttgaaatttggagaatttatgtattaaggaagaaaggaaaagacatatatggtatttacattgttgcttaggttgttgaccaacattgattaaaaataggtatatggagatatggtattggttttctagaacttgaatctggattaatgttgcattgtctgacagtcagctaagtttatatcttacatgtaatcaaatggtgatcattaggtactgctttattgtgttctttggtaaagacagttttatttgcattgtgcagctggaaacagcttggagaaatggtacctgctgaagccatgcgtctttttgtgaaattattggaggtctatacaaatatcatttcttagctgcatgtttttatgttacatgtattgatacattgctaacatctttcacttctattttttggtaggaagaagatcctagttggtattcaagagcatcaaattttgttgcagaacctgtagttgatgtacaaatgaatgtaagtgtttcatcattatacattgctgtttaaataattcaccatttccttttttctggggacaaatatgatatgagcttcacaaaatgatgtctgttttctaacatttgaggatttttgtttagtgttat

SEQ ID NO: 25851 - DNA, 2774 bp, Cannabis sativa
tttgcgctattttaattagtaatcccggttaggggattagggccttataagtattttgggtagcgtgcctaattatttagggcgttacacttaatgcctttgatcacaccttttctcatagcgtcttccaataaacttgaaagaatctcaatcgcccagataaataaataagaggaaaggggatccccttgtctaattccacaagatggggcaatcttacccatagttccaccattgatgcaaatattaaaggtagtagtagaaatacactgatacacccagttgcaaaatttgccgggggccttaaagctcttcaaaacatggtcaattaactaccaacctagtttttcataagcctttgcaagattaattttgatcacaaaaaacctttcttttcctctctttccctaaaaggattgaatgacttcatgaatgataacattgttgtcttatatattcctccctggcataaaaacaacttggattgggcaaataagtcttgataatattggcttaattctattcgcaatgattttagaaatcactttgtagcttacattgcaaagagatatcaacctgtattgagagactttcagaggattccctcctttggggataaggaccacattagttgcattgaagcccttgtgtaaatttctgtttcggaagaaatccaagaccacctcgcagaattctctcccaaccgtatccaataatatttgaagaataagacagacataccattagggtcaggagctttaagactactcatggtaaaaagagtacgtttaatctctatttcattaggtaatctcagcaactaatcctgctccctattagagatagagtcgtgaatcaaatggtccatgctagccaaaaggattgcacgagacgccaaaaaaatactacccaagtagtccataaattctttaccaatgctttcacgagtagtaattcattccccatttctgttaataatacattcaatcgcatttctttgattcctaacagtggttgaaatgaagaagaatttagagcatttgtcaccatattttagccaagagatacgagatttttttttccagtaatcatctcgtctaatcaacgcctcattaagtgactttctgagttgggactcctctttccaattgcgttgactagtgggttgatcttgtaaagacttaagctccttcttcaggtcttgaatagtggaatcaataacaccaaattgccttctattccattgaaggaggcccacccgcataacactcacctttttgaacattctagtcggtatccagtgatgttagatagtagaccaagcatgattcaccactaatttactctgatcatctctagtccaccaagctttaaactcaaattttcgtttaaagtttgtttccaaacaccttgcgtaaaatacaacaatctatgatttaagtttgttgtgcggaggaaatgaataaccgccttagggaataaactgatccacggagcattagccatccccgtatccaattcagatttaagtatgcttatccatcatggtgattgtcccatgtctgattgtcccctttgatagtcaattagaccattagagtagatcagctcagaaataattaggataaattgatctttttctttagagacaactctcttagaatgagagagcacaaaattaacataccctaaaatcaaccacgcgcctccaaacctcttccccaaccccatcaaatgcggaatctttttttctcatggaagtaagggggccataaacaaacgagaggagccacggataatgagccagatctgaatagactagacccgaaatatgatttttcttcactctaatgctttcaaagataaagttatttttctagagcaaaataattccacgtgcacacccccaagcaggaaaaacaacattattattgaaatgtaacttattaagagaacataccaactgagacgtgtccacttttaattcagtaagaaagatgaagtctggtgagcatgtccgaataagggatttgagttcaaaaactgtagaggtttgccccaaccccctacagttctaagagatgcctctcattgtgcttgtggaggtggtgatctatcaacctccatagcggggaataattttcagaattgccaacgaatgagcccatatcatcaggaactaatactttctagttggaatatcaatatcttttatcagggcttgtgctttccataccgtgagatgcaaagattgcccaacagaaggaggtttggtagtctggctcatgttatcatcaaataggctatcctcttcattggaaccatgcttgccattgctattgatagagtaagaaaactccttttctggttcttccactttaacacggggaatttcgcatgccactccattcgagaaatcacagatcacaccagggaatcatctcagtttaaactcaattttagaaataggagaggcagatcgagagcacaaacatctcttcttaaatggagtgtgttcattaactttcgaggatgtttgtgctccaatatccacaaagagtgccttgcctttaagcttgtgtaaattactgcataatttcaattcttccatataagtatcttgggcttggaaaaacttaccaagtgctctattctcatcaagttggtcactattgtcttggcccaaagtggagtcctcacccaacttctgcttaattaagttcgacccaataaaggaagctcccaatttttcttttggcccaataaaagtctag

SEQ ID NO: 25852 - DNA, 4472 bp, Cannabis sativa
atcactattatgctttcaaatttcaatgattatcactacattaaatattcttagttttaaaattatgatattaaaaaaaactaaaagttaaaataaaattaatatacataacttgaaatgtaacacatataaatgtatttatattaagtagacattaaattaaggacagaaaatgtcttgacaattttattcgattaaatataaaaatcattacactatatattcgactacatatacagcttaattttgtcgaatattatattactactaatcaacaaattaattaatacttcatccaacattaaacttttttttaacttataacacacaaaacgtaagaaaagaaatatagcagagaccttggtcgtactaattaattaattaattaattagccgatgtggacccaaataccttggctgggaaattctccattaaccacaaacaagagataaaaccctgaaggagcaagattagccgaagatggtgtagtaacctccacttggtataccgttcctcctaaactctgcacttgtgctgtgggagtaagtaccaacaatctctgattcatcgagaatgagtgagtattaaacgacggagaaaccattgtcgttgaaatcgatttaaggttaacaatacccctcagccggaactgaattgtaaacttctgtgcataactgagtttggtttgaggtgctggtataactattacgggtctaagaactggtctctccaaataagatggagtgaaagcctctaagcttagttctgtcgggaaaagaacaccggagaactcgtacttgtcatggggattgcttccaccgatgagaacgcggccgtcgcggaggagaacggctgtggaatggtacattcttggaattgtggttggtctttgagtttcgaatcttgacccgatcttattatcggttcggtaaagaaccgggtttaaaaccgggtttctaccgaactcccaagaagctgttccagctccagctccgtttacaatcaaaacgttgccgtttggaagcaatatcatgtctcccatacaccttgctaatggcatagtctccatgacccagataggattcgggtcggtaattttgatccgagcacatgtattcaatgctgtaatgaacttcccttttgctgcttcggtataagatcctttaggtgctccaccacagaccaaaacttcagcttcaacattcacagcctcaatattcttcaacggtaaaagaacagctgacccagtgctcgggtaggatctcgggtccccacctggtatttgtgggtacgttttcaccaccttgttattcacataatccaacaatatagctctgttgttagcaaacacgaataagttcccatcaacgttgacaaaaacaaagggatatagattgttctctactcccttatcgttagtgtcagctaagaattgtaaatcgtggacattcgggtcagtcgtttttggatagaactcgtagttgaattgtttacgaccacctatgattatttgcctgccatctggcaatacttgattggttgagtaccaacgactcttagccaatccaaggttaacctcttgccaatcacaatcagcactaccaccacaaggcttgaaaagtctaactcttctttctccttcaaatgatccaccggtttggactagcgttccatcgggcataaccgagccagaagagcaccacacgttggtttgtacagtgagtggtctgaatttgttggtcatgacgttgtactcaactgaatgtgcgctgcagtctttggccccagcagggcatttcccaggtgccaatgatatgttagaggtgccgaagtcagttcggtcaaacatgatgacacggtcgttgttgagaagctgcatgtgcatggccgaaatgccaatgcttggtgtcaagaatttccaccggccaccggctgcatcggttgtaaatggtaataagataccggaaatgaaaaggataatgggaaagaccatgtaaatcgcactattgagattcattatatattgcttattagcacttgattgtttcgattctttgatttgtagatgatcagatgagtttgtttttgggtgatttgacacaaccaataccgcaagtatttatagggtaatgtctatgtgtgttttaaatgatttctggtgaagtcagataattgacaattgagttaggagaatttcaaatataatttttaattaagataagcttaggatatggcttttcatatatatcgttggattatatttaattatgtttgttatatcaattctatatgtatttatttttgttgagacaggtctggttgtgatatgatgatgattgctttagtattctccttttgtttttaatattattattaattttaatacaaatgtttaattatagcacgattggaatgaaattgaagaatgattctttgtgcgtgaggattgttaattagtaaacttatattgctggttttaaatacaaagtatggggccatatatatattaataagttagcattttatttgcatacatatatataggtcttctatattacttttaaaaataaaatgaactatataatttattgcacttgtagattataaaaataagtagttgcttaaagtctggcaaaataataatttgataaataaatttctagtcgagccatttttactagtattgttagggggcatgattgtgttattttgtgttacatattagaatttgatattaaactgtccttaaagtgccaaataaacatatcagtgtgatccgattaaaatatttatatattaatttgtaggaagaaattgatcaccattattatctatatataataattagtggcatatatatgtataattaagttaattattatgtaaactaaagtcaaaattttatttcaaatgggttttgaatttacaagactggtttaattagttggacttgtaaaagtaggtttttggattgaaaagctctagatctcaacttcttaaagaaagcttcttagaaaccgaaaaacaaaacagaagtccagctaacaaaagcctacgtacatataattacgtaattaacaagctaggaaacattgacctatatattatgtggaggaaaatcttaaaagacactgagggtgattaacattttttttttataatattgctattagtataattaagtttttatataatttaaaaaaaataatatttaaagaatatcacttactaatggtagcaccacctaataatgctcattgtgtatagttacatatatgaactaattacttattaaaagaaaaaagaaactataataaataactgcatttatatggaatgtgtgcattcgtattttaacacagtgaaatcaattgaaagcctctctatttacgtgtgtgtatatatacagtgaaaatttagggtagaacctagggttttgtccttatactacggggaaataaattaaactagtgaaaatttagaaaaaaatgaaatgtagatattatccttgcaaggagttgtagcaaattattatgtccacactatttattttttttttctttttatgaaaatttcaatactttttgttttaatcacaatttcaatactttattcatacttatattacagtattgttcattcttgtaagagtgcacgagtggtttttttatttatttatttgcaataagacgtaatttatagttacatgcaaaaatatcatgttataattaaatattttaaaaaatggataccccaataaaatattttaaataaaattaagaagaattttaagaataaatatcgtcagaaaagttatcaaaatagttctattagccaaaccgagtctatatattaaaagagaaacttacaactcttttatatttttaagaattttatctatgctagacaacttcctttaaatctacttttgaggctttctttaatgctactatctatacaactcgaatttatacattttttcttatttatacacaaattttggtttagccaaatgccataaattgcacatgctaacacattcttatgaacataatataacttttatgccacaatctaatattttattattattatttttaaaattatatgtgtttttttaaacatatatttttttcaataacaaagtcctttaacttaaagccgaaaaaaattaagctcattaatatatgtacacatgacatgtatgaagcagccctctttcttgcttttttctttaacaatttttttaaaaaaaagtagcctttttttaaccaaaaaaaaaaatatatcgcaggtgtatgtacatattaccgtaccatataacatgtatttgactttaatcttattggctaaaaaactacaccatgtcatgagatacaaactaaggatcttatagtagaattactcattatatatattcttttatttgttacttttacgtgcttgcaacgatgtagatattggacctatg

SEQ ID NO: 25853 - DNA, 2690 bp, Cannabis sativa
gttgttaagatatattttattaaaatcaatcttcgagtttattattataaaatacgggcgttacacgtgggccgtattcttccccaccagatcacaatcaatcccacaaggcccaccaataacctctcctttctccttgccctttaaaacaattaactcattcgacctcattaaagacttggacccaacagcccaatgtttatcttttatattctcacggccaggcccaccactcacatccctttcaccttctaacccatcataacacaacttaccaggcccattacacaaagaaacttcacaacccggcccaacaacatcaagcccaagatcattcttgtccttactcggcccagctcccaataaattatcaacaatacataatccccctttgaccaacggatacccatccttcattaccacattcgaggtctctaaactagaaatagactcagagatctttcccccaaaattcaaactcaacccaaccttattaccattaacggcatggttcaaagcacgcttacctgaacctgccttttgcacccattcctgcgatacgcccagcttgtgaccgggtaaaacacgaccggtcactctcttccatcgattccgacccccagctgtcttgggattagagcctccaaccggacctccatgcccagcaacgaccatcttcccatcacgaacgtccgaacccacctgcatctccacagagggaggcatcaccggtttggtaacactagagaagacatcaagaaatcttgaagcagtggacatccaaggaccaaataacggaactgcagaaccatccaccgactccaccgtgaccggcgaagctagagaacagcctctcctctggtggcccaaacgaccacaaaaataacagaatattccaattttttcaaacttaaattgaatccatcttttctccccagaggttaaatcaaaatagcaacccgacacaagtggattgaggaaattgatatcaactaacaccctaaaataagaaccccaagtaacaggtttctcctcatccaactcaactagaataaccttaccaagcattcctcccagttggttaccattatccatcgaatagtactcgtggggaagattatgaacctgcacccacacctttaacatgttcacagaacccgacctttcaataccagggaaccaagcatacaaaatgaatgtatatcctctaaaggaccaggagccattctccaaagcccaaactttgtcttccacacattcaagctgagcttgaaactattcatcagggcaggagcttccgaaatagagcaaacagccaccggtttcaaccagttcttagtaacatgctgtataatatcttcagcattaacactcatgggtgctaccaccttgccaaataaacacaatgacgacagggctttcagcgaggtggcacactgagacaaggatatcgagtcttcggcacaagagaaacttttacccatcagagggccattaaccgtggtaactaactccattaaaagcacagacaacaaacgacaaaatggaataaatacacacacccccggatcaactaccctatcccaagcacaataaagaagacacaccccgacaaaagaacacacacagaacaagaccaaccccactcactaaaaaatagcaaagaaggaaccaagagaaacagtcagtgcctttaacttccagaaacaaaaccaaagaaattagtagaatgttaactcaattaacaaacactcaaacaacccaaaacgaacgacttcaggaccataaactcagaggttatatgagtttgaaatcttttgataattttattgttattttgaataaatttaaattgacaaatgaatgtataaatgttattttgactcttatttttttaatagttttgactcctatattattcggtatataaatatatattgtgcttattatttatgtttaacaagaataatttagctacaaataaataattagtgtattaattttattaagatggcataattgtaataagatggtaaaattatggttaattaataggtacaaacaaatcaatctataaatttgacatttgtcattcaattatggaaagagtgcaagagagagtacaaaagagagtctccgtaacactcctcttataattttacaatataatctgagatagtttggtatggtgcaatgttttcatgagaatggtaatctttaacactctgttttgttatgtagtttttgatcttattactgtggtgataagattaccttaacctcatgagaggacaatctaattttaatacaataaatttaatacgttaataatttatatactttttaaagtttatttaactaaacaatataatttaattaaatatttcgaaaaatattaattaagatttttatcatttgaactttgacatatattaaattatatatatttccgaattttttatgtcgttaaaagattgacatgtttagattcaaagacttctatttaatttggttcgattttactaactcaacgattgtttatatattaaatcgtgttcttgtctttcgaattttcacatgtattgattcgtatctctaaatttttatctttatatattaaaagtgcctatgtaacggcaattcttggtttaacagaatatgctttacaaataaaagaatattctgttaaa

SEQ ID NO: 25854 - DNA, 1956 bp, Cannabis sativa
gtcatagttagaactcgtctctttctctttctccgtaacagtaaagcttttcgccatagctctaagctcgaatttctgaatctttccagttgaagttttgggcaactccttaacaaacaccacctttttcggaaccatataatgcgccatattattccggcaatacctcaagatctctgcctctgtcaaatctccggcgccggcgccggcgacaaaagcgcaggggctctctccccaccgtgggtggggcatcgccaccaccgctgcctccgaaatcatagggtgcgtgtagagcacgctctcaatttcaatgctgctgatattctcgcctcccgatattatcacgtcttttgatcggtcttttatttcgatatacccatcggaatggactactccgacgtcaccggtcaaaaaccaaccgtttttgaaagccaacgacgtcgtttttgggtccttgaaataccctttcattaagctgcttcctcttataacgatctcacccaatgattttccgtcacgtggcatgctttccattgttctcaaatcctttacgtccacgtcagcaaggcttagaattctaattccttgacgggccttaatttgggcctgcttctctttcgagagtttgttccattgggcctgccattcgcatactaaagccggcccagttgcttcggtcaagccgtaagcatgggtcacgtggaaaccaagtgattccattttttctagtaatgtcgccggaggtggagcgccgccggtgagaatctccaccggataaggcattttccggtggttttcggggatggccgcctcgagaagaatgttgaagataattggtgcgcaacacatgtgggtgactttgtggagagagatgtttcggtagattttgtcggcagttgtgtggcggagacagacgcttgttcctccacgcgccgccactccccatgtgaaagtccaaccgttgcagtggaacattggtagggtccacaggtagatagggtgagtcctcatttcccaaccgagtaacaagctaagagtgcttaaatatgcacctctatggctataaactactcctttgggagaagaagtagttccggaagtgtaattaagtgcaattgcatcccactcatcatccaacttgatggattcgaacttaggatctcctctttggattaactcctcgtactctaactcgccaagtcgagttccattaggcacatcaatatcatcaatcacaactaccaaaggcattttagccttatcatcacgagactctccagctagaatctggagagcctcgtgtcctgtttggacaaactggtaatcaacaaagaacatcttagactcagaatgctcgaggatcgcagctatgttcttagcgtccagacgggtgtttatagcattgagaacacctcccgccatggcactgcgaaatgcatctcgtacatggcgggaatgttgggagccaataccgaaacctaaataaattacaccaattaaaatattttccaaaaaaaaaaaagtttgagaaaaataaaatgtacattacttacaacattgttcttgacaatgttaagggatcggagtgaggaagcaaggcggcgacaacgttggtaagtttgtagccaagtaaagcgagtgttatcgtagatcaaagaggttcgattagcataggaagtagcggctcttttcaagaatgttatagggcttaaaggcacataattggcttcacatttgtatagctcatccattatttggtgtaaactaagattttagggagagaggtgtttttttttcaagtaatttgtgtaagtatgtaaaatgatttttttaggatcttttgttttctattaaaagtgtttctcattaaataataaaggccatatgggtaggaaggaaggtatgaaaattaaatggtagaatgattttcaattttatttcaattttttatttttt

SEQ ID NO: 25855 - DNA, 1555 bp, Cannabis sativa
  modified_base (477)..(488): a, c, t, g, unknown or other
aatagttttgatatttaaagaattaaaattgaaaaatatggtattagtgaaagaaaagataaattgttgaataaaatggcaaaattctaactagtgggacccacattatatggtcggccacttaagagaatttttagccaattttttatatttttttaatcccatataatttaaatttaaccctagcagaaatcctatataaggaataagatggttctcattctatccaacctaagttaacctagtttttattctttgtcagacaactagaaacttgagagcctccttctatagaattcgaatctccttctcttttattcttcattattttcgagtcttatagtgaaagagtacatgcccacccatagcaagtcaagcactcaatcatagtgtgtaagactgtgaaaaagccaacacttgaaggagaatcgggctcaaattttgataatacactgcgacagaaaggaacaagggttnnnnnnnnnnnnggaaggagacatattattcctctggcattaatgtaaggttccctaaactttatatgtgtttaattccattattttagagaattcatatttagggtgttaaacaacatacatgttagtaaatctacatcctgaaaaaataatccccaacataaacaccttgagtacgtcggctaagatttctaacagatctaaaacaacctattctacaaaaagaagccattaaaaccttgtttctttgtgttcttcaaaacccatagtccaaaatgtggaaaacagtgccaagattcaacattttttaactaaaagccctacatttacctatcctaacatgcacgttcatgcatagaggttgggttttccttaaacccgaggcaaggagattctttcacctctaacaatggtgtaaattcaaaataatttgcaaaaacacataactcttaaagaaaaggatagaggtaaaagagacttactcactaggtgaatcctgggcgaggctggacaatgatgaaaacaagttgtagattttctcttgcacagtgagaagacaaaggaagaagcttcaggtttcttgaagttgttcttgatttttctctttggaactttttagggagtaaaaaatgaaagtaaaagtctaaaggagaaagaagggcctttcatttaattactttcccccccaaaaaataattaaatgggaaattgattcccaataatatcatcatgggaaatggaaagaacaaaaagagaaattatgagggagtgcagccgtcaggatgttttctcacaaaatatgctttaaaactgctcttatgggaactgacatttaatgttcagttgaagagacagaagtgcaatcgttcacttctgcacggtacaatcacttgagcattaatcacgtggacctcacatgcttgccagcacccgtatgggtatcaaaagtccccatccagaaaaatattcgtacatggacttgggggcgaatgttatcccaaagtttgcaaatttgatgtgacacttacatgtggcataatccagccaacgctttcacctagcagaaaacctccgggcag

SEQ ID NO: 25856 - DNA, 2893 bp, Cannabis sativa
acttccccagactcttactactttgactacatatgattgtgctctgttaattccaaggtgcaagagagaaacaggagaagattggctcaacattcaacacatacctaacatatatatagatgaggtaagttttcatattgaaagtacaaattattttgcaagatattggaatgaatataactcataacttctttttcatattatgaatctcttttgattcaccagctaaattttctttgtcagccctacgaattgtacttttataaattttgtattccaatttattgtaaagatactgcaatgaatgaaactacagaattggtatgattggtagtcaatcttacccttgttctacaattcttatagctcatgtctttttaatattcattttctttcttgtctttagggcactggttgtacaatgatgtgaggactgaggagctgttggggtagtttttcgacttgtgtgacttttaatggtgctggtgtcgatgtctttggcctaatgtcgcgctgctccttcggttactatcttgttttctgatactgctggattggatgtttgttgacaagttggaatgtaattaccatgaagactgcatatccatttcatttgtttttgttgtgtagggtattcttccgccacaagtgaagttattcaataaattcgggaagagatcactcatagacatgtgatcctcttctcttcttattttactatatagcagtttttgaggtctaagctaataatagtaatactatgatcttcttctatatctgtactcactcaaatcactctgctcagtttcaacttttcaatacttgtgcttagtcctttccttatttatgttcaatgctgttataattacaaatttcattcctaaatgattcagataaatacatacactcattaatgatcaaacttgttacaaaatgagataaatacaggtgctgtggcattagataagttgatacgctaatgttctagttcagattctttcttaggttaaaatcttctgttggctactatgtgcgcaattttgagaacctgtcatggtttttctccgccacaagtgaggtttttcaacaaaaatgaacgggctcagtttaagacaagtaacctctatctcttaaacttattagaacataggcacttcgttgatatcaaagacaaagttataaggtttccaaactcttccaggcagtttggtttgaaatctctccataaagtattttacttccttttactcataagttctcactcctcctctagtaagataggactaatcaacgtattgttattgagtactagtagtgctcagcatcttctataagtagcactttataattgtttaatgatattttctaagatctattttcttaagttatataagaactgatacttaattacaccaataacagtttgacaccgaggatgattcaagccaccagtgataagcaataagtacagtaatgctatagcctataggcctcagtgctttcattcagattttgtacttattatatacaattttcttttaaacatgtaataataatttttctataaaaagtttaatttttggtagtaataatatttaagttatatttttggaactttgtaggtacttggtcattaaatatttagtcattatccatgtgtcatttttttattagtatatttaaactattttcaataaaaaattaaaatttaataatttggactaatcaaaaatttccatacagtaatttacttaatacttaatattcaggtacctacagagtttcagaattataacttaagtattattaatgcaaaaaattaaacttaaatatttatttgtaactgagagttaaacttaagtatttatgtcgtaaattactctatttattttcatattttttattttttatatttttaccgatttgtaatttttaagaaaaaaaataatgttattttttatattgtcacaatattatactatatttccacacggcagggccgaccttatacatatgacggctaaggccgtgcctagggcccacacttttcgagacccaaaataaaaaataataaaaaaaattattagacttttattaaagtaaaattaaatgtattattgtaaataacaaatatttatagtttagttggttaaggtgtatgtcatattatacaatgtcatgggtttgaatcccctaacacttttttcaatattttatgtatgtatattttttaaggctccaaattctaattaaccttagacctatatattctcagggccggttctgccgcacagtaaaaacaacatataaacaataattttttttagaatgacctaaaacttaaaaaaatatggaaaaatatatacattgtaaaaacgtaaatattttgtaatttttgtatatttctgaaataatctaaaaaatttgtgtagcacatgcacctagggttggacacgggctgcccacaatggcccaatcaacccaacccggcccacctacctgatagttatacttctcctactcctaaccctaaccctaaccctaacacaaacactcaacacaaaatctccattctccaccatttccagtggcagccctatatttgaggtgaccttcactaacttcaattttcattcctatttttcttttttcatattttttcctttgctttacttgacactatttcttcattttttctttgatttactgctaacttttctattttattttttgattctttgctgggaaaaaaatggtaattaatactcttttggtttataaataatgattttggggctaataatttatttgaatatatatagtccttctttccatatatatcatatatgtattctctagctttacagacatcatatgtattattgcttctttc

SEQ ID NO: 25857 - DNA, 2909 bp, Cannabis sativa
tttatcaaataggtaaaatataaagaaaaactccataacataacactgattatgtgtttagttttggagtttcaaattctcaatgtccttggatgtattacgacgagcgtacaaacaacgctcacaattaattcctgacaaatatttttgaattagttgaattttttcatattaaattttacaagatttatgtaaacctcttatttattattttaggtaatagaaaccataataaatttattataaattaatcatcaaacttattataaacttattataaatttcactagagtaattttatacatcaaaatatcttttttgaaatttactgttgctttactcttaacaatttttaatttcttacaatccaaatccatatatataccatacaaaatcgtatattctacatattcgcaatgattccatacatcaataattgtaaatgagatagtaaatttaaacatcaccacagaaatcattaaattctacaagtaaaaaaatttgtagagaaaatgtgtcgaaatgcacatttttataatatcgttctcatcctctttgataagaaatgaaaaagtgaacgaaagacatttagagtccactctgcctgaccatataggatcaaactgactaattagaacaaaaaaagaaattaccgcaaacaagaaccaatgggtttccaaaaatcagttcgtaactcaaaaagaaatcaattttttacatgctgtttcttttcagcagcacaaaaacttggcaaaaatattcattccttaaagttagagtttttttatcaaaaatattcttgttaaagaaaaaaattcattggcaaaacaaaatctctcattgaacattcagtaaaacccaaacttaagcaagggaaaaaaaactgcttacagaattcaagagtttgtgggttttgtttggttggctagaaaattgtaacattgagaaaaataaaagtgaagcatccgaatatgatacagaaagtaaaagtgaaagttgttctctctctctctcactcacatacttgccgagaaacccctaagaataaaggtgataggatttaaggttacaaaaataatattataattgcaatttgtagtgttgtaataatacctaaattgtactcgcttaaatattcattcactagtaaacaggtacatataaatatctattgaataataaaattaaaatcaaataattaaacttatttttatataaaccctaaaaagaattatttttatataaaatatatatatacttataaaaaaataataaatctatgtagaaaactctaaaaaaaattttaaaaaaattatcatacaattttttatataaatacaaaagcaaactttttttaaaatgtatattatagtgaagaaaaattagaaattgaacaatccttatacaacatagaaatttgaaattatatctatgaatattaattgaataataaaattatatgaaataatttcaaacatatttttatgtatatttttttaaaaaaaaataatgataaatctatatagattactctaaataattttttttaaaaaaatatcatcatacaatttcttatataaaaagaaagtatataaaaaaaatattttcaacataaatattatcgccatatctcatttgtagtcatcactacatttaaaatcgatagtatcaccgtattttacttgtgatcgtcattaatatatactgttatatattttgttaataattttaaattaattaataatctatacttttttactaaaatagtgatctttgattaaataaattagaataaaaaataataaaatgatgatctctcattaaataaaaaagaataaaaaatgagaaaattaaagagaaaatttaaagtagaataaaaaaattcaaaaaataagagaattaaggagaaattgatagaagtatttgaaagaaaaaatatcttgaaatttataatattttcaaatttaaattcaaataaaatttatataatgaattttattgttataaatattttcaatttagttttaatacattttgcaaaacaaattcatgatcacagcaaattaatttgaatatttaagtttgaaattattaatttgttcaaaaaaatttgtgaaggattggtacataatttagttatggatattttgatgtataaagctactctagtgaaatttataataagtttataataaatttgataataaatttattattgtttctattatttaaaataataaataagatgtttacataaatcttgttaaatttaatatgaaaaaattcagctaatttaaaaatgtttgtcaggaattaattgtcaacgttgtttatacgctcgtcttagtacattcaagggcattgaggatttgaaattccaatactaaacacatattctatgttatgttatggagtgcttctttatattttacctatttgataaaattgttttagtagaatgataaaaaatattgaaaaaaattgaagtaattaatcaataaaataccttatgatatggatggagaaacgtttgtcccttgacttctaagcaatggaaagacaacataatgcaatgaaatcgatagttctttcacttttatggtcaacctatctcaaccgaacccacctcgcccatcggactggttgcagtttggggaagatgggggtctgatgcttgcgagttggaaaaaaaaattgggttgggcccgacaggtccgatggggactgatgggggggtccgacagggccgatggggactcgattaggggagatccgatgcttgcaagctggggggtccaacgggtccgttgggggggtccgatgcatgtgcgggttgggaaaaaatggggttgagttatgagaggggtatttttggattttagataaaagtgtcatatattttttagttt

SEQ ID NO: 25858 - DNA, 2953 bp, Cannabis sativa
cattcctcccatatgtaccatgaagctaagcattctttttctaatcatggagtgaagtttgcttctgttgaagttgatttaccagctatgatgggtcagaaggataaagctgtttctaaccttactcgaggtatcgaaggcttattcaagaagaataaggttacctatgtaaaagggtatggtaagttcatctccccttcggaagtttctgtagacactattgatggtgggaataccattgtcaaaggaaagaacattattgtcgctactggttctgatgtaaaatctttacctggcattacaattgacgaggagagaattgtctcgtcaactggagctttggctttgaaagaaatccccaagaaactcattgtcattggagctggatacattggtctcgagatgggttctgtatggggccgacttggctccgagataactgttgttgagtttgcctcagagattgtcccctccatggatggagaaattcggaaacaatttcaacgttcccttgagaagcaagggatgaaatttaagcttaacacaaaggttgttggggttgacacttctagcggtggtgtgaagttgacacttgaaccggcagctgggggtgagcagaccactcttgatgccgatgttgttcttgtatctgccggtagaaccccattcatatctggactcggtctggacaagataggagttgaaaccgacaaaggagggagaattctagttaacgagcgatttgcaacaaacgtaagtggtgttttcgctattggtgatgtcattcccgggccaatgttagctcacaaggccgaggaggatggagttgcttgtgtagagttcattgctggtaaagttggtcatgtggactacgacaaggtccctggtgtcgtttacactcaccctgaggttgcatcagtgggaaaaaccgaggagcaagtgaaggcactcggtgttgaataccgtgttggaaaattcccattcctagctaacagcagggccaaagcaatcgatgatgctgaaggacttgtcaaggttttggccgataaggaaaccgataagattttgggagttcacataatggccccgaatgctggagaactcattcacgaagcagcaatagcattggcgtacgatgcatctagcgaagacattgctcgggtttgtcatgctcatccaactatgagtgaggcattgaaggaggctgccatggctacctatgacaaacccattcacatgtagatctttatagagaaatcagttgcttctttattcttgcgatttttcggaaatgagttgccaagactttccacaaccaaaccaagttttttttctccttccacatcaatttggggtcaagaaagatgaataaataactcttctatactgtttttcttctgagtgttaataacaacatagagagaagagtatatttacttattattcgttaataatttatacattgaaatcttcatcatacaaaaaggaacttatggagagagttttagagggatgagtttaagataaattaatatgggttttttttatgctaaattttcctatttaattaaaaaatattatatctcatttttatattttatgacataaaagcatgttagttggagttatattttttatatttacataattgtgatatagtataaaaagagttattttttgaattagatcaaaatataatgttttaatatttttataactgatatttgtagttaatttatcttaattactaaacaagtgttacagattaatatatattttttatattgaatacttcttttaactactcaagcatttgataatacacaacaaaattaaacccatcattaaattgatctaagatagagggacttatgatattacaaacttttcttttagtagtaacttcaattgtctatgtgtgaaaaagtagaaattttttaataccaccaagagtttacttaagaaataaaagctaacatgttgatatttttttacttcttaaggcgattagtaggaatagccataagatgtttagccctaggagtagttaaaccaaactcttcactcatatctagctcacaagccaacatgccactagggagttcccaatcaaagcaatgaacaagttgagccaacataagcctaaccacagtcaaaccgagttgcaatcccgggcaacctcttcttccagatccaaatggaatgagctcaaagtctctaccctttaaatctatgttgcttaccagaaacctttctgggaaaaacttttctggttcatcccaatactcgggatctctcccaattgtccaaatgtttatcattacacgcgagtttcgtggtatgtgatagccattgaccgtgcagtcttcattggctgcatggggagctaacaatggggctactggatgaagcctcattgtttcctttatcaccatgtctaagtagggcaagttttctagatccgattcttccaccattctttccatgcccaccgtggtttcgagctcttcttggagttttttcattgttgttggattcttgatgagttcagacattgcccattctatggctgttgaagatgtatccattgcacctacaagcatgtcctatacacatatcaccaaattgaagttaaattagaccaattttcatctttttaactacatgaaaaataaaataatatatattttgtactgatttatttatttatttacaaattgtttatgtatttacacattgaaaataagtttactttgaaattttatatacgttcaagatatatatttgatataagatacaatgaccactgtaaattgtgtgttttacaaaaattattgattgaacttctattttgttaaatgaaaaaaataaaacttgtattttctaaaatagtaaaaataaaatcatggactcaatttttcaacactttttttaatatataactaacttgaac

SEQ ID NO: 25859 - DNA, 1596 bp, Cannabis sativa
gcctatgcctagggccggccttggagctaacctagccaaataattgttaattccctccaagtaaagtaacatcaaagagcattatgtaatattctcaaatccttgtcttcatatattagagctattttcataaaaattaaactagttgctacttaaaataaaatctttcagaagcatttaattaaaatcaaaatgtgcagacagactgataaaatctatctataatactgttattttgagctattgattaacactaacaaacaagctatgtgcatatatatatatatatatatatatgaaaagactgaggcaatggaaggaacgatggttttgaaatatggcactttatataaatttagaagaatgtgatttgagaaagaccaaaaacacgtatgtatgatgagagtagtgaggtttgtgaatatttgtgatttgtgttcggatacaaatacctttttgaatgtgcactgaaattgattttcctgtggagtgttgctgcaatatcctccttccttgtaacatccgaaacaagcaggagttgcacgcaatccaaaactgaaatgaatattaacaggtggaggtggagatggaaatggaggtggaggtggaggtggaaatggaagcgtgaaattttgacatgtttgttggtattgaaaaggaaaactcatgtttggaggtccgcaatagaagtcgtggtcgtggcacttagtttgactaaaacctttgatagtactaagaccaggatcgtggctgcacctgtaaagggtgtgtgagttatcagctttaaaattataccatgaatcattatcagtggtgggaaaggagtattcattgatatattcacaaggttcttcttgggaagacagcgttgcttcctctttcaccacaatggaaattaaagagtctgggcctgactgaactgagtcaattctataccagtgcccaggcccttcttcttcttttttcaattggatcttaggtccatcttctgaacaactcactgagaacaccccacattttgaaagggttccctcttcttcagcggagcttggaagcagagaatgagtgagaatgaatataacaaacagaggaataatagcagccatgttcaacgtcccccaagaataatttggatttctaatgcataacacaacaggtatgttttacaatcctattttttggctgaggctgaggttgcttgctcctcataataaagagaagctcatcttgttgacctggttgttgacttggaaagtttggatgacagaatactttcatagaaagtacgtttagaaaaaataagcaaaaggggttggtcagcaaggaggaaccttccttcccatactcataacaatcccctgttgagcattcgattacaaacgatgaggacttgactcaccatggttctttattggaaatattacagtttttagaaagatttataaatatgtaaatacggaaaagataattaattacaaaaatataaattgtaaaaaaaaattataaattcgtaaatttttgttatcataaaaataaacttattgttttttttatatataatttttgcgaatttgtatttttgatatatatatatat

SEQ ID NO: 25860 - DNA, 4944 bp, Cannabis sativa
tttgaattaatatcggtattagaataaaatttgcataactacatttctaccttaccaaactctatatatggtcatctcccttttagatcatcaatttattattcattcacatttctaatattttttatttactaaattaatctttagtggtaatttgcctcttgtggatattataaagcctgtttactaccacgaccgcaatgtaataaattgagcgacatgatcagcatatcagttagtaataaaaaaaatacaagtctaggacgttatttcacttacctagcattcaggttgacgtcaggatgttaacttgggccctgaatgtcaattttggggctggaatgtcaacaaaggtgttaggtgctgaatagccttcagtaaaataaccatagtgctctcaatattgatccgattgatgcgattcaactttgttttaaatctctttcaaatatatttcaattcatgtctcacgcccatattgtaattctgaagatttcaagtcgaaaatttgtccccaagagaagtgtattttttttttttttgtagattactcggaaacgatccaacggacgagattcaagctcaaaaaattaatgattcagcatcaaatcatcatcaatggacaagattagtgcatctctctctacattctctctctagaaattagagctcttgatttagctaattttcttgtaattctcaatagaaataaaaacttgaagtagacgtagctccattactatcacgacatggggagtgaactactataaatttattgtgtctccatatttacttacgtaaacttatatttcatctcaccaatctagcgagcaagttttggccaaaaatttgcatcaacattttggtactttcattgagagctacaactcaagatcccaatcaagatggttccaataagatcaacaattgttcacagaagcaccacaactggacaacccattggggcatgccagttgctggagttggtgatgggatgacaaatgcatcccaatttccaagtggaggcctcagaaccagttccttagctcgtcttctaaggccatcaacaattgctggtacatatgccaataaccacattccacctggtgagccacacatggagtgagaagacctggaggaagttgatcctttggctatagaacttagccaattagtggttaacttacaacaacaactgcaaaagtctcttgacaagtaacatgaacaattctaaacatggttcatggaacactagaaaaagattgaaaatcaacgtgttgaacaagagcaaagaagaaaaaacattgctcggtgaatctaagaagcctatagatccgacaacggaacggctcctccaggagttgcttccactagagttggaaacaaaccttatttgccaataggccatgtgggaacaagcactcaaggggaaacccttaatgcgtgtggtacttctaccattcttggtattcgtactgcaaagcgtgcaacaagcactgaagatcctcaaagggatgtgaactacaagagagagtccaaaaggactcagactcgagatcccaaattgatgggccctccacctaatgtggagtaaaacctattagggaaacagtctacaaacaagtttccaaaaggattagacttgggaatgtggacctatagaggcaccaccgttgacaagatgaccacctgccaccaccacttgttataatttattatattctcttagccccaagagaagagatatttgtggcaactcagtaaacagtgtcgtactgtagcctcttcccttcatagaatcagggaagatagacatgaacaaattttgtcgctaccacaataattaaagtcatgatactaatgagtgtaatcagttataggataagatagaattcttaatttgaaaaaagcatgttgccctccaacagtatgtgacgccaaaagcgccaacaagatgcaatgctcctctccagcctatagaagcagtaggtaggcttgatgtggtagttggaggtccataccttgaaggtaattcaagaagagcactagagaggtattctagatttctatgacatgatccaagattagagatgttagagcttgaggagaggcctccaaaatctctatgcttcaagtgtgatctaattcattcggagaatctgacttggaccatgtccactaccctcacaatgacccctttgttgttgaggtgaaaatagccaatacgatggtggctagagtaatgattaacgatggagcattgtcaaatatccttttcaaataaaccttagatagaatgggtttatctttaaaagacatggagccatgcgaccaggtcatgtatggctttaatggggacaaaattttctttttgtggtaagatcaagctaccactaaccgttggcacaaaattttagttctattcagtcaactacattaatttaggctatattgattcacacgaagggtataaatgccttagtacaactgggaggttatatatccaagaatgtgatttttaatgagtgtgaatttcctttcaagataggtttcttacacactcatcgggaagaacagcaggtatatgttagtgtaccctcttaatcaacctcttttccaccctctcacttaaacttctcaaacactgctaccaatataattccttaatcatacagtggcaacttagctggtactgaaggtacaagacagtcccttgaagagagtccaccacaacaaactcaggtatttaatattgtacctaacttatcttatcatagtctatctggtattcctaacattgaaggtagtggtaagagaaatcagtcactttagctcctactcatctgatgatgactagagctaagctagggatatttaaaccaaaagcctttgtgggtcaagcagtctggtatgatgatagtgaggaacctatcacagtggaaaaagctcttaaaagtgcatcttggaatagagcattggataatgaaataattacattgattaagaacaagacatggactggtgcgaagacaacccaaaatgaacattgtggacaacagatgggtctaaaaagtgaagataaactcagatagtacaatgaaaagattaaaagtgcgactggttgctaaatgattcaatcaaaggccaggcattgattttagtgaaacctttagtctggtcatcaaaccctcaatggtttgaattgttctcactattgttgtctcaagatcatggaacattaggcaattggatattaacaatactttccttaatggaaagcttgaggaagctgtgaacatgagccaaccaaaaggttttattgatcaagccaaacttgattatgtgtgtaaattgaacaagtcgttatattgctaaaaacaagctcctcgggcatggtatgttcgactaaagtctattctcacaggctggaatttttcagaattcaaagtctgattcttcccttttcttctacaaagcacctaatttaattattatggtgcttatatatgtagacgatataatcataatagggaatgactcgagcaagttacaaacattcacgaccaatctaaacacaatgttttctttaaaagacttgagatctctaaattatttccttggaattgagatttactgagataaaacatggctcttctcagtcatgtaaagtatattaaggagttactcaccagaatagggatgctgcatctcaaaccttgctccactcctatgattgttggaaaatctttatcaaaatctgattgtgaattacttcaacaacctatagagtacacgagtatcataggaggcttagagtatttgattcatactcgaccagatctctcctttgcagtaaacaagttgagtcaatattttgaagctcctacaacaactcactagtctgcagcaaaaagaatactaaggtatttagaaggaacagtcaatcacagcctacatatcaaatattcatattagctagacatcgttggatcctcggatggagactgggcctgctgtccagatgatcgacaaagtgttgatggctattgtgtttgcttaggtgacacacttgtatcttgatcctccaaaaagcaagttgtagtgtcacattcaaaatttgaatctaagtatcgcgcacttgctcatgaggcagcacaaattccatagatacaagctttgctaaatgttttaaaattttcattgcataatgttccaatcaactagtgtgataatatgggagctagtgcccttgtttctaatcctatgtatcattctcgagctaagcacattgaattagatatgcattttttgagagataaagtcctaaagaaacaacttgaagtgagatatgtgccttctcaaaactggattgtaaattgcttagccaagagccttactcatcacaaattctatttcctaagtgataaacttggagtggttggaactcctcttagtttgagggggagtgttaagaaatgagctaaaatttatgttaatcacacctaattaatctcccttccttgttgttattgtaccgttggaggctgtggtcccttatataacaaattgtactattgccagaaagttgttagaatactcttcgtatatttttgtgcaaaattattttccctgtaaatgtattttccattttagaatttacaactgtgcctatataatgaattagccaccctcatcatattttgagttgaacatatactaaattcaaagtatttctaaaggaaccatatttagttcctgttaaaaagacatgcttaatgattattgcttaccctatcgcctattctataatatttaaattgtacatgtaattcaaagtaaatccaagttacaaaagactactactaaataaacataataaattctagccaaaaataaattaaatgtaatagtcgagtttcttttgtattctctctctctctctct

SEQ ID NO: 25861 - DNA, 2585 bp, Cannabis sativa
aagtgctgcgctatagcacccataccccgcgctatagtgcctaagaggaaaatcccgaactcatgcttatattatctttttttttcgtaattttttttcagcggggcgctatagcgtagaccccctgcgctatagtgcacaacaccaatttttttttattttgaccttgctcagtaaatcatgcataacttttgcatccgagctccaaatgagatgatttaacatgttttggaaagctgggaatgagctctatcattttgggtttcataagctctttgagaaagtgatgaaatcattgtcaaaaatgggctcaaagatctcagcccatcacaaaatattttttcagtacaaacctacctacacacttagagaaaacacatcaaatatgtaaaaaaaattaaaactaattcatctaattattgactaagaatgagtgtacaaatgtgcactcatcatggggctacatctaatttgagtttttatttctcatgagatggtaattacagcaatatacaaagtgtcagaagctccaaattctagagaaataaaatctagagagagaagctctgaccttgtgggtagttttctaaatgtgaaaaatgaggtaagggagctctccttttataggtgaaggaggctcacaaaaataggagaaaaatgaaaataagatgtttttgacaattgataatgatctagcggtgaaaattagctcttggtagtgatggccattttttggagcctggcaggtcccgctgcaggtaacctggagcttattttcgtaacttccttaggggtgaattttgacgacgataggttcaaaattatgtctggagtgtgatacgtgacttgatagatcactgaattagcttccaaactcaagctgaatcgcatcaatcagatcaaaattcagtgagttatggttactttactaaaggcagttcatgacccagtgcccaggttgacatcccagggcccaagttgacatctgacatcaacctcgacactaggtaagtgtaagaacatcaaagagatgtcctttaagattcctaagagatatttttacatcacttagtccacttatgtgttctggcaaagttggtcactagttttcagagatgttttgcagaaatgagacactcgaaactcttcatttcggggtgacctggaaatgagaaattcaaagttgtgaatttgatctctctgaattgatggatcaatgtcattgtgaaaaactagatggacagccgaaacgacgtcaaatccagataagcagaaccaagagcattaggccttttgtcaacttgggtagtgggtacttactcccaagctccgacaattttgttttgatacttccaaggcttctgaacttgagaacgaggtctcctagcctatttttgaccattcctaattcaatggtcacattggatttagaatttgagcaattaaagttagtgtcctaggttgattgtcaacctgggcgttgggccccgtttccaaggacccgagattatggttttctccccaagtttgcttgaatatttgttatttctaatgacgaaaaaaattccccaaacactttttctgaatttgatgaaaaacagcccaggtttacaatatgtcaacctgcgcgttgtatcccagtttcgcccatgttgacattttatcaaccttggccattttcaatggtgttttccaagacttattttgagcatcttctccaaaaatagaaaatattgagattcaactatttttgagcaccaaatttttttttttggaaggctagaactaggacccagtgcccaggttgacacctagggctgggcccagcgcctaggttgacgtattgtgagcttgggttgtttccaatcaagttcaccaaaaagtattctaggaatttttttttgtcctcagaaatagagaagattcaagcaaactcaatgataaaactgcaaacttgagcccctagaaacagggcctagcgcccaggttgagctagtgctgagcctagcacccaggttgcaatcaacctgggacgttgccttcagttgctcaaatgccaaatctgatttaaacaatgagtctaaaatagtcaaaatggggtagaatacctagtcctcaagttcagaagccttggaagtatcaaataggagatctcaggagctcgagagtaagtacctagcgcccaagttgacaaatagcctaatgcgttgggttctgcttatccgattctgatgccatttagactatccgtctagtttttctcaataacaaatatccataaagttatagaagtcaaattcataacttttcatttcttatttcactcagaaatgaagagtttcaagtatcccattttcgcataacaacaacatctccgagaactggtgagcagaaaattgtcatttatattatttattaattagactccttaaagtctcttaattaacaaataaaccctaaaattctatttcttcccaatcaagccatgtcttagtgaaaattcataaactagacaaagtctaactttagaattataattgattgattaaaatcaattaaccgagtcttacaagcagtttgtctca

SEQ ID NO: 25862 - DNA, 1732 bp, Cannabis sativa
aaagaaagcacaaatgaaaggactttcaagaacagcatgtattaaaaatgtgtgtccaaactagaatttaacaacaatggctttaatttgtctaggttaaacattaagatatcatgtgtatagaagttgccgatgcagaaaagtaagtattatagctcccgttttgatacgttttgtcaacaaaaacatggtacaaacatcttttaccaacttttctcatagtgatagacttgaagtacaacatcgataaaagaagatgcatttaagaaattccaaaatagctgttcttcagatagttatttgtgtaaatttataattagcagacacaattgaaccaaatcaacacgcaaaatttaacagacaatgcataaaatgaaagaccgaaaataagtttctgttggttagtttacaatataataatcttttgtaggatttgagctaatcgtacccgagaataatacagctatcagtaaagaagaaaaatggagcatcagtggtaaatatcattcccttcaaaaatggtattgctccaagaatcatggccagaatctgtggcaaattaaatgccacttagaaatcgaagataaattatttaagaagaaaacatacagcaataatttcaattacaacagagccaaacaagcttacagaagcaataataggcggttgtaggatttgtttgagcttcaatttctcgtaaagaaaaacaaagatcccttttatctgcaagaatcacaacttataatgaaaaccagagtccataagagtcaaacctcaagtaagaaaaatccaacatgaaagctaacttccattacacaatttgctagatctctcatggaacacttccgaagctaaacaactcatccaatcataaaaaccaaaataagagatagcgggactatgaaacaaccataatccaatgtgaagggaaaaaaaattgcttgcagtgcagtgtaaagtaattgagtaaataacttctgatgaaagaatcagctatcatcatggtaccgtagacatgtattggtgtgaggctatctttatccactatctaaatacaatgcgaaaatttatttttgtaccaagaaagccctggactccttagctagccaaagttcgaaaatagttcccgctttacactaaaatatttagtgagcagaacatagtagggtcttgaacattactcgtaagaacaaaccatttaatcaatttgttacccgtctcaagcatgaacattcaaatttttaaataaagggcttatatgctatattgtgataagcctccagttttatctcgctggcagttttatttagcttagagctgacttgtcttattctaataggatactagttttttttttaaaaaaaagagaaagaggcctttgtctaagactgacccctcccccgttatatatagatagcctcacttgtggcggaggaataccatgattacaagtgctatatcaaaaacatataaaacatttgaaacaaaaccaatccaacgagacataaacaattcaggtactattaagccacattacacaacaatctccaatctctattcaaatctaagaacgaaaactgctcgtaacttttagttttataaatccaaacagctgcccaaaatctgactttttcccataaatcttcaactgaggcttcaatcccttcaaaaattctgttatttctttcgagccaaataacccacataattgctagaacagctgtcctccata

SEQ ID NO: 25863 - DNA, 3113 bp, Cannabis sativa
ccaagagacttcaaattgaaaaaagccccaatgagatttcctctaaagtaagttaacatttttcttctgacacaaaaaatggttacagcagccaaacaaatttttcattgtataaaaatgaaatatacctggtcaaggggagacaattgcatgaagcgttcgtagtacaattcccaatttggctcaacatcaacattgatgggtgttaccaggtaaaccaaatgcaaatcagatgcgaggacaaatccttctctcgcccttgtaagatcatccaatacaatctaagaaacaaacaaaagccataagtatttacgaacaatttgaggcggttcaactaaaagtttcatcattaagaaattagcagtactgaaacgaacaaatgaaatgagaatacgatatgtagaaagatatctcgacagcatttgaaagacaaaaaaatttacaagtgattcttctggggaaagagaactgccaaaagaagcacgcccaaggggtgtggtactgtacaacttagtatcttcattccattcaagaaatttcatatggcacaaccatcgaagagattcctgcgctgatttcaccacatcctgaaatggttttgtagaattcagaagagtacaccttacatatcgatgaatatctttagcagtctgaacaattcccccagcaacaacttctaagattgcatgaatcattccattcatgtcttcagataaacaagaatgcaatggtggacagctttcatttagaagacctgagattcttttgatctcctctggtttgcaaataagaacctaatagaagaaaaagaaaacacaaagataaattaatactaataatacttacagcgccttctcggaaaaataagatataaaaggtcatctgagaagttaacatacactttcacccttagtatctattccagtacgaccagcccgacctgacatctgtttataccttgtcccatcaataaaatcacgaccaattttgggttgacgaaaaataaccctcctagccggtaaatttaccccagcagctaaagtagatgtagcagttaagacacgtatgaggcctttccgatagcaggtttcaacaacctctctttcctcaacctaataaagaataaaaaaaactagtatacagaggaagtagcaatacaaaataattaacagaaaaccaaatagagagaaaggaacaaagggacgaatctatcggtaccaaaagaaaaccagtaaagagaaaatgactaaaaagcaaaagaataccgtcagcccggcatggtggtaagcaatgccaaaaggcaaagtttcttctaatactgggtccaatccaacaggacaccttcttaaggcatcaatagcagaagtgatatcagcatattcagcatcactgttctgagagctaactttagaacttcggaggaattttgaaatatgtttggcagttgattcacagccttttcgactagagcaaaatattagcactgaatgaccctcttgaacaacctgatataccgaacaaagtcaatcttctaacaatatatgccttcaaaaacttcattataaaaataaagaaatagatgtttccgtacctcattgcacaattccacaacatgatctggatctttgccaccaagatcagcagctttggaaattgtcctaacaatatccatattcttattataaattgtgttaccgacctttatatattcttctaatggaactggacggaaatcagtttggtacaaagcagcctggacatgtttgtagaggcaatggccccagaaagaaaaaaaaaagttgagtggcacacaaagactagaacaataaacattgtaaaagaggtcattatacatggttctaatgaaagaaacatagaaaatttaacaagagaattctctttaaaagaacaaattgtcatacatcacaaaagtttgtaagactcaagtttaagttccaatgacaatatttaatgttagactaagctagagtcaaacaacaatatgtgattcaccaaaagttaaatataacaaacaattggagggtcatcaaacacattgtcaaaaagcccaaaaaatagttaataatgtggctttaacacagttttacagtcaaaatccttagagaattttcaataggaaatattgtttactttcctggttctttgtttgtataattttttgtattacatttttggacttccctttactccttgtattatattctttattgaccaatacatttttccattgatgttcctggttgaaaaacataaattttgacattgaaattgaaaataaatgacttaagtttagcataaatatcaccactcagcattctcaataacattgaaaacaaatgacttaatttcgcaaaccaagtatgtgtacatgaattacatttagctctatcacaaaacactaccaaagtaagctattgaaacattcacatagcaacaggagtcaatgcaattgcagatgtagaacacatgctaacaagaaaacattatacaacccaacgggtgatgcttaaaagtccagcttacctgaagccaatcagcaacagctcctacgtttggcatggttgcactcatccctactatctgcataccatgagcagggtcttgtttaccgctgcttgtacctgaactttcaccactgcttcctccagaattgccttcaccagcagcataacgaagttttgtcaacatgagttccaacagataacccctatttcgatcaccaacctgttaacactacaagcatgtaaacaatctaatgggatggcaaatgtagagggagaaatttaactataatagtatataccgaagtaaagtgaaactagaaataccatgtgcagttcatctatcacaataattccaatttcggatagacgaccttcctccagcaatctgtttaacaatgagtttgccttttctattgtgcacacagctacagaagtgtctttaggaagcgttccaccaccttggtttccataataactacgaacatgcttaccgagtggttcaagaagaacctcaaggtgttctgcctgcactaatcagggcaaagcttcatagataataataatctaggaacaaataaaaaacatatt

SEQ ID NO: 25864 - DNA, 1711 bp, Cannabis sativa
aacacgcacatgtgtttttatggggtatcctcaaggggtgaaaggatacaaattatatgatattaacaacaaacaattcctcatatcaaggaatgttgtctttcacgagaacatatatccctttcacaagcttaacaataatagccaacacattgatcctttttctcacattgttttgcctgctcctaaccttgatgatactggtgtaagagattttcatttagcagcagaagaagaaaaagacatcagtaattcatctcacaacaatgatactactgatcttccaatccagcaaccagaaattgatgatacacaagagtcaacttttccctcaacaatagaacaacacacagcagctgctgatcctctaattcagcaaccagaaaatgacaatacactaagacgaaccagtcgggtcatcagacaaccagcatatctccgtgattatgaatgtcactcaattattcaggataaaacttctacccctcattccttaaataaatttgtgtcttatgatcgattatctactgcttacaagtctttcattcttgctttaacagctcactttgaaccatcaaattacaatcaagcagctcagtaccgtgtttggaatcaagcaatgcagcgtgaattgtttgctcttctcaaaaacaagacttggacttacgttcgtttgcctccaaactaaagggccatcgggtgtcgttgggtatacaaaattaaatacaatagtgacggttctgtcgaacgatgcaaggcgcgtctcgttgctcaaggatacactcagcaagaaggtttggacttctttgataccttctctccagtggctaaaatggttacctttaaacttcttcttgcaatagccactatcaagcaatggcatactcttcaaattgatgtggataacgcctttctaaacggagatctcaatgaagaagtttacatggaacttcccaaaggtctcaagctgccagattcaatggaaccaaactcaaacttggtttgtaaactcaacaaatcaatttacggtttgaaacaatcctcgagacaatggtatcgcaagctctcggatgctttacttcaagaaggtttcactcaatctaaggcggactacacactatttactaggggccatgacgattccttcgttgctctactagtttatgtggacgacataatcttggcaggtcccaatgtgtctctcctacagcagattcaagaagatttacaccagaaattctccctcaaaacattgggaaatctcaaatacttccttggatttgagatagctagatccactgatgcattggttctcactcaaaggaaatatacattgaacctgcttgaagacaatggtttctctggtagcaaaccagcaaaaacccctatggaccccaaaatcaaacttgatgatcaaacgggtattcttcttgacgatccttccaaatatagacaactagttggaaagcttctatatcttactctctctagaccagatatcacctacgcagtaaacactctaagtcagttcatgacagccccaagaactccacacatgcaagcggttaatcatctcttaagatacttaaaaggacatcctggacagggtctgctatactcaacaaaatcttccttacatctaagaggcttctccgactccgactgggcagcgtgtcctatcacacgacggtccacaaccagtttttgtgtc

SEQ ID NO: 25865 - DNA, 3517 bp, Cannabis sativa
  modified_base (43)..(72): a, c, t, g, unknown or other
catgcaacataaaatgttattttctgatctttattaataagtnnnnnnnnnnnnnnnnnnnnnnnnnnnnnnagggcataaaacccaacataagggatattcatccaacatgcgtttgatacacattttgaccagatcatttttagccatggtctcaacacaatcaagagcttttttctttttgaacataattaacgagtctttctccaaagatttgtctttctcctagtaagtcagctatgctccatttatcttcaatcataaagaacttttcacaaaataaagagaccatgtcgtcccaactccttatactccctgacggcaaacttgcataccaagagtatgctcgatcagtgagagactttattcttggattcttaattcaaaatcatgcgcataaatacctaaatcatctatagattgaattatatggtctttggcattgccaaatttctcatcgtattttcgaaataccgaactcatgtaaccacgagggtaaggtttgactacaactttcacaaggaagggtggatgaaagtcaatgaaagttaaagatgatgatttacccctttcggctttaaggagactaatcaattcgtcttttgtgatgaactcagaggaagaccgagccttttcaccaatcctttcagtaatcttaaaagttctgattcctcaaacattatcatctgtcgcccgagttcattgttaaacagtatgtacttgtcttatcaaagatgcacgtccttcaagtaaaccgctcctttcaacagatgcttcttggtgtgtttgtgatagaagctagttgcatcatgttgtcttggaccttttggagcttttccaatcttgctaacacaacctcatatgtgttcatccgattagtattattgttgttgttgttgttgttattgttgttatcatttcgcaaggtctctgttcggatccgactatccgactctcgagtatcgcagacaaatatttggatttagatgagagagcagaattctttttattttcaagtgaacgaaatgagcattttgcttagtatatatatatatatatataagtatatttattgatatatatatatataagtacatatgaactatttaaagaaaatgatccccagcagagtcgccaaaatatttaggggttctagctaaacatttaattatataaataataaataaataaataagagcttatgatataatgcgtaataaataattataaaattaatataaattgtataaataaatgtaattatagcataatatgtatatatgattataagcgaaactatgtgtatatatttctaaatacgtatataagtataaatatatatatagattatgtaacacacaaatctaagtagttcggtagaatatcatttgccaacgtctacggtagtatttacgctatgattaggttttattaaaatggagatctacagagtttaagaacttattttatacaatggtctcagctgtgtgtaaataggtattttagcgaatagaagcgatactaacgcaaactttgcttctgtagagagaaacaagatgaaaaagaaaggataagataaaataaacaaagagcgtgcatataaacacacttatttgaagtttatctttctgaaggtaaaagattcaatagagtttgtatagaagcatgttgttatgctttgacgcttacaagcagcatgtatctagaggaagagaaatcaaggataatttctttcaagattgataagacaagcttgatgggactatagacgccttcttttcctctttccttctttctgtccgtctctagctaatagcttgggtgaatgtacatagagatggcttatcgtgcctcttcgaggtgaaccttatcttcgtaaaagaattaagttgcagctacttttacctttatgcattcacacctaagcccaagtatatattcatctcaagttttatgcggctactattcatgtttttttttttttcgttttatacacaattatttactaatttgcttttattattttattttattacacattttttttctttttactcatcaacaacatacatgaacatgacaaatagaattatataaacaaaatcttaccactactaaaatatctctcactaaatattaatctcttttagtttaaatataggctcgtattccttttaccagttaaggtatttatggtcaattattgtttaagctttttttgtgaaatataaattgtctaacaataaaaacaaaaacatgtgtgtggctcattaatttattcatcaagaagagaagatcaacctaagttgaacctctttattacatatttacattacataacataaaaggaagtggttctagtagcaaagcatatatatatatatatagtttcttttccattcgtaattccaaacatagagccatcatcatttcttttcttttggtaatctcatattttattcatgatcgatcagataggcatttggatgtgagcatcaaccgattggtcgagccaatatttcaagttatgtccaatgctcactcctaacatgtcacagtacctcttgtagtagccgatggcattagtagctgtattatctatattgattatgtttccaatcactccatagcttgggatattcactttaacttgggaattagcattgataagaatatcatgacaagaaggcttgttgtcatgctgagtcatccagaaccatatggctgttttgaacgatataattgggtctgttgctaccaaatcagggtggttgatcaaatctagcccaaggctttctccagcaagcccgtaattgtagttgctgcaatgcacgtcaagtagtaattaaataaaccagtttggattcaatcccttaacggttctcacaatatatattgaatataataatatatgatgtggtcctttgtctttattttactaaaataattatatattaaataaaaatgaatgtattatttagtactactacagatagctagtaacttaattaaaatattgctctaaaattaaataaaatatttaaaaaaaattataaattttgaatttttattttataattttaaaataataatattaagtgtagcaatataaacaagtgtagtccatattgacagttaactgtgaaaaatacataacagtttaattaaatatactaactactcagtcatttgaagggttttattttactactaaaatttaagctttagataattaggtacaaatgaactaataatttaaaataataaaagaaatgtctctttcatcttactcctctagtcttgcctttcttccgtatttttaattctatttattcattttgaaaagagaacttattttgtcttaaagagaatgatctattcagctgggtcaaaaaatgatatatttgccagaatagccataaaatttaattttaaaaaaatataataagtaatatttaattctcattgttagcagccttagatagtaataaaataattagtgagcctaatgattctg

SEQ ID NO: 25866 - DNA, 2600 bp, Cannabis sativa
tctattaaatcattaattatgaaactattaatatagcccaaaacatataaaggaatacgttgttgcatcctatccttgtcacaagtcatctaaaatttaatgaacaatttcttttttaacatgcaaaggttgtttaggtaaatttttgatctgtttcggtatttagaaggtttttagtaagtttattttataattttatacattataactattcagaattataaataaaatttaaaaatttaaaatagttcatagttatataaaaaaaaatattaaatgtgtaacaaaatattaaaattttgacacaataaattattttaaaattctcatgcatgtgtacccaaatacattttttagggaagtatagtataaatttttcccatattttaaacacttttttttacaaagaaatgtattattatcttaaatattcctcaaaaggtgaaaatagccatagattcttaatcctataatatgaaactgtgagtgcccactttatttaatttgtttgtatttaatcttactaacattatcttaatagtttttaattttttttttaacaaaggtgttttttttaacataaataaaaattatgttagaatatgatttgacataataattaaaataaggagtatatatataatacaatataggcacatgcaatattgacataaaaagaaacaagaaggagcacgcatgtcagtcagtattggcagagacgaaatttctacgttagtgcatatataactaattattgttaaagtattactattggctaccaacagttcgagtatcttttataagtgacgctttatgattagttagtcatatttttttaaaattattttcttaagttatataagacttgatacttaactataccaatagtagtatgatacaaaagagaatattaagcactagtggtcagtgacgaaccaagaattggcttaattattattaaaaaaataaattaagtttactttatttaatttatttatttttgtgaggtttttttaatttttttaatgcaagcccccactagtttattagtgtgtcggtcactgctagtggtatctgttagcaatttttctcttattaatactacggtaaatagctacataagtatttaaaattttaagtttgtaaatgacataaattcaatatttatttttatcggtatacatacccaatatttataaaattctaattttctttccgtttcgttattacaaactctgttttgaatttattaaaagaatatttggaagtagttgatactacatgattctgtctagacccaatgatatagagtttgagctttatatgtgccttgtttaagacaataagagagtttgtgttgacgaacttagaaaaaaattacagttttacaaacattgtgtatttatgctgctaaaaataaacattgagtacttatgtcgctatttacccttattattatttgaaatttatgtagtacacccaataaagaaattttctcgtagactttttatctgtttatctaagagcacttccaatagtttctataatttatcttttaaaatacatcaccaaaacactactatttttttttttttattttacatcatatttttacaacacaccatatattagcttctctatttttttttttctatatcttcttcatatcatttaaataatatatttttttaatatatataatacatattaataaaaatacgataaaaatagttgaaatattattaaaatatgtttaaaggatgaatagtgtttctgaacatgtagagaagcatttgaagaaaatagaaatgctttaaaatagagaaggagtttacatcatttgttggaaggtgtttttgtttcattgttctttaaatttttaaaaaatctttcttttaaatgagctattgggagtggtctaaaaaagtttttgtgtctaattttttctatgaacttgtaagctataactattttggactacttataaatttttaaaattttttgaatactttacaatgctgaaaataagattcaaacaattgctaaccacatgtataagaaaaaacagtcttgcgtgcaacagaatatttaaatatttttttcgacattgtaaactattttgaattttctcaaaatttataggtggctctaaataagtatatgatcatgaaaaaaattgaactaaaagctctcttaaatgccaaaacaaatagggggggtctaccgaaactcctttttaagagatgtattatagacataccctattatttatattaaaaaaaaaaagaaaattacttgtgaatggttttgttaagattaaagtcttactagtactcctattttttttaatgattgtgcacgtattagttatttaaggtcacctgtaaattttttaaagaattctaaattgtttataatactgaaaataaaattcatacatttatttactaatacgtgtatgaaaaaatagttgtacgtacaataaattttatttatttattttgttaggacatagaaagatgagacacctctttcatccaataaaatttattatttatcctaaagacatgtttagctaattcatgagtcgcaacagtaaa

SEQ ID NO: 25867 - DNA, 3251 bp, Cannabis sativa
aaatgagatgatacattttaattattaataaaaagtaaaaatagtataattgtaactatacttaaacatactttaaagagttacatatttcactcatttataaagagaatgtaaaagagagtacaatatagagtcgttagcattcctctactataattatcttgcatttttacacctttttttttatatataaatatttacatttacacaacttttcattgttcttttaactttagctccacctaaataaaatttctggtccgttgtatatatttaactaataatattcatggctaagaaaaatcggtggtacttggattatatattcacaacagaataggggtccatttttcactgtgcattaggtcgacccatatatggccatagatatgtcatgatccattggtatcactttagaccaagaacaaagaatttaagaatatatatataaatttatatatatataaatatatttcaggcagggccatcatgcaaaattgcacattgtctccatatctactctttttttttaaaaaaaaaaaaaaaaaaaaaacttcgtccttttctttattaatgatatccttcttggcagtccaatctgaaaaaattagtttctagatatttattagcagatcactttttttttttggtagggaataatcaaggagagtttgtataaatatatataatgcattacaatattgatttctgttgaatttaatttacattctttctgtgtgcgcatatatgtatattagtattactaacactcgttattatttttttaccctaataataataatctatatatactgattcacaaaataatataatataatataatgaaacattaaatatgtgtatatacaatacaaatagctttaatgaagatctgaacttagctagataaaagaagtgcaaacattaattagtaaggctttatattgatcacaataagatattgtggtttttttcatacaactactttaatacgtaagttaagagaaaatttaaagtaagaagaaaaagaagatcgatctgtactaaactcatgatgatattcatttatattctgagctctgaactatacattcgtaacttataatataatttatagttgcgagttgttgaagttatatatatatctatgtctatatatatatgtgtgtgtgcagatatgcacatgcatgaatgctgcttaatttttgttaattttagcatcaaattattaattgctgcaacatatttatttcttttatgttttatacagtaataattaaaaccccatctcttcaaatattcttttaggtattgtgatacatataatagtgtataataatatataattttaagcagtaaatgcgaaatatatttactaattaagctccaatattgaccatatatataaatataggaaatttttgtttggtacacccttgtggtgctggtagattttttatctatttcaatatttagaattttttttaatctaattattatttgtatgattattaattatgttgtagctattgttgaaatttaaatttaaacaattactttactaagtgtatataagaaaaaattgtcacgtatatatatgtgtagcacattatataattttttttgacattataaattacttaatttttttttaaaatttacaagttatcataactataacgtatacgctaaaaaaaaaataattaaaaaaagttcttctatataccgaaacacagataagagatctaccaaaatagttatttaagaagtgtactgtagacttatccataaataaatgagagaaatgataaaaggccttttagtttaatatcattattggtctaactaagtattaaatcccatataatttaatattataaattttaaaaaaaatcgctaactaatcacaagacgaaaatgtgttaaatacctaatagtaatactctaaagatagaggaaattgcaccccatacccacttttcattatctccttttgtttttacctttccttatatattatttaatttatacccactattataagtaaaatcccaattttacccttagttgtttatttgattatatatattaagagagatagaatgcatttgaacaaatacttagaagacatttcattttagatatacttttatatataaaattcacagtgaaataaaagagaccccaattacatgaaaaagtaatgattcattcaaagaaaactcatacaaatacgaaaataatgttcacaaacacacacaaaagttatatatatggacgtagtcagtacaaagaataagaaaataaaattaaagagagaaaccagaccaaaaactggaactaataaaaaaataagaaatattgaaagttcattgaaagttctcattgttgagattgcaattgttgaggactagtgttgatggtagtgatataggaggtggaggtggacggacgctgactgtggtggaggtggcggagatggaggtagaagcggacgaatgctagcaatggcggaggagtcaaggaaatgatagtgatggtgaactctcggtgggggagaaactgaagatttaataagagattaaatattgagggtattttaggtacattacacttaaaagaaggtatgtttcaattgaatttaatatggagttatttttgattagttattaaaaaaaagaggtaatcctcaatttctcccctaaagatatagctagatgacacataataatgatgatgagtgaccacaccaattttaatttgtctgctcaaatatagtaattaagaccaacacagggctctaggacaattgtaacgcgtcatttatattttatatattaatttaaaccctaatgctaagtaaattttaaaccacattaattttcagcctatcctcagcagtaattttaaatacatttatgtcaccttaatatatgcatttctacggataaaaaatgtgcgtgcatgatattattcatatgagcattgctatatataaggcaccagtggtgcttagcactttctcaacatgtcacgttgtgattggttagcgatactctctaaaaattattatattaaattatatgggacctgatacttagttggaccaatagcggtatttatacataagagagtactaagcactagtgatgtcctttaacatttctctattcatatatatatatctttatatattaaaagtgcttatctaacgacatttcttgtttaacatttcttggtttaacagaata

SEQ ID NO: 25868 - DNA, 3963 bp, Cannabis sativa
gagtgactatcttagcttgttctcgttaatcttctcaattattggttaactaatcttgaaagttagcagtgctaatttttgggattaataggccccgagccatatgcgttgactcagtcattcctcagttgactcttaaagtcgatgtctctcgcttctcgagactaattattgactaatctcgataatcaaccctctcgatttctagggtgaacacttgcccccaatctataagaactcttttaagtgttcttgtaaactaagttcaataagccctttccctttcgcttggttctatggttgtctctttaggtgcttgcgccttgagatcttttgcatgagggaatcttttgccacttgggctttctcaacctcttataaggtgtaacctcattattaagggagtatagaccctttgtgtagtctcaacctcttgctggttacttattggatgttaagggagttgtatagcctctttggccgcactcaacctttttcaagtttctaattgaaggctaagggagttttttagcctcttggattgcgctctaccctttctcaagttttgtgatgctatggagggagcttgtagcgcttaagcaactctcgacctcttgtattgcatttgtggcacttaaagtgcgttttgaatgtgagaaaataggtattccttttagagaggcatccctctcataattataccattttcccttctttttctcctcttttctcagcctaacaaaaatgtagcgattcttacgatattgaacacttaagtttcagtctcaaatattattctttctcttagaaatggggaagactgaacatccactttaaagtgttcttatgaacacaataacataaatccaagatatcatttttctttcatcttgctttacaataaagggggtgtaaagatccttgtgggggcctttcccttgtttacaatgaactaaaagataaacatgacaattagggtcacccaaggggtttccaccttgattcacaacaaattgaaatgtgagacaaagaagatatcttggtggcttcttttttacgacaatacctcattccttttaattttcctccagtattcttcttgtcgctcgtcctcatacctttggtcctctctgcagtacccgcccaagtaccctcgttgtattaactcctcaatttaaatcttgagatctttgcattcctctgtaaaatgtccaatgtccttgtgaaacttgcaatatttgttcggatcccttttggacttatctttcttcatggggatggcttcttgaaaggtatgtggttctcattaatcaagaaaatgtgttctcttgagctattcaactctgtaaagcctgtgtattcgcagggttattattccatctctttcttgacttttttgcactgatcgtccccctaatgatcgaactctcttttccttagtgtctcatcagtgggggctatcttgggctggctatttcttcccacatctaggttctcatgtccatccttcacttggatgtacctattgactctttcgcagaagtcctccaaattgcctaattctctcttgagcatgttgttccataacttgcttcttggcttgactccagcggctatggccatcttgtgttcatctttggacagtctcctaaccttggccgctttagcggtgaagcgttgaatgtagcttttcaggctttatgtctctccctatttgatgttggccaagcttgtccttaggacgatatagtctcacgaggcatggtgttaggccaagaattcatcagtgaattgtttccacaaggcaattgatccagtagccaacctattatatcacttatatgctacacttctgagcatcacgataaagaattgacaccttgccttgctcgccaccctcttcattttcatgatcttaatgaaggtatctaagtgatattttggatcggtaattctctcatagggtggtatgtttagttcctttaaaatttggaggtagtagctcaggttagatttccctcgagaaaggtgattcatcatcaaagtcatctttttcccaattgcattcttcgaatacagcagacgctatccttcgtcaaaggtcttccatcaatctatcaagttcttgtctcttcttgttcaacttttcttggaggtctagcattgtattcctcgatgcctccctaaggcatggatcaaccggtggcagcgcttatttttcagtagcggcccttcgattgaggttcccccttagatcattgtggattttttttgactcggtttttcttggtcatgacgacggctctgggtctttgcgagattgagctttcagcggagaggacctggatgtgttacttatggaatactttgacatttgctcacctcctagctcatttcgtttcttctttcaaactactggttctcttcgcttgactaagggagcttcgaagcgcccttttaagagttcatcaagtactttttgcatgttagcagtagtttcttccagttgtaagttttttattcttagctcattcatcttcttgttgtgaacccgagttcttgagctcaaactcactgagtaaattcgcttctccttcccaagacgatggtgagaggttccaaggtctttcgatgccgacggtgaggggtgccttaatagtgatggtatcatttgccatgactaacctttctccttaggtgggtgtcttattggcaacgataccattcgccttgactcaccttcaccttcgggtgtgatggatgtatatctccatgtcgatgtatgtttttttagggttcctcaggaggataattcccctctctcgcttgagttctccaactattgagaccctttcctccgacgaaaagtgctgaaggatctcgccttgaggcaatgagctgagttttttctaaacctatctccacctcttagagatcgggagtgtctaggcattttgtgatgattgtgcgtaaagaaacaacttggtttaagctttttgtttcgacagacggtgccaaactgttgacggtgagaattttccaactagcttgttggctggaaaattaaactctactttgaactcgataccaagatgaagaaaaaaaatgaaatataaattcaagtgtctatctcaaagtagagaaaaaatgaaaactttctattactctcaatatggtggttaaaagaataattttccaatctcctctctcatctgagaaaggggtatttataggctctaatggcctaagatacatggtggtcccaaggagatatgttgttgctttcaggctgcaaatctcaagttcaagaggtggtcttgtacctcgtacctttgtctggtgtcaagtggtcccgggttgcaagtggttggagagtcctagtggttggggcgttaagatatgtaggagtgattctcctactactcgtacctctatgctttcagggcttactgaaagcatggacgtctgcagctcgcgtgcacaccttgtccttgtgatcgtacctatgtcgcttcattctccccgtacttggggaagctttactaagttaagccacattgtcgtggatgtcctacattgagtgagaagtgcatgcataccgagtaacttgaggatgcatgcatgtcgagtgacttgaggatacatgcatgtcgagtgacctcaaagatgcacgctaggcgagtgacttgaggatgcatgcatgcctaccgagtgacctcaaagatgcatgctagctaaatgacctcaaggatgcatgctagtcgagtgacttgaggatgcatgcatgccgagtgacttgagaatgcatgcatgccgagtgacatgaggatgcatgcatattgagtgatcttaaggatgcatgctagtcgagtgacatttgtgtgaagcatggtcaagtgactttgagcatgcatggctgagtgacaatgagcattcatgccgagtgactcttgagcatgcatg

SEQ ID NO: 25869 - DNA, 932 bp, Cannabis sativa
tatatacaccttaccgacattgcacattattgatatatgaactttagatgaaatcatatgatcttttaacaatgaaacaatgcttcttatttttgttttaagtacagctaccactatttcagtccactaccatgacaaaacaagtggacccaaatgtgctttaaatgtgtgtatatatatacataaaattattactatcaattatatatatacatatgcatattcctttttttttctaaaggtgcataagaccctaaacaacatgatttggacatttggttagaaaaacatagtgatgagacgaacgatatatcgaaaccacgtagaaaagcatgaagctgactttattagattgacaccccatatatatatttcgaccacacaaatagttacacttatttcatttttccactacaacgaaggttctcgatcggagcttaatataagtccataacattttcgttatttattttagattaattatcaaaacattttcttaatttattaataagttattttttagtttgtcaattattattattatgaggcatcaatattgctctccttgaaaataattagcgatatctataaaaattattataattaattatgtgagacccaatatatttaattgtagcaatggggataaatcatattcgatggtgttatacacgtatgttaccttttaatatatttctcaattctttttatatacacaaacacatctttattctctccctccaccttttaactatatatatgtatatgtttaatgtttgtataaattatgcttatttaaatatggctatttagataaccaccattttttccagtgttttgcttaagccaagattttctcctttgttttttttttttttttagcaacaatcaaattcttttttattgaggatgtttaatggctacaaaagtat

SEQ ID NO: 25870 - DNA, 3023 bp, Cannabis sativa
cttgctaagaaggagatagttgaacggctacgtgtggcgattgggtttgaaggtgcacttgcgattgactgtcaagggaagagtgggggtgttgcttttttgtggaaggagggggaggatgttcaagtgttggagtatggggtgtcttatattgatgtagtggtttgtggaagtgagcaaggtcattggcggttgacgggattatatggtgagccgaatagaactctacgaaaaagaacttgggatcttataatggagctgaaaaataagtcaagtttgccttggtgtattataggtgatcttaataatgttcttcctaagaggacaagaaaggtggtaatccttatccgaggtggttagtggatggtttcaatgatactttggtggattgtggtttacatgatcttgagttgtatggctacccgtacacttgggagcatagtcgaggcacggcggattgggtggaggttcgtattgatcgtgcgttggtgaatcaatcttggttagacttctttcctttggccaaactttttaatttagaggtgtctacttcagatcattctcctttgaatttggttttggttaatgaagtggtggttgctaagagtcatgttttttggtttgaaaactcttggttgaaagagcctttattttttgaaattgtcaagagttgttggaatagtgctgaactgaatggtataatggataaaataaagagttgtggtgatgtgctttggcattggggaaaggactactctgggaactttcctaaaagaataaaagagtgtaagttggaagttcaaagatggaagaggggtcgtgatggggtgtccattgagaactataaaaatgcttctgctaatttgaatagagtgttgctacagcgtgagattttttggaagcagagaagcaagcaactttggttgcgtgaaggggatagtaattctaaatattttcatgcttcggctactgctaggagacgccgaaattcgatccaaaagctaaaagattctgctggtgtttgggttgattggaaaggcaggcttccttcggtcatggtggagtatttttcagctttgtttacagcttcagtcgtgtctgatcaagaggttattcagtgtgttcctacggctgtaaccagtgaatacaacaatagattattggagcctgtttcagatgatgaggtttgtcatgctcttttccaaatgcatccagacaaattgtcgggtcctgatgggatgacatcgagtttttatcaaaaatgttggagcactgtagagttaaatcataccaacattgtgcttattcctaagaaaaaacatatggagtctatgactgatctgcgccctatatctctatgtaatgtgctttataagataatttcaaaagtgttggcaaatcggtttaaagaggttttgcctgtgatgatctcaaatcatcaaagcgcttttctaccgggccaattaatttcggataacattatggtagcttgagattatgcattatctgaagcggaagcgagtagggaaggaggggtttatggcgattaaacttgacatgagtaaagcatacgaccgagttgagtggatttttatcgagaacatgttgattcgtatgggttttgaccaacattgggttcacttgattatgttttgtgtgactacggtttcgtataatgtaactcatggaggtcatttaacggggcctattaatcctagcagagggttgcgtcaaggagatccaccgcatccttatttgtttttaatttgtgcggagggtctctcattattgttaaagcattatgagaggcatcattggttgactggttgtcgagttgcacggggcactcctatggtgtctcatatgctctttgcggatgacagctatgtgttctgtaaggccaatgagaatgaagctcagagtgtgttacggcttttgcatagttatgagcttgcttcgggtcagcaggtaacttttgctaagtcctctattttctttagcaagaatattacttcgggtattcgtgatcgtgtgtgtggacttatgcgattgaatgcggcttcggatgatagcttctactggggtcttccgtgcataatgggaagaaacaaaaatgccattcttggctttttgaaggaaaaaatgaagtagaaaatttttagttgggagactaagtttttgtctaaagctggaaaagaagtgttgattaagtcagtggctcaagctttacctaattatgcaatgagtgtttttcttttgactcaagaaatctgttcgagccttgaagggatgatggcgaagttttggtggaaatcccaatcaaattcttctagtaagggagtgagttgggttagttggaagaagctttgtcaacataaaagttttggtggtcttggctttcgtgaccttcgtgattataatctttcttttttggggaaataaggttggcgattgcttactatggaagacacacttgtggcgaaaatttataaggcaagatattacccgcatggttcgtttcttaatgccgagttaggacaaaatccaagttttatttggaggagtatttgggctgctcaagatcttgtaaaaaatggtgctagaagatccattgctagcggctcttcggttagtattttacatgatccttggctaccaaatgactctaatccgtttgttttgtccaataatcctggacttgttgatcaaaatgtttcgagtttgatgacagttggggagaggtcttgggatgttgatcttctcaatgatatgtttgaagatagagatatacaattgattagaagcatacaacttagtcatactcgagctttggatgattggtattggaatatggagtcttcaggattttattcggttaaaagtgcctacaagttcattcaatcatcaagaggaaactggttgtttatgcaagatgagaattgttggaagaaactatggcagctgcccattcctcccaaagtccatcattttctttggaaagcttgctctggttgcctcccaac

SEQ ID NO: 25871 - DNA, 1698 bp, Cannabis sativa
ctctctctctctctctcatcacttcctcataccctccttctatgaccacttgttccccacttggaagcaataacacagccaaatttttaagtgttgctctctctcaacacttagccaaatttcttagtgtttctacctctctcaacacttagctaaattttcaagtgttgctagctaaattttgcgttgctccctctcctaatacttagtcaaattttcaagtgtttctccctctcctaacaattagccaaatttctacgtgctgcttactctcccaacacctagccaaattttcaaatgttgctccatcgttataagtataggctatgatgagaaagataccaaagagatgcgctattgaggagagatgtacgatcgtggatgagtctgctaaagctaacacgtctctgacaaagcttgatgagaggaggtggttgtacaacgggtatgatgagtataggtagtggagacaccatttgtgtcactctaggtacaagctaacatcctatcaacactcctccactatccatttgacacgctgaccttcatggtacaaacataactttgtgccctgacttttgtgactatttgtattttaaagccattggagctcaagtataaaagtttcatttaaatacttgtaaagagattgaaaaatcaccatttgtaagagagctctaatattcaacacaacaatattttactccattgatggctaaaactcgtaatttttcgtaagcttttcatcttcagttctttacatttgattttctaactaaaatttaatcaatgaataattaacaaaaatttgcatttgaaatttgtgctactttcattgcaaataatgatgcaatattagctttggtaacatccttcttttccttaatcttcttgagcatcttaaggaatttgttcccataattcacaacatattaggtcacaagctcttgtattggctcataagcccaatactatagtgtaagaacatacataatcatacaagttgtacatagattcttcttgttcatcgtttttattgcatttgtcattatacaactcttttttggtgacacaattcttgaaagacaacttcgcccatagatgcttaaagaaaaagtcagtatctttaaccatcttcagcatgtctggccatatgaacacgttaaaccaaaaaacacaagcataaacatcctttgctatggtgcagttgctagaagtggtcattagttgactaagtagtattttaggttaaccaatgaaatactcattaatcaactggtcactagtcacatgattctataactcaacctcccttggcctaaccctaaaattcaagcctgttagtaatacaaaactcttcaatttatcgaatctataacaattcttgccaatgtaaaattggaccttgtattgggtcacttgtatgtatatatattgtgtttgatttgatttttttttcctttcattgtataacattttttaatatatatatatttatataatttttgcatggtcacttattaagatagagaggactattttggtgtattgtattgtattattagtattatttaatacaatattatgtttggtattgacttggtattaatagattgtgtaaagtttatatttttaataaattcgacctcaacactgcctacgggttcaggtctcgggtcggagtccgggtctcgtgtc

SEQ ID NO: 25872 - DNA, 3097 bp, Cannabis sativa
  modified_base (982)..(996): a, c, t, g, unknown or other
attataaagcacctaacataaaactaagtatacgtgccttgcacgtaactttcttctagtatatatatgggtgtactagttatgacgttccaccacataatatcacaaatatgcatattacataataatgaaaataaatgagaataataatgaaaattattaaagtaggtaatgcatatattaatatacgtacgtaaaagaaaccatagttgtggcaggcagtagaaagataatctagggctttggcttgtatatttggatcgctggagaagagaacagagtagtcaatggtcggaatttcatcagcattaatattattattagtagtataacaaatactgttgggtgtaaaacattgggaagaaagagaatcatcaattggtacagaagtacccatttttagaatttagagagatctgagagagagagagagagctaaggtaaggtatactttttgcatgcatggatgggatatagcctctttttcccgttaatttatagaggccagctagtggcccggaaccccttaattaatattatttcactaattcatacgtacgtataatgaataataatataaagtcgtaaatttttatattataaaatggctacgtgtatttaaagaagacagaaaagaggtaggtgttgtgggacctacgtgacacattttaattaatgtattaagtaatctcagtttttttaactaaaatataaagaggcaatagtgtgcctattttaaaatgggtcaattgcgcgtggttaatatatagtttcactttacttatattatatttcaaaattcaaattttaagagtaaaattcttaaatttgtgttccgttaataatttaacatttttgtttattttaagtgttaaatataccatattgaactgtctacataaacacagtgtatatattgtacaattttattaattcacgtaaaaaattatttaaaaaaattaaaaattaaaataaaattaannnnnnnnnnnnnnnattataaataaaaaaataattttcctttattttttctttcttttccttttctttctctttctttttctttcttatcctttttctttctcgtcatctcctctctctctcgatctcctctctgcggctctcttagtcctgatctagtgttttcaaaacccttgggcaaccaccacatgccactttggcagttttccgaccaccccaaggctctcgtgatctcctctctctcttaatctcgatctcctctctctttccctcttagtcccgattcagggttttcaaaacccttgggcagccacaacaggccacctcacaagctctcgtgatctcctctctttctttcagtcccagtctagagttttcaaaaaattgggcagccaccataggccacctcgacagttttttgacaacccccaagccacctcgaggttctctccccctcagtgctctcgtaactcatcttctctcctcatttctcttatcatatattgcagtaaaatattgtttcattagatctaggtcgagagggaggcgatttacagattttcaccatcctattttggtttaagaaactgctttttaatgttttgtgattttgcattttgttttctgtttcaggtgagctttgattggatttctgtagtggtggttttggtgaggtgctggtggttttggttaggtgatagtggtttcttggggagagagaagagagagagttgtaaatggaaaaaaaattgaaaagaaaaagaaagaaagaaaaaaaggaaattatttttaattacaatttttttaattttaataaattaattttattttgattttttaattttttttaaataattttttacgtggaccaataaaattatatcatgtgtacattgtgtccacctaaatgcacacgtggacattttaatatggcacttaacacctaaaatgaatgaaaatattaaattactaacagaacacgagtattaggggttttactgtcaaaatttgagttttgaaagttaagtacaaacaaagtaaaattattggagattttaccgtaattaacccttttaaaatcattttattaactctttcttctttcttttgccacttaatacaatatgatccacattttctttttatcaactatatatgagtggtatttggtaccattagatgttccttagtattttttgttattgttgggtaccatatagtgcttaatgctatatgtagagggttacaattaattaatagttttttatattatttattaaatcattggatattaatttttaatatatatatatatatatatatcattttttgtggtatttgaaaccataagatatacatttaattaagtagggacaacgtacccatttgattttgtattttcttaaaaaaaaaagaaagaaagaaagaaagaaagaaagaagttatatgtgttcttataattgtgtattttttatttaagctttgtattatactcttactttaatatgtattttcacatttagatttttctgtatattttgaccgaataatatattcttaagttacagtaatatgccgacttttcaggttagccattgggtggtagattaatactaaaagttatttaataatgtacttcattagattttattatcaattgaccgtaacaaagttacactaaaaaaatatttaaaatccttttaaaaaaaaatgtttaaaatattaccattccaaaatgtaggttgttaaatcgtttctccgtcatttcatcatagtactatatatatcttaaactaagttaatcaataaaaaaatggagtgcaactgtctaatattatttatatatacagagaagaatctaaacacatggagatctaatcaaatgtcttttttttttttttttttctgcgcaataattttttcaaatatatatgattatggaataagcagagaaattgatgggtatttcagctcatatataatagagggtggttaagtttggcatgcacattgatagcaggtgtcgattatgcaatgttcattcagaggatacgcaccacttatttttcacttgctcctttgctggaaaatgtttacaggcagccaaaaactggct

SEQ ID NO: 25873 - DNA, 1974 bp, Cannabis sativa
catagaagaatggcaaacctataattaccatatttttgtaacttttttacaaaatcccatatttcatgtaattttcactattttaaatgtcttacaatttctaccatttgaatttaataaaaattttgaaaatatcatcagaaataggttttagtaacatttaaaaaaaaataaaaaattattaaacatatatttttgtcacatttaaaatcgtcactataatttataatatacagtttatttttcctggtacagaaactatttttaatttgaaccaaaaaagaatgacattactttaaaacatatctaagattataactaaaataattctacaattaggacacttattaattttagtggctaataaaattatgtattgtacaattataactaaacatctcatgatgtatgtttacagtctttttaaatagtatagtatattgtattgtagtgtttaaaaatggtgattaaattgttgaagaagaaaaaggataacatttcacaacttaaataacagtgaatcatatctcctaagttaattagtgactttgttaatattgtcaaaaattattcatgttatgatatcccacattgatagttttgttaattcatggacaaaagtgtattataaatgtagagtttattaacaattaaactattctaaaaaattgttataataacatttatatattatatattatatatttttgtgaatttaattaataattttagttagggtaaacattcctgcttatattacttggttataaggtctattttgtcatttaacaaaatttttttattctgaaaattttatttaacatttttttaataactaatgacttttaccttttttatttaattaatattattattttatttatggcattaaataaaaaataacactatttgtataaaataatttattgtattaatattattataaattttaatatgatacaatctgtattaatacataaaacatgatctacggatatattataatatttaaaaataatctgagactgagatcgagtctaaatttggggtctggatcaaagtttagcttcgagatccaaagctagataaacataccaaacacagtaatttatttgcacaatttaataagcagcaaacataatattatattaactaatactataaaatacaataaaataaaatataattcaacacaattaaaaatacttaatttcataccccttgatattatacttcttaactagttagtgattttttatattataaagattgttaaattaatttggccctgcatattataagctttggtctctttgtgccacatatagtattcttgtatgccttatttgttaaagaaaaaaaaaactataagagaagcttaagaattcgaaactctttaatttcgatgaatacatttccatagtcgaggtgctattttgtacacgacaaaaggctaaataaattaagcaggaactgaactatatatataactagtttgcagcctcatataacattaactacaatggtaaaaatgggctactactgacactttccaaacccgaaacgcttatctgaggcttaacgctttacattgtcagatcgggatcatcttcgtagtcataatcttgttcacttggcctgaccctctttgcatctctaggcgtaggtctaccctttttcggttttcccctatgacaccaaatgcaattatcagaaaacacttattgaggagttttgagcacaaatatagagctttccaaacactgatagtacttactgtccattggcgtatattcctccacccttagaccggcctggaccaaagtctgatctcccatctaagataaacatacagggaggaaacataaatatatagctttggaaaaccttttgtggtattcatattagtaggctcaccgtctcgtgcagctgctatttcttcggcctaacaaaaaggggaaaaaatatgtaaaa

SEQ ID NO: 25874 - DNA, 2809 bp, Cannabis sativa
aacaattccaccattttattattatttagttattttctgatcaacacgtgtcagatgtaaggtcgaagaagcccaagccaccttttacctttactttggatatttgatttgattctttaattgaaagactattattgtgtagtttgttgtataatgttgttgctttactgcttctctctcccctccctcctctaatcatccacacataatatatatatttatatatattctctttctacttcgcgtgatcatatttcatacctaggagctttacaagcaaagctaaactgggttttagccataatctatgacttcacaagcttttggcttctgggctttcatctttcattacgtgtaagttttaagctttaattttctgagttatcatcaaagcttcattatcaaagagaaaatatacaaaagggatttttctttcttcttcctgtgttcttgctgataatttttttttatattttatttttctgattaaattatactttgggtactgaattgcatttgtaaattaactttttatatataatttgatattgatgtaatgttttgtgtgttaagtggcttgttattcctgaacttcgtgtggttcttattgctcttatctttgtactattgtccataaatagctctatctgccaaatagacaggagagtactaaatagtactttttctgttagtggaaatatgaagtttccagggatgaatagtataatgatttagggttttcatacagggaatcaaggttcaagtggttgttaatggaatgatgtgattttgaggctgggaatttttagggaggaaaacccattttctttgcttctgtttatactaaggttgacaattgttttctttcagcagtatctgttagatgctattgatacaattttcttttctgtattacagttgttctaccttttgacatggtgcctgacttgtatcagttgttatgctaaactggtcattacatttattctctgctgcactaaaaccatttttaaagattttagaattctttcggctgaagcttctattgatctttttgaaatttctttcagatgaaaagtatccactcagagaagaaactaattatcagtatagaatagcagaattttggaaagttcaacaatggatgtacaaggaataacttgggttgggaatgtatatgagaaatttgaagctatgtgcttagaggtggaagaaattatgtaccaggtatgcttttcatggtctttgcaggctaatctatatcatgactgtccctccttttccccttttgttgacctgttctcatgtgattgtttatttgttattggaagatagtttatgagagcccttatctcatctattatgaatatatttaagttttaatgtcatatttggtacgcaattatgaactagggacccttatactttcattaacattaacattgttgcggtccatgctttattttttggacaggatacagtcaaatatgttgagaatcaggtgcagactgttggggctagtatgaaaaggttttattcagatgtattgcaagatttgcttccaccatcttccttagattctgagaaaatatcaccatgtggttttattattgaacaagattctggtgaacgaaatggtagaaaaccaaatgtaatgaagaaaaaagagcatgctaaggctgatgatgagcagttaactaagacatcaaagataactcctgatattggcgaagatgttggccttgcaccatcttttcatgtacgtgatgatgtagatgattcatgtagaccttctgaggattgtgtaaaaggcgtatattctgagttgggttcaagacgacatcttgatgagcgcaatacttcaaacatgggtgttagtctaagtcaagaaaagttaactgatgtatcatatacaagcagaccagaaaaatatttgagcggagtatcatgctgtgaatttataaaagaaattcatgaagcttcaagggatcaaaggggtacaatgacaatcccattcatggaggatggtatgaagcttgactctgtggtagaaagtagtgataaaattgaaaatgaaaaggaatgtatatctgaggactgtcaatcatcaattgagatcatctcgctgaactcagttggaaacagtggagaggagatgctaattcaactcaatagtggcttatcagcagaatcaaatggtaactattccctgggtgtatataactttattgtttttgtctctttgcttgctctgttttgatttccagattggcaagtgcagatcattaaaatgtactgatgaggatgcctttgcatctcatccatgtactaccttgctcacccctacaaatgttatacacaatgcattttcttttcttctcaataatgtcatattgtatgttctccatgtctgatgtcaatctttaagagcttataaaatttgtagtatttttcatttacgaaatcttcaaagtacaaaattatttccatattatgtcttctttagctttctttaaactattttgggtatggttgcatggtactttccatatctttcctttctttcattgtaattttaactgatcgctgttaaattcttcagggatattatttgactggaatcttgatgcaagtaaaactgagactgctactgaaaacggagcagagactgttcaacaaagtgataagatgaaacttgaggaaacttgtgtgctggttaatgaaaatgaactaagttttcctcctcaaccagaacataaatggaggccttacaaggttcttatcattttgctcacacagacaagcatac

SEQ ID NO: 25875 - DNA, 1410 bp, Cannabis sativa
gaatacataaaagtatattatatacaaaatttagaccatgagtttggttggccttaggcacgagcctagactgtcttagctcaaggctggcctgtcgccaacactcaaaagttactattgttgtatgtgatgatgttctaatatggaaggtttcgctgaatagaaagtttagtactaaagcaacgagctagggccctttccaagactcgtatgaatggggattctaatttgtggaaacaaatctggaatgctcttgtgcttgagagataacgcttgttttcgtggaaaatagttttgattttgaaatgtttcccaatgggtgaaaaacttgtggtgttctttaggatcaatttcttgtattgcttttgcaatgaggagattgatttcattgtcaaatcttttttgggaatgtgttatatacctaaaattctttggtatagcaggtaagacatttgttcgtggatgcttcttgggaaaatggattggccggccttgcagccgtggctctgaatcttttggataaatcttggtcctacaatctggtgcattctaaagctgcttctgctatggaagctgaaactaaggcagtcaagttgggccttgagtgggctgctcaagattcttcggatcacttcattctgttgtcagattgcaaagtagttgttgaagctctgggtaatagagtatgcccacccgattggagaatttttcatctttcgcttgtagttttagatgttattaaagtcttttcagattgtaagcttgtttacattaatcgtcgttttaacttagttgctgatggactggcaaaaagagctagatattctagttatttggctggtattttccaaggggagggacctcccctgtgcttcccatcttttccttcttttaatgaacttgtgttctattcaaaaacaaaaaaaaaaaaggtaagacatttgtattgattattgacctttctcctacattggcttcttggtgttgaatttattcctgatttggagcttttgttgaaggaattcattgttttctaagtcactgggtgtgaaactttttggtaggcaagaaagagtagactctctaccatgggaaagatcactcacctttctccttggtgtggctcattgtgcaaatatgtgctaaagtcacctccataggagtatttgttatgtgagaagtgttaggatgtgggagtatattcaaaactttgtatattatttatgtaagaacgtggtgggtcccactcacttttagtgggtaatatgaaaatattttcatacttaggtcatcttcaatgggacactaaaacactaaatatagtgcagtttcacactatatttattctaatgggatactaaatctatcctcataaatgactttgtttacagtgtcccaccaaatttagtg

SEQ ID NO: 25876 - DNA, 1568 bp, Cannabis sativa
  modified_base (1085)..(1092): a, c, t, g, unknown or other
  modified_base (1537)..(1542): a, c, t, g, unknown or other
tttttttttttccttaatttgattttgctaagttgattgattgattcattcaagcaatagattatggaacattactttttgtacaacatataatcattagaaaagctccctttcggctgagttgaataaaacaatgacaagagtaatcactcatgatcgaagttgcttaaatatgatttcaaacaatagccaaattgttataaatctcacttatgttagtaatatccccaacgtgttcgtttttatgttatctatttatttgtttgttttcattttcctcaaatattaagctaaagttggaatatatgctaacaattgtttttttgatgttcaattttattttattagtttttatgtcaaagcctcacaaggttagacagaaaaaaatcgaacaaatctcacagcaggatgaccatacaaacggctaaccatattaattaacaagatgagcaaaagctcgatacccataaacgaaaatacgagggataaaccccacaaaacagctagagtttaaacgtcacataaaacaaaggttgataaataccgttattacaatgcaaaaataaaaaataaaaaataaactaaaaccaccattaaatcatcaaccctcaaacgaagttgtgcaacagcagccaaagcctaatactagttgaagacgggcatcaaagcactcactaacaatccaacccacactcaactctgtaaggcaggataagagacgcactttccttcgggagtaacctgggtcccccttgtcatctttgaacatccgagtactcaaagaaaagctctgatgcaatagagtcacaacacatgaaaaaacacctgcaaaatagggacaaaatctaaaaaaaaaatgagcagaagcacaccccaaagccccaaacaacagagaccaatactaaaaaaagggtttaggagaccattttaaataatcgggtaaagttttatcatctattcataagacttgacgtgttggattatattttaccaggatctagatttactaacaagtatgtttattagcatcctaaatatgaatttataaaacaattgattgcagcagaatataatgactcctcccnnnnnnnnctctaacccttgttcctttctgtattctccttcatgtgtttggattcttcactgtcttacacactatgattgagtactagacttgctatgtgtggacatgcactcactcactaatggctcgaaatttgttgaagaacactcaatgagatttcgaaattagaagaaagaagtagaagaagtctcaagaactctctagttgtctgacaagttgtaaactaggttatgagtcattcgttggataatgagaccatcctatttttttatactatttcacttagaattaggattgaattatatggaataaaaaatgataaaataatagcaaaataaatcctatagtggccggccatgagatgggccccactaattatattttttaccatttttttaaccatgtatctattatttcacaaatgtcaaattttttaattttaatcctataaannnnnnaactatttatttaataattataatta

SEQ ID NO: 25877 - DNA, 4782 bp, Cannabis sativa
ttaattttgaaattttaaacacaatatttttgtaaagtttgtacagtaaaaatataaaaaacgctgtgtcacaatatttttgtaaatttttcccaatatttttatagtatttttgtaagttctcctatacaatattcaactaattataaaagacttaaataataaattattcacttcaacgtcgtactaaagtgattacacttaaaataaataaataaataaaagtagacaaaataagcgggctaaatttaaaagagtgtgtgtatatatatagaacacttttcaatggttattacatattgatggttactaaataaatttaaatataaatattaatttaaaaaatataaatattaattttaaaaatataaaactattagattttgatccaatcgctaataatacgagagaaatttaaaattttaggcttaatttagctactaaattaaaaatatattaaaaaaatatctctttttacactatatcaaaaatatgtttatatacaaaatactcaagtcaaactcaatatttttcttatcttttttgttgatttttttttcttaatttttttttcaatcgatggaacaaccccaattcatataatgcaaaaataagatattttaattagatagaaattaatcataaaaacttaattttcttaatactaaccattcatgggtatactcattaggtagaaccagcattcaagcacaacgctctaaaaaaatggtgagcaatacgattagcagatcacttaacaaaaattaaaaagataatattcaaactagaaagaactcgtctgcactaagagatgcagaacccaaaaacagaaggcatatccattgaactttgggaagcttggatcgtgatcaaactgtctccaccaccacatcttcatgacctgtctatttgaaccagcttaaaacctctttaactctcatagcctcgtcaataacagggtcaaccatagccatctgacttgttgttcgagccagaataagcttactcgaagagttccgcgccaccaactgctgagattttatgccctaaataaaactcaatttcattgtaatcttatttactttcaataaagattaaaaatcatactatgacctaattatatactttgttcacatgtttgttacgcgattataagtttaatatataagttctattgaatctcaaacatatagttactcacaattacaatgatgtcatcacagtacaaagtaattgtgacagtatgtttcaaattatttagtctcacaatttatcagtgcactagatttacacttaagtgataatctgcgataaaatttacttactcttgggtaagtagaatatccttttcaagacatttgtaaagtaaactaggatgggatgtatcagctatacatcagactggaccaatattgacagtgaaaaatgtattataaacttatcattatatcttttctaagtcaagatcacttagttgatcatagatcatttgatctcaatcttgagatggttaagctctagctttattgtactgcacaggttctttgacttcttcgttacaacttacctacaaaattagtctatacttacatcttgagaactcggtactgcaattgagtgggagtgttaatcatcgatatggaatctataacttctaaaatacttagaagtgaaacgatagattttttagagtttttcttaacgtgataaatgatagagccctcattttggaaattatattagtttctgaaatattatttataagtaactaagtattttaaggataaaatacattgaattactcaatgtagaccgtctatagaggatcaatgattattgtaattgaaataatggataatttagagtatatttatacttggtgtatagaatgttctatgtaatcaggagtgcaaattctgaatctatagtagagttaggaggaattaataagtttagaaatttactcggtaaatttcaagatctatttattaagagcttggttatataggcacatggcccccactttgtctgtgataatatcatcttgtagattcaactaattgatttaataagtcaattagaattcaaaaattgactatgtcttatttgagaatttttaccaaatttggacaattttgataagaaaatagatatagggtttatttattgattagcactctttctgggtctaattgataaatataattaaattatattttatttaataattatttataattatcaaaataaattagtattcaaataattagatgatataagtgctaaaataagaaaagacattttagttttattaattgaaataaagtggcaaaaatctaactctaaagcccatcatatgattttagtgctaagagattagattcagcccaagtctttattataagtccaatctcatctaacctagccctaagtgaagcatatataaagaaagtaatgagaagagagaatcaaacctaattctatgccaaacaactatctttctcttctttctttaattttaaaattcactatgtaattctctgtcttaattttttctaaaagtgtttaagtatcaaccgacactattcaaggtgatacccaggcttttgtggaagactatgatgaacacaatcgaaggaagagaagatccagattcaaatcttgataatgctctactatagataggaatcaagggctagagatctaaatagaaggagtcaataatttctgctgcaaccactattaggatttttatatccctttatgtgtttattttgttgttttaggaatccatgttaggatgttagattagactaaatctaaaatacttgaatagtaacataaagtttttgtaaaataagctttctaacaaatggcctcacaaccatggtaaatttttattgttcatgtcaactggctaaaaaaaattataatcgttttttttatgtgtttatgagatttagatgttacatgttaagtggaatatgcattatttgaaaaattatgaaattacaattttttttatagaaaataattagaattttattctaaaattatttttatttgaaaatttaagaaaaattatgcaagtgtgattattagggattttaatttcaatgaaatttgataaagatatgtgatttgaagtttggtaaccaaggttgtcaacacactcgggtgagacgagccgagttttctcgactagtttgttgttgccatgtctttgagtttgaaatattctttttgggtgtttcaaaagctaaactttattattttgtgagttctttccatttttaataatagaaatagtaatttcagaataaatctatttttttattaattttttaattaataaaagataaatttaggttttacaattttttaacttaagattgaaatggaatattttaaatatagatagaattgatgttatcttttaatataaatgataagatcagacattataaatattagatattttaaagtttgaaatatcctttgttatacctgaaattaggctggtacttcagaaggtgacacgtgtcaatctcagagaatatgaactaacaaatataatgacaattatattattaaatgtaaaatggaataactcattaaatgcagaattaatagagtacatttataactctcagattgcacaatctttagcgagacaaggatgtacaaactattgattcgtgtattgacgagaaaccatttctcgtcagaggacataatcgcaaggaagacatcgataacacatagcgaggcatctacctcgcgatatgtagagaggtgttgacgaggaaaatcggctgttagaacacttagcatataatatacaatatactaactaagtgtaatagcttgaaggacatgattgtccagtttgcaaggccttatggtcaaagatcaattcttaaatttgctcagtacactggtgctcacgtcattgctggaagacctatgaataaaacaagttgtttatgtactaggcgaaacacctcagcgaggtacccttggcagcgtgtcttaatccacgtcagtgttgacttcctagaaaacggcttaaatcatagctgtgtgattttcaaataataactgtatttatttacgtggagcatatttaaagcccacaatttgtttatcatttttcttgcatctgatagtagtttaggcttatacgtttctggaagttcgaaagtgtcctaaaatcataaaaggaattaattagttattaaaaaaattaaattaaatgtgttgaaatatatatatacaacatttaagtcttacatatgtctctttccatattttctccttgagttttgaatctacatgtctccaatcatcaacatttaaagggactgtagatcttgctttaagattgcatagatttttaactatgtcatcatgcaatgaatccattttcttcatttttaattcgttcccacacaattgattaaagaatatgcaaacctttgtcaaaatttctcgaacttttctaggtaggactgatcgaatggcaattggaagtaattgtacattactgtgtaacaatcatgcgatttcatacccattaactttaattattccatatacactatgttttgaatgttagatgaatacccatcagacactttcatctttactaatgagttgcatacgacttgtttctcttctttagacaatgtgaaaactggaggaggtaaatatgtacgtttgcctttatccacatgtgccaaaccgtgtcttatacccaactcaacaaggtctaaatgacta

SEQ ID NO: 25878 - DNA, 3094 bp, Cannabis sativa
gactgaaatactcatgggaaagaaaagcttggccaagtcaaggaagaaggggttccccattaagcagagaaccgaacctccattttattttaaatttggttttttttttttgtacatttcaactgaatattaaatgtggtgtcatatgtgggtattgctgtagaataattttaagctttataggaagaagttgaagttatttttggtaatttctttactgtttgtagggtcaaatcacacatagttagatagagaataatttttagaatctattgggggatgggtctgtggggttagtgtgtgtggatttatgtggtttattattgactttggtgtagttttattcattatgtggagagcctttttggatagaattaattgaatcttatataattagaaagtaaagtctcttccttgttttgtgcagagccaacatcagggtcatttactcttaagattcattacaaaggacaactgcaaagacatggtaatattcctacttactttggtgggaagattgattatgttcattattgtcatattgatacacatgcgcgcgcacacacacacatatcactcagcttaaaggaggccctatttcacattatgtaaaatgggtaaatatcttgctaaaatgttttcaaggacttaaacttaaaatcgaaagttttcctatcgataaatagtttgtaaataccctaaatatcaagaaaatataaaaatcgaggttcttgaaatccatcccaaccagtgaaccagatcccaaaattataaattattttttatgatccttcctggaaaaatgattcactgtttctggaaaatggtagaccgtttttctacagaaatcccaaaaaactttgattttaactcaattcaactccaaatcacatgaaactctccagaatacctaataacatccaaataaacatatatcatgcaatgacagcagctataacccacagaacataaaaatgctattattgaaccaagtttgagtttgtgaactcaaacttgttcaactcccttcacatccaacaaaaactataacccaacaaacataaaacaactctgaataacccaaaattaaaaccatgaacaccctaggtccgaacagaacctaaccctaaaaattacatgctcaagctaacacttttcttccaaaaatcaaagagattggtgttctagggtttacctcaaatttagctttccaattttccttcaatcattgttgaattcaaagaaaattagtgttgaaatgatctggtcttctggtttttcttagggttgaataaaaaggtttttgagagagagataattgattctatttttgataaaaaagacatgaataaactttaatttaatctttttttattccttaattaaatccgctaggaaaataatggaatagtttactaatttcactaaaagataaaacccacctctaagaaaaattaccattttgcttttacttaacacttaagtaatcttaaggcttaggggtaaaatagtcaaataccacaactctgcctaaacccgatattctaaatatccacaatacttttcctgttaaataaaaggttctaaaccatactcatgtgactctaatggccaaattgtcgcatatccatcgttatcgagcaaaaattataaaaataataatttctacatatatcacttataatacacctaaattttaataaaatttctagatttgagtattaaaactgcaatgccaatttcttgaatataggcccataatataaaataacttcatataatcatataatacagttaattaatgttaattgccttcataatcttatattgtaagtatgcggtcattacaagaacagtggtgtgaccaagattaaccttgggtggtcatcagagcgcaagaagtagggactataggcatcttcatgggtagggtgcaagggacttgcattggtttgtagtcttgtagcttcgaagacaatggtagtcggaggaatgtttggaggagcatctgaaatagtggaggaattattcatcaaaactatggagtaacagtcctaggtccagtggcttgagttctcaccatggcgatggctatagcaaaattcttcaaaagaataacaaagagattttatgtctcagagagagattttaaacgtttgagaagtaagttatttatttatagaaacactttatatacatagtagaatagccaaaggttaatacaataataaaaatctaatcgacgaatagaatgagtaatatactaccataactaccattatacattgataattttttttttttttattttttttctaagacttagcatctctaatggagtgttataaattttgtgtatacgtagtttttagtccatgtttataaaattgaattttaatagtggtgtataatgtagtctaaatttagcacatgttaaaaattgtgccaaaaaacacaaaaaataacatgagttaattaaattttacattacaataaatattacttttatatttactattttattattcattagtatgattaataactttttacatttgtatttatattaggttaatattacgtacaacacacgtgtaattaatttttttttaattaaaatccaataaacatcaattttaacatcacacattctaaataatgtgtctaatttaaatatgaaatctctcttatgatctgatttaatttataataaccatatgatgataataatattcttttattaatcatgtggagaaagagaaaatatttaaattaaaaataaaattaagttaaatgttaaaaatatagttaaaaatatttacaaaattttaagtattttaaatttaaattaatttttgttaccctttgttgaaattcaatctaatagctcatattaaaacacatactaaaaatttagatcaaattaaatatgaaataaaataaatcataacattaaaaaaaaaaactaaaatgttcatcgccttcttcctcttgcttgtgtgctctttgcctatttcaattcattaaatgaggctgctacttctgttgggttttatgccctaaataaaactttttacaatctgattagttatca

SEQ ID NO: 25879 - DNA, 4619 bp, Cannabis sativa
ttttttacaagcggggttagaattgaaaaaattaaatgcaagtagaatatcacaaaatagagaatcgattaattgcagaattttgataatattctgtacataaatacaggatctaagggtaaaaaaaaaaaaaaatacaggatcgtaaaaaaaaaaaaccttcaacattcagataaaaaaaaaatataaatcaaataaattaaatttatattgggaaatatttttaaattccttaaaaaaaaccttcaaaaaatccactgaaaaaaggggaaaaagttgcttggggcgacagcaaaatttaggctatatctttctctataacagcagggctctcttcacacactcttgcttcgatgaagaagaagatgatgggtaggatctccactcgtacagccatggccatgctgttgctctttgctctcttcagcatttcctctgttcattccttttaccttcctggtgttgctcctcgcgatttccaatccgtactcttcttctctctatactattaattcttattccatttcctaactctatctctctctagttctctttagatttaatattctttatcgaaatttatctgtttatttatttccagtaaacctaggttggatctatcctttttttttttctttgatctgttctggttcaattccgatctatgttgaggttttagggtttaaagggatgcgggtttttctctgcagttagggggcgtcttcgggtttttaaatattattttttcatgatttttatgattgtgaagaatttgagttactaatcatttttctttgttctatgtttgtgatttgtggatccttaggtggcttattgtttctatggcctaatttacttcttttgtgccagtctaacattttctttttaatttctgtaatataatggatagagacgataatctgtttagaaatgtgagtacgaggcaacacgagtgagttttgaaagcaagagagaattcattatttgagatacaaggaaaagtttatagatgtgtcactgttattgaagtttagaaattatgttaaaattgcagataattctatgtatttgacaatgtgcataagaattttgaaagataaggttgagcaaagaaaggtttcttttttttttttgaagatcttcttgtagagtttattttgtcagtcattatgttttttgttcgatttctcgcaatttataaaggttcacaatggtgttcacattgtgtaagtttagattactggacatggtgtttaaaatgaagcaatttctacaatgaaatttgtcatttttatgtctaatatattggagatgtttctttgtgttcttattttgctgttcaaattaagtaataccaacttcatagtctttttgatgatttacttatctttggctgttattgttttcttcctggatagggtgacgagttacctgtcaaagtgaacaaattgtcgtctacaaagacacaactcccttatgacttctactacttaaaatattgtaagcccaagaagattttgaacagtgcagaaaatcttggggaggtgcttcgaggtgaccgcattgagaattctgtttacattgtgagtttcatagtgtccgtcatttttttccttgtctcacagattttctattcttgtatgcttttatttttgttaattatctttgatcaatgctctgccagtttaaaatgagggaggaaaaatcatgtacagtggcttgtaaaacaaagcttgatgccgaagctgccaaaaatttcaaggaaaaaattgatgatgaatatcgagcaaacatgtaagtaattattgcaattcaatactaagcaaaaagttattgatttgtagtcctgagattctactgaaaaaaatgtccttccgtccttttttttaataaaaaggaagaaaagaagtcttttctcgtataatctttatccaattaaactgactgcactggtttcaacttacaggattttggataatctcccggttgctgttcttaggaaaaggatggatggaagtcagtcaaaaacttatgaacacggtttccgtgtggggttcaaaggaaattatgctggggtatgcttcacattataatttgtaccctaggagtgttgagtggtcaataggatgacattttatttgttttacagagtaaagaagagaaatatttcattaataaccacttgagcttccgagtcatgtatcacaaagatcccgagacagacaatgccagaattgttgggttcgaggttactccaaacaggtattgtagagctagcctgatttctttttgtcgttgaatgactactttgttatacgtactgtttttttttgggagggtagtctcatccaacttctgtatacagtattaatcatgaatataaggagtggaatgaaaagaatcctcagttggttacgtgcaataaagacacgaaaaatttactgcctggtagcactgttccacaagaggttgacgctgataaggaagttatattcacatatgatgtttcctttatggtacgtcccaattaagtgtttttattattttctttcttttccgccgaatagatttttggctattagtttacctgtttatgtccaagctatatgcttctatatactcatattctctttccctctctgaaaggaaagtgatatcaagtgggcatctcgttgggacacatacctcctcatgaatgatgatcagatccactggttttctattataaactccctaatgattgtcctcttcctttctggtatggtggctatgatcatgatgagaactttgtacaaagatatttccaactacaatcagttagaaacccaagatgaggctcaggaagaaactggatggaaacttgttcatggagacgcttttagggcaccagtcaattctagcttactctgtgtttatgttggcacaggggttcagatctttgcgatgacacttgtaacaaatatatttgctttgctgggcttcttgtctccttccaaccgaggtggtctgatgaccgccatggttctcttgtgggttttcatgggcttatttgctggttattcttctgcaagattgtacaagatgttcaaaggcacagaatggaagaggaatactttaaaaactgcatttatgtttcctggtatactttttgccgtattctttgtgcttaacgcactgatttggggggaacaatcatctggtgcagtgcccttcggcacaatgtttgcacttgtctgcttatggtttggaatatcagttcccctggtatttgtgggtagttatctgggtttcaagaagccagctattgaagaccccgtgaagacgaacaaaattcctagacagataccagagcaggcatggtacatgcagccagttttctctatacttattggaggcattcttccatttggagctgtttttattgagctgttctttatcttgacatcaatatggttgaatcagttctattacatcttcggtttcctgtttatcgtgtttgttatcctcttgatcacttgtgcagagataacaatcgttctctgctacttccagttgtgcagtgaagattaccattggtggtggagagcatacttaactgctggttcctctgctctgtaccttttcctctactcggtattctacttctttaccaagttggaaataacaaagtttgtttcaggtgttttgtactttgggtacatgatcattgtttcatacgccttctttgtcctcaccggaactatcggcttctacgcttgcttctggtttgttcggaagatctactcctctgtgaagattgattgaaaagtgcattacgtgaagaccgagttctctagacatacatgagaaagctgaaagaaggaaagatttgaagtgagaagtttgttaattagctttctcctcataaagaagatgataggaaaattttccaagtctctgaaacgtttctattgtgatggtagcatagggcttttgcttgttttgttgtctacaattattagatggttttgaactgtacttagtaaaggtaaggtagtatttgtacaacaagtaagaagatgctcaaaaacaatgatcttagatgtcttgttttttcaacataatctttgtatccgaggctctgaacttttttagtagctattttgatcatttctttatttaattggaagcagttttatttgaaaatgaacgagtgcttagtttacgtttttttttacttgaatgaaatcaactaccaattgtttaaccaaacgctacttaagagtaaatgagaacaaaattcaaacaacgccagcatcaaaaggagtagctaatacccattcctctgcccaactgtagatactagataacactttacttttgtaagcatgttttaaactagttgaaacaaaaataaatcagagcccttttgttttttttttttttaacaaaaatactacaattaatttttgcttggtcatctcatattctcattaatataagactaggaaaaattggtaaccaagaagtattatatttattctatttcattattattttctcctatttgaaaatcgttaaagcttttttttttttttttagagttctttagttaaagctaaggtgccgtttggtaacac

SEQ ID NO: 25880 - DNA, 1998 bp, Cannabis sativa
gtcggaggagagcattggcgaggttcgcttcgcttgttctttctctttctcgctctaaagaaaatgggggtgggtttagagagagaaagagggggacacgtggcgtgtaaatgtggggacaggtggtgagtatatgtggctcactccaagcctagtgatgatgcgatggtatagcgtgttaaacatttacaccacatgattctatatcattccttttcctccgtctgatttcccaacgctaattaagaccatgctaattaggaccgatctaatgtcaacggaccgccaaaaattgaatatccaaaatcgaatgatatttttgaaaggttaagattttttgaccgttaaaaattcttccaaattattgactccccagacttaaatatctactaaataactttcaaacatttttaacgactttaaaagttcaaattacatgttacaattcggggtaaaagttgtaacgtccacacttactagtccttttaaaacatttataataaagataataaaccaatttatttaaaataactaaaatatgaaatctcaatattttaaaacaaaaacacttacttaattcataaaaacacttacttaattcatttatacctttttaaacattaatttttacaaaagtaacggagtcataaacaataactaaaaccccagtgatatggtttgtgcgaggaacgaaagtgagtttttgcttatattgcagtaattttaggagttttatcattaaaatttaagttttaaaaattaagtacaagcgaaataaaaatatcgaaagttatgccgcaatttactctttattattacatacctagtatagaaatgagatttttttttttcttgaagaccattaatatttatcagtatggtataaagtaagttcagagagaaatggtcttctactattcctctcttgtggtgtctgcctttcatttcgtgtctaccttctgtatgcgtcctcctctttctatctagtgatttctaattgtccctcctgtgtgtgtgattgcgttgacctttgtgtgtggtgtccgtttttattctgtgagcttgggtcttattgtattggtgtggtctgtgtggggtgttggtgtgcttctcgtttggtttgttttgtttttgtgtggagtgtttgtccccctgtgtagttgtcttttgttttttgtttgtctatttctgagttggtgaggttggttagattcggttggtgaggtcttaacttccagggaatttctttagtctttttgtcgggtattaatggagtcaatcattgtttccaactcctctcttaaaggcaaatgtttttcttgccttgaaacctctgtcagccttgttcccagtgatacttctctaaaggccttgtcttcatgttgcttgtttgggaaagttattgctcccatggttgtggaggagatcaacgtgactgattttgtggccaaaacctggaaaataccagtctctgtggcagctgtagtggatgaggtgaagagttcgaatgtcttcaaattcggttttgaatgtgctgaacataggaattgggctatggagaatggcccttggtgcgtgcgtggttattcgttggttctccgagcttggactcctaccgttgatgggccggtggctttcaatctgttgcgtgcttggattcagattcataacctccctcacgagtatttttcaaaggcaaatggttgtctattaggggggttggttggaaaagtggtgcaagttgaactggatgaaggaaaacctgctgcttggtgtaatttcctcaaagtcctggttgatatcgatgttgaaaaaccattattctcaagttatttctttgatgttgcatctacggtgaagaagtggatacaagtgaaatatgaaaagataagcattttttgttatttttgtgggagtcttgggcaccaacgcagaggatgcaaactgacatcaccggtgacggtttcgaacagtgatggaatcccttttcccatgttc

SEQ ID NO: 25881 - DNA, 1739 bp, Cannabis sativa
aaattatatgtttattctatatatttaggtgtgagtaatttttagaatttatattaagagcagtacttacgataaaattttaatagttggataaatattatgatttaatctattcaagtttttttatttttaaacttcaaaatattttgttttgtatttttacggaattttacctaaaaattcttattagaactagcactgcagcctaattaattgcaacaaaaaatcgtatagaaactcctattgcaactagcgctgcaactattttaaaaattcaaatcgtaattaaattaaaatatatatatatggtgtaattccccaaaatattataagcatacaaaatgtatgttaaaatatactctctatatatttttttaaaatgaatttcctcaaatattataaagcacaaagtaatgacaagagaatagagcaagaggtaaatatcatagagttgaggacaattagacaatccggctaccaaacacgaagaacagccacatgataatgctacacttacatacatggtaatgcttttctaaactgtgtatctcattttaatcagattttattagctgaaaataactgccacattactctattattgttgagaaagtctattgaggtaacacatttttcaattaatcataattcggtaaggtcagacttaatttgttacaggtggtaaattaattatgattttaatttttctttttttaaaataaaaataaaaaattgtataatatttattaccgcatcactaaggtaaaaaagacataccatactacagacatttccattagttattattattcttattatgagaatgatagagggcaacaagttctaacaaacatattgctattctaaaatttgataacaaaattaatttataactgaccggtgcaaaacatacatctcttctctatataaaaatatatatacacatgatgtcttttaacgtttatagtttagggtactaaatattttatattattgttattattatttagaaatcaaaatcactgtattgcattaacttaaatttacaatttaacagtaccattacagtctttgtaatctatataacatgtagaatttgtaaaaataattgtgttgtaaatttacaattgctcaaacaaatttaagtctttttatttcattttttaggcaaaattaataaaattctaattttcacctcatctcgaatgcagagcattaacatgggtaacgagcttacacatttgtcccacaaaatagtatttcgactcctccaaatgtactaaactatagcagcctcctacctcctgaaattcgactattttgatctcttaatggaacgaaaaatttagggcaacgaagtactcaaggttctccatcctaaccaaagtttgatctcctacaaacaccttctactaaatgggcaatcaaaaaaaaaaaagagatgatgtatggtttcagcatcttgctcacaaatcaaacaagcatcatctgtaactatgccaaaattaggtaatttgtcccttgtttgtagtttatttaaaataactaaccaaagaacaaaacgatgcttagggataagaaacataccccaaatctctccataccatgacttggcttcacaatgtggcgcgaacactcgatacccatgttgaatagatcacctgtttagcagaaaatgttgtaaagaaactttttctttgatttcatctttgattcgagttacttgcctccagtactag

SEQ ID NO: 25882 - DNA, 3035 bp, Cannabis sativa
  modified_base (2731)..(2743): a, c, t, g, unknown or other
gaatgtaatatgagttaccggtgtaataaaaatatttttagatttggcaaccttgtagactcgattgggggccagaaatatcataacaggtttaactgatagaattaatgggaattttatgataagataaattgataatacaagtggttggataattaggagtatgtgggatttaacttagtgtcctagaaatataaatttcttagtagctaagaaataataagataattatgaataataaaatttttaaatattattttattattaatatcatataatattatattttttatataaactcatcacgtttattatatatatattatattataagtttataacagtaaaggtaaataaaacgaaaccctcgatcgttttctatcaaaaccatctcctttttatattcattttcttcagttttcaatccaaaacttagcgatctaatctccggtagtagcgggatagaaaattctcagaacaggaaagcttaaggtaaggtttaatttcgttttaagtttaaaacaattagtttcgtataggagttttgcaaattagaatagttataaagattctgaccttataggattgttctcgggcagtcatgagacaagttctgatgttttcttgtagaaattgaggtaattttgggttagaaattgagtttagatctttttataacttaagtgtgaatactagcttattattaagtccaagtttctagctaatatggattcataccgtctatgggttcatattgtctatggattaaacaaacatttattttgagtcgagttaaaaccatctctgccgaaggacgatttgatggttgtctatcgaacaattgaagcattatcttcttgtagacatcagtagccccaagttgatttatctcaatcatcttatcttcaccatctagtttcaatagcttgctcaaaacagtcttcttttgttgatcagtactgaactttgatgcacactcatacaatattacaccaattgaaaatgtatcagagttggtagaaatcttgtatgtttcttcatatgcaaaatgggtctgaagtatatgcctcagcttgtttgtaaaagtgcttgtcataagagctggagataatttctgtcacctttcttgctgccatgagaataaaaatatacaatacattttcaatttctttaatttaagggtgatacgaagaaaatgaagtaaacaaataaactttacctacattaaaatcagccaagcggatattgcatagtccaaaaatatattatttggcctaacatccatatgaattatgcccctcacatggatgtgatgaagagcttttaagagtccttcaaaaagcttgaccatgttacctctgtgaatactgcttatgatatcttcgagtgtctctttacagagttgcaattgtatttagagacaaggaagatgtggggctgagtctcttgctctcaatcatttcatcttcttctcaacccaaaactgagaaaaaaagaaaagcttaattagtaaaaaaagaaaacaaaacatttaacttaattataaattaaaacaattgaactatttagctgtgtaccgaataatatctgattatgtttggatggtccaacgaagctaagaatttatcctccctacaaataaataccaatatttaataacaataaaaatgttatagtatgcattaatttaatttaatttaagagtgtgtaacattattaccttatacaatatttaaagtcgaaatcttcaaccccctcaagaatcgatacctttttgatggtgtatggtgctttgtccaaattattgttacatttagtaactacggcaaaacctcctaaaccttcatgaaatatgcacatataaattttattttgtcgagcagattgtagaatgagtagaatgaaaacaaggcaatgcacatgaaaaataattctctaccaattgattagctatttataaacgcattatttgcatacatactaatcttatttcttattcccgactcctgttgggaaattttttaatttttatgtatttttcgaatttagatctgtattaaagtattatctattttattactttatagtttactctttcattttcttttaaatttcaaaatttcctattattaaattcactacaatattcaatttcaaggtgaatcaaatatatttacatacatataaactaaatttaacaactatttaactatactaacactaacacaattctgatcggtcggtgcatcaaacatatttgcatacatataaactaattttaacaactatttaattatattaagactaacacagatcagatcggtcagtgaatcaaacatatttgcatacatataaactaagtttaacaactatttaactatactaacactaacacagatctgatcagtcagtgaatcaaacatatttgcatacatataaaaatatttacggattaggataggtgaaaaaattatataaacacatatatatatatatttatatgtacatataaaaaaatttatagtgatagagatacctaaaacttctgtttcactgaattctgttagaaaattggatattgttccaaattcgttgtacttcaaactgagtttataaattggacattcattttctagtttggttgtcggcgccgacatgatgatcaattgatgtagagggagagtgagtgagtgagttcaaacaatcgatcaagatatatatatatatatannnnnnnnnnnnnagagagagagagagagaatgagtagtaaaatgaaacttgtgtaatactctgtttatttatagtgatgtgcatggagcagaggcgttaaacacatgcgcaagaaatgtgacttttgaaaatagttgtatttattttgttgaattcgagggagtaaattttttgatcgtgtcgttagaaaagagttctctacaaaatatacacttatttaatttaagaaaaagactaaaaaaggcggcaagtaagcacgctgtaagtaacagatttttaagtcattctctctctctctctctct

SEQ ID NO: 25883 - DNA, 1385 bp, Cannabis sativa
cttctaaaatcaattgcttgttaccctcttttatgcaaatactcttggcctttctcttttggattataacaaagaaaatgtcgaaatcaagaaataaagaacaatcaatgttaagtttatgtatgagtacccaccacctctttaaattggtagggtcatatatatatattagtgttattaaatgaaagggaccaaaatgggtctcaccacctataattacaaatacactatcatatcttatgatcatatatcattatcttccactaccaccttttcttttccaccctctactactctataaactacatttacatgccttgctttgttacttcaattttttttatttattttagtttcaataatcatttgttttcttaaaatatatactaataggaagttttattatggtccacccgccaaaaataggtgtatcagtggtaccctttagtattttttatattcggataaatttatttaatagtatatatattggagaaattctataatgcacccccttaaaagggatacaccgatatatctctatctgttttagtatccgaaataattttttagttaaattttttctcatgatcatgtaaattatacttatttaagtcatcctgcaaaattttaagaaattcggaaaagtttaacacgccgaaaattgcgttcaagtagtttgttgcacgcgtgactattttattttatacgcatgtaaaatagactgtttgaacgttgttttctatattgtaaattgttccaaatttcttaaaattttgtaggatatcttaaatagttataacgtacatgaatatgaaaaaaaaaatagactaaatattttttctaaataccaaaataagtagaaggtgcatcaatacatccattttaagggggtgcattgtagaatcaccctatatattgtgattattttttttttttgataaagatatattgtgattatttaagatattaatttttaaaaaatttaaaataatttaacaaacatgtaactaatttttgaaagagaaagtagagtttagtagagttctttatggattggttttttttttttttttttgaaccaaattaatattgataccaaattaatttggtttggtctaatgtttatttattattgttttttataaatttaatcacacatgatacccaacatacctaattatcaaaatcaatcagtttttaatgaaaaaaacaaacaatcagaaattaagatttggtagctgataagtgaaatataaaccctgcaattaaatcacttacacatgaacaattaatttaatttatatatataagattgggtgattctacaatgcacccccttaaaatggatgtattgatgcaccctctatttgtttcggtatcta

SEQ ID NO: 25884 - DNA, 4103 bp, Cannabis sativa
cagaaacactcacgttcttcttctcttcaatcccatgtgctacaggcagatcaacttcagtttggaaagcttcaggcgacgataggacatgcgacggagctccgatctggacgaagaaacagagatctagacgccggcgttggagaagaaaaggtatcgacttcaaatccttataatagctttttgattcttgttttgctgttttctagtcaattattggtcttttaattttaatttattattattttcagtttaactagatcatcggtgatgtgctaagtcttatgtagttgaacatggctgaagttgcaagcaataaagaggtatagttacatttcttgcttattatgcctgaaatagcctgtgtgtaacaaagctgaaatccttttacagaatgaatgtaaaacttttctttaagttgcggcaaattaaattcttatgctgtttacatgtatactttgcacagggttactcctaccaagagtacaatgacacgcaaaaaaatgtttttgatttgggtacatttgttggagacttgaatgttgaggaagacacaaacaggtatatgtgtggtttgtatcctgtacttaatatatgtaaaagattttatgtagagaatgaaattatgacaatttaatctttttctaatcatgctagtaatgagaagttgagaacaaaccaattaaatatagatgctacgctacttgttagaaagaaagaaaaaaagacgaacataaagacaatgacactggacatggtgcaaaatgatgtgacagaaattgcacactttttttttttttgagggtgggggatgttacttgtgtgggtgtgtgtgtgggtgtgtgtttttatcagggaaaattgtgaagagcaaggttaaaaaatgtgagctagtttactcacgccgttacttaaaatgattgatcacttgttatgctttgtctgttggtttcatgatgtcaaagaatttaagaacaatgctcttgattagctaggtgcaggattttattttgttgtaattttctttgttgtatccagtcatcctgtacaattttttttcttttaaaaaacagaagaatgatcactccttatgcttgacatgataattctaaggcaataagttttctggccatatgtaattgtgatttgcttagcacactgagaagaatatattaattattgttccctcattttcagtgatgacatatcattggaaggacttcagcaagaattagaagaatgcaaaaatgatgatgtaagcaatgtcatttaagaataagatgtgatgtttataggttgcttgagacgcacgaagtccaacttttgcagtgtggaatcctcaaaaaggggctcaatgatcttcaatgtttcatttaaagcatttgaagaacattgaccaaaagcatgacatcttgttgcacttttaggattttgatatggtagtagttagcatttttggtagagggtagccatttagagtcacttttttttttggcattatttgtattggatgagatattgtgcctgtgtcgactttttactactatcttttttttttttacctttattgatttaatttttctcacatgaacatgatttaagccattttagagggttaaaactcatgtccatgcttacaccattatgtgtaggaggaactttataacttatatttgaaaattagagaggatgacattatttaagaaaattctgtaacatacttttacccatttgttcagttttgatttttcttcatgtttttccgttcaagtattttcaaggtttaaaactcttaatatgtattctattatatttctatgctaggtagttgcaaatattctatccaaaggcacaaaactacgggaatatacaaagggggtggagaacaacattcggcaagtggaattggactcaatccaggtctgtattttgtttttcttccaaagagtatttttggtcttccataagtttatgttttatgtcttctgaatgggcatgtaaatgttttatttatttatttttaaacaaaaaatcagaacttgaactattaatatgaaaaataatacaaatgatatggggtcttcccgaagcttactacccatcaataacaagcaaaacatataacaaaaaataagttcctagaatataaaaaccaagaccttgagaaaagaaacatgtacatcaaatgttgcaaatctctacatagatcagagaaaggcacattcttaaaatctttctcattgaacagccaattggctacccgaattctcactgtcctaaattttctgttgtaaaaaagtagtgctttgccacgcatgttatgagcccatcccttgatttttcctcttactaaactggtgttattctgttgcatggtgctttcagtgttcccaatgctacttcatttatggatattggaaaattaatggaatattttccccaagaattgatggaaaagcaaagttatttatatatgtattttagatttctttggatttgggttagttgaagagtatcattcagctggtggactgtgcgttcacattagttagcaccagaaatttgcttcatcacattaaagatggatgacagtacgtttaagcttcacatgcactatgaactatgatgctaagactcataagccagcccccataagttttatgaatagcattacaaatgcattatgagtcactagctttaggatgttatttgagagccttgtaaaattgttgatttcatggatttctttgtctatgtttgtggcatattcctaacacaataccattgtttatttatatctcaacaattttattgcaggattatatacaagagagtgacaatttggtttctcttcatgaccaaattcgtgattgtgataacattttgtcacagatggaaacacttctcagtgggtttcaggtagtttgcctcatgtttggtattttttttgtctgtctggcttggttgtttctgtataatttgctagaggaactatttatatatgtaatgtccataagatttagcctttttattttaggatattgaatcccaatcaacatatgtgcatctatttatgaatgtaatatcaataaatttcagcctttcattttaggatatagaatcccaaacttcataggtgcttcttccgaatttacttttttttatttttgttttggcaatctgtttattcatttgttataaggtttcttattcagttcttattgtcttttgttaaagctatatcaacacgtcatataatgtttgcttgctcttaagttagcttctttaatcatttcccctcaattttccacaatactttttctttataccctactgaaccgtttttcctcattttaagggtagtgttattatcatgagttatgactaatacttcagtgacttttctccagactgaaattggttcgataagttcagatataaaaatactccaggagaaatcaatggacatgggtttgaagcttaagaatcgcaaggtaggatcttttgtaatgtttcttttcttgaggtttaaaagtacaaatcttttggcacacaagtttcaagctgtttattgcttgttctgttgctgtggctcttagatattatgttgtgtgcaataatatgccattttgaattcctgaacataattgatattgcttaaaattgtgcttctcactttccttcatgtggttcttacatattaatataaataattgattaatttctagattgggaggaggtcagtctaagacaagtgtaacctgtctatttttcaaaaagaaaaaaaaaaacttgattagtttcttatttttcacatccttctgtatgtgattggtttatattttcttaacaggtggctgagtcaaaattggcaaattttgttgaggatattatagtccctccaaggatggtggacattattattgatggagaggtatatatgcattacctatccacttccaaccacgcatgtgcacataggtataatgtatgctgtagttacatatctagtggtgtgtatgtgtgtgtatttatatagacatttacaatattagatacatatacatatatgggtgcactcttaatgggtattacaatatata

SEQ ID NO: 25885 - DNA, 3308 bp, Cannabis sativa
tagctaaacctctattattgtggacgagtattataagttataacatcaatgagctatgttgatatagctatgatatgctttggtagactggtagtggggtccgtcagaagaattgcttgtagtacctttttttctttcctttttggtatttctttttcggcttatttacctttcttccaggaaaagaattgttgacctgtaacacgcatgtatataacatgatgttcgagtttagcagagtatgattggcttgaataaaggatgccctcttgcatttttgctcaacaaattaaacattaatgtaacaaaaacaaaatctctatagcggtggaagagtttctattcatgattctggggataatggtccctctttctcttcctaccctttttctatctatttatctatccctttacaatatatatttatgtatctatctatatatacataaatatatattgtaaagagataaattagatctcttttatgtgatttatttaggtgataattattattatttttacgaatggtctaggtatagttaaaacacccaattgtttcttacttattactttagaattctgctattgtaaattgatcttccacggataagttgctagactaagttacggtactttgtgcaatgtcaaagttctatttatttattttatatttaaattgtcacatagatgtaaatggagtaatatagtgtgcatcgtattcttatgttgtgtctttcgcagttatttattacaatcactttagattacagactaacaaacgttttgtgcttaacggcgaaaggtcataaacccaatagatttaggttgagtggtcaaccggtagtttataataaaaagtaaaggttttatgatcagataacagtactatttaacttttgaaagttaattaactttaacagtttgaaattgtacgtttgacttgtatgtattctgtttcttggccatattgtacttatttagaatttgtttttttgtatcttgcattaatttttcgaaaacatccatatccactctcctaaccagcaatctatgttgtttgagtttaaaatccaaacataaaatcaagcttttgtctcaaagttcaaggttcagtttagacttattttgcatgtattataagcttttagaaacgagagcttctgtatcttgcaatattttttcgaaaacatccatctccattctcctaaccagcaatctatgctgtttgcgttcaaaatccaaacataaactcaagctcttgtggaaaagttgtgtaccagtaaaagtaagtgtttggttggttggtgtttttatggaaagcaagtgtgcatgaggttatgcaaaagagaagatgatacatggcactttatccgggctagtgtgtttgttgcaagtctagatatgaaacgattgaacatttgttgttagaatgtacatacactcacaaatctagtcactattatacaaagacttttgcttggactgggttctacctggtttggtttcttctgtcctaataagcaaaccggtagggggcgaaaggagagttataatgtggaggactgcaatcctggcatgggcattgtgggctgagagaaatagcagaatttttgaaggtttggaaaggtcagcggaggttgtttgggaaaagaatcaaattctcgacagtcacttggattttcaaaactaaacattttgaggatttctcttttctagacttaagtagggtttagggtgagttgacgtaattttcctaggagtttttgtgcctgttgttacaaattgttgattaattttatgttttcttgatctgtttaccatggttttcctcccccataagtgaggctctcaatttatatcggggggaggccggtctaagacaagtggtctctttctctttttcaagaaaaaaagtgtaaggttcagtctagacttattttgcatgtattataagctttgtgaaacgagagcttctgtatcatcaaattggtacggttggttggtgtgtgtgtattaattaaaaattctgaattaatgttgtccttaataaaattgtctatcttgcaggtgttggtaagagttgccttcttttgcgtttctcagatggatccttcaccacaagtttcatcacaactattgggtatatatttccaaagtttttcagttaactgatcagttttattctttatgaaagtatattatgaatatgtgatgtaattcttcctttcttccttatgtagcattgatttcaagataaggaccattgagcttgatgggaaacggattaagctccaaatttgggatacagctggtcaagagcggttccgtactatcacaactggtaaaattttgtgctatgttagtattattattatttgatgatttgacttttgtcttcttaaagatgcatggatactagttgctcattacaatgttacaggacgtaataaggaggaattgttgttgaacttggagattttttaattatgatattaattttgttttatacatccaaagaagaggagtttagtgagtaaatggtttttataggaaacagtagatagagatctcttgtgggatggatgatgtggagatatgagaggatttcatgactttgatggtggtaacttatgaccaaatcaatggtacttggaagccaaataaaataaaaatgacataaaaaaaggtcagtaaattgaacaagttatccagagaaaccgaaaagtggtaccgagagtcttcattttgaatgtctatggttctggattgcaaagataacaaagttgactgcactaattttcgcatcggtctacagatgccctagaggtatagggtccttcaattttacgttttgctggaaacaaagggctttgttatttggtaagtagggtaagtagctttttcactactggcagctggtttgattcctggacattcttcggtggctggcttgttacttggtagcatgtttttgaaagaaaattaacggtttccatgatgctattataggactcaaatattggatctttcatgaaaaatagttcagatactattactcaaacagtagtgtcatcctgaagttaagcttgtattggaagcttggtgacgtactcttttgttggaatggagaagtttgattctatagccttgagttgattccatcctactctcttttgtttgtggattttgctgctgcaattcttattatatctaatttcatggttcaatcagaattaattggtaaaccatatttatgtatgttttctttcattttcagcttactatcgaggagccatgggaattctgct

SEQ ID NO: 25886 - DNA, 8002 bp, Cannabis sativa
  modified_base (62)..(73): a, c, t, g, unknown or other
  modified_base (2031)..(2031): a, c, t, g, unknown or other
  modified_base (4261)..(4262): a, c, t, g, unknown or other
taatatagttctattaagcatgtaattaaattaattttatcattttacccttctcgggtcannnnnnnnnnnntgcccctggctcaccaacagggtcttacgattttataaatcatattaattcacatatactggactatataataatataattcctcaattattcataattatctaattagggttttgctaatcaatttcttaattctagggtattacaggttatgttggacacaaacggtttcttgaaatggatgatccaaggcgtagaagtaaaaaatatgatagaaaaattgagaaaagaccacctcctccacagttgttgggggacgatgttttagctaagcttgagcagatacaatttcatttgcctgggaaacccaagcaatttggtggagtgaaacgtaaacgtttcgtagctgagttaaatttgtcaaagaagtgtatattttttgaactagagtattggaaggacttgtctctcagacataatctcgacgtaatgcatatcgagaaaaatgtgtgtgacagtgtacttggaactcttttaagtatcgagggtaagtcaaacgatacagacaaagcaagatttgatttggaggaccttaaaatacgtcgtgagttgtggtaattatttgaagactgtaacgggaattggaggaaactgcatgctagttttacagttactcttcttgaacgacatgaattttgcggatttattaagactatgcagttcccagacggattcgcttaaaatttagagaagaatgtcaatgagactcagacaagatttctagtctgaagtctcacgattatcatgtgttgttacaacgcttgtcaatgagactgaagacaagatttctggtctgaagagtattgtaatatagaagccactgttgattaaatgaaatacatgcctcttttcttaatagtatgattaattaattattcgaatggctgatacaggttcatgtggaggtcaaaaaaagggagttaagggaaaagtataagggaaacaatattgaacaagaactggccaagcagcttgcaggtcaaaaattgaaatttagatttcatatggcgactggggcccctgtagatgactatggcaacaagttcaacaattacataaagcttcttgttcgcaatactattcctatgaacaagtttgagttctagaacgttgaggatacagtcattcatactatatgggatagaatagcggtaacattctaattttttataaatacatcaaacaaaatcattatataaaaatacaatatatatgaccttggtattttttttcagaccaagtttgagttgctaactaataatcctatgttcacggattacgtcaccaaatatatgtcaaaaggataacgtgactggagagcagatacgaagaaggcatggaaggagaatattgaaaaatatggagagaaaaaagcgaataggagatcatgtccagatatggtgaccccggaggtgtgggcaaaggttatcgcatactaaaaagacccaaaacaacaggtattaattgaaagttgcaataattttttttttctatttacttaatattttattttcaatttgcgaacaataaatatacgttaaattacaggcaagagctgagcaaaatgcgaaaaactaaggagagatgaaggttcaaagtggatggggatctaagaccatagttggtcacattgtgagcggggtatgatattttcaatatgactaaaattttgctaataagaaaattttcaataatatatttctaatttctaattttgtttaaaaataggctgctccccagacagaggaacttcccagtgctgtggatacttttgcaaagttccagtgcaaggacaacaaatggcacgatgagcacacacaataactgcatgtaagtattgttaacgtagatttttcgttaaccaaatttgagcctcacaatattgatttcacacagaaaaaattaaagctatcaaaataaagaatatgaacacagggtttttacgtggttttgcagtnaaaattctgcatagtccacgagtgaatcttattcagatttctgagtatttttcagggcctctttcatatgagttttttcgtccccctttttttaatcttgtctgccactatttataattacatagtgaccagtaatttacaaaagttgacaataatcgttacagtaattattcccttaaatcatggaattttattacaaatcaagctaggtaaatggggcttttatttatgattcatacagttgtgagtatcccccttttattgggccgagatgaacgcgtcatttatgatatacggtaaaccttatcgcatagggatgtctcgctgagaatggagccaagttaactctgatggcgagcagttgcttgtcatcggacttcctgagactaatattattttaattctgataactatattttctagtgtcgagataatcttcctcccatgcaggccatcttctagtgagataaacgccttgctatctgttatcttaactcgctaaactatctacacttggtttgtatatcgtgtaatatacggtaagcgtttttatggttatcgtttctcttccatacagcgaggtttaagcctcgtcatatacatttacactcacatagtttctcggtaatacataagttagcagttcgtacgtttccttctcgcagaaggctattcaggcagccgagttataaacatactctacgaattatgtttccaacgagttgttccattgtaagtgtacttttatttgcgtgtttgagttcttcgcccttctcagctcgacacgtgtcttcctctgatgtgcttaccgagtttcgagtataacaagtatctttatatttttaataaattagttttatattttaaatttctttcactctaacaatttaatcaatttttttgtaggccaaaatggttgagattcgtgaaactcaaccaacgcttgccaatgtccaccgccagtacaatgtcaatcccacccaatttcctgcagatatgcatgttatgacacaggtattgggtgagcggtcacgccacttaagaggactgggcctgttaacaagacctaagactgggacaaaaatagcaactcccaggccaggttcatccggacagcccaccgtcactcaagaggaatatgaggcactgaaaagaagggtggaagagcaagaagcacagaactagtggcaacaataggtgatgatgactcagaatcaaatcatgagtgcgctccaacaacaaatgatccaattggccagcgccgttccaggatttaatatgccagagatgcctttgattccaccgattctaccattttagcctcctggccatgcagatggttcctcctcacagactgcccctcccggtgatgacgaagatgacgctgtcgatttgtagtttttttggtttgaagtgtagataacattactgtttatgaactccaaatacttttatttagtttatgacgtttaatatagttttctaataagagtataaatttttgttttataatataattgatattatatttaatattatttttatttgaaatttaaatttaatttatatattgcaaatttatcatttttttaaaaaaatatattaatgcttttaccggcgcttaaaatgcgtcggcaaaataattattttttagttttttttattaacttttcccggcgcacacctcgccgaaaaaaatatttttttttagttttttttattacctttctcggtgtacacctcgctggcaaaagtattattttttaattttttttattttttattaccttttgccggcgcgtaccttgctggaaaaagtactatcctttaatttttttatttccttttattggcgcatatttttgctgacaaatattaggcgccacaatatatctggtaccaaattcccgccaaaacttttgtcggcgtgttaactcgccggcaaaacgtcgtcaagggcatctcaaccggcggccctattgccagcgatgcctttatgccggcaaaaacctgtgccagtgtaaatgcttttaccaacacatttactagcctcgctggcaaaaggtgatacactgacgagctattgccgacaccttttgccagagaagaaaggcgtcgacaaagttacatgtagtttttctggtgagtttttttgccagaaaatgatgattttcttctagtgccttcaatatttttaatcggtaaaacatttagctacctataaatgatnnttcagtaaactaatataattaataaaatgaggcctcaatcatttatctctatcaagccaagctcaaaggtaatcatcgtttcacttctaaataagtataaaatctataaattctatatttatgattagcactcccattcaattgaactatcatgttctctagatgtaagtgtttaaccgactagactttagtgaacaactttaagaacataaataatacaattgaactgaacctaaccagatcaagattaagatctatagacctaagatcaactagtgatatttacttagaaagatataacggtaagtttatgatatcttatccaagtttaatatcgattcaatctaatgtatactccatacattcaatactagtatactttgccaaagtcctagaaaacacataatacttatccaaggtgtaagtataccttatcgctaacaatcatgtcaatctaaatccagtgtactgacaaattatgggacttaaacttttgaacatataatcattattatattctacagtgttgacaaaactataatcatgaataaaaatatgttctggactcaatagaatttatatattaaatatatataataatgaaatagatcatgagaaccatgctacataaaatcatttatgatcttttattaattagtaaatctaattatattgaaataacttttatttagggcacaaaactcaataacaggtgactctcaagctataatccagtccattcctttatatgttatgttcgtttttagactacctatttctatttgtcgtaaaactgaaaaattgatggctaagttccagtggagataaatggaaattactctaaaattcattgaaaaactaatcctacctttgtaattcaaaatttttagacggccttggttttagatcccttatccagagaatttttaccaatgatcacaattccttacttgctgttaatttaataaaagtctaatacttgaagaaaaaaattctatttttggatgctcctaagggtcagtctttctttcacttggcaaaatttgctttggggtaggaatttatttaagaagagccttgtttagaaagctagtaatgggaacctattagaactttggaagatcactagatcccaagaactagattcatttaatacaaagctaggaaccttccaccttcagataaggtaggttttttaattaatcacttgagtttttttgggaatatgaataaatttaattattactttgatgataatattgttgctcaactccttaatctatacctattgaggatgtagataaagataattgtcttatttgaaagttacatccttctggttatttcacagttgaatccacttaccattttgctaaatctgctactgtccctcgtgcttcttccaatcaatattttttcaggaagtagttagccacttggattttgcatactccatctaaaatcaagcattttatctagagcacttatttttatctttcacctacaatctctaaagctctgttccaaaatatttatttctagtcctacttgttccttatgtagctatatcaatgaaacagtgacacatgctctcccaaattgttccaaggctaactagatttggagattctcttcgtttaaaaaattctacaattttaacaagtgcatgatgtgagagaatttattttatgtgcttttgattcactttgtaaagaggacttggcaatgttattgggtatcatatgggctatttgaggtcgtggaaacaataaactgtttgagaaaagttatatgtcagcgaccagggccgttcttaaggtatatggggcttaaggcaaaattaattttttgagctcctatatatagttgaagtattgtaaaaataataattttagtgttttgttatgatggtgaaattttttaaaactcttaaaatccttcaccagcgacacatgtacattaaatattttcttaaaaaaaaaaaaaaatagtggttgaaaattgatctcttaacctcttagcttaacaccaaacaaatacttcttatattttctttttatttaatattttatatctttatactataatagcttttttttttctcaattttaagaccctaagcattcggaggcgcaagacgcaccctcagctagcgtacactcagggccagccctatcagcgactaatacaattgattggatcaattcttatattagagattatagttttccaatagaatcatgaacaatcaaaagtagccaatatctcatcataggtgctagagaattcacttgattcgagtttctttaagttgaacactgatgcaataatagatttgatgaatggtaagctttgcttgggtgttgtggttaaagattggaaaggacatatagtttgctggattgtatctattcgcattgcaggcattacaaattccacccatgttaaagcattagcattaaaattgtctttgcattggtgtaatatttcattgaatctgactctaaggtgttggttcacaaaatacattgtaatcctatagatacagtgaggataatttgtagctctttatctcatctccctagggctactcttggacatgtttctagacaaaataatgtttgttttctacattttaataaaaagggtttttatggcttgatgtacggttagtgtggaatggtacttttccactctttaaaacttggtaacttgtactaattgcttcattttcatgaaagttacataaaaaaaaaagtcttttgttattcatttttttgatgatctcatcgttcgttatatgtggtatgatatagataatatatcactacacgtgtaatgattaagtcctctttttctatactcttgacattttggatttttcctctcttgtctatatatcattatctttcatatcgaacaacaaaacttccgcaagaaaaaaagacaataatatataatattctattaaatatacatgtgcccaattaatataaaatgttgaaaattgatctacaaacaaaaaataccacctaatcatattttttttttggttaaaaatatattttacaaattaataataatttatgtggtagatcctaattatctgtgtattggcactctaattatattttgaaatatataaatgtaattaataattaagaataatactagttgtatactagggaattatgctgtgataaattttattttattttttagaaatgagtgataattttatttaaaaaataaaaatatgatgacttagattatacaaatatttaactctaatgagttatattggggactaaactatgcatgagcataaatacataataaagacatgtaacttatatttttaacaattataacatagcagcaagaaggaacaaattattcttattgggtaagctagtaaaggggttaaaataaccaaagtcttgctaacttcatcattactctaagaaataaattagtaaacattaaagaaattattttcaatcacaaatctttttgtcaggtctttagagaggcaagtggtaggtacattatatattatatataattgttattttaatttttgtcttcatgatgtggcatgtttacgtggacaaaccagtaccacgtagcagtacaactcactaaaaggaaggccaagtcagcacccaagcaaacgaagaccccgacattcaaacggggatcaagtggcagaccaactccctctcaggagctggccagcc

SEQ ID NO: 25887 - DNA, 3027 bp, Cannabis sativa
accccgacatggcctcggctccagcccctgacccggcttcagccccgaacctgacccccaacccttatcccgacctcagacccctaacccagccccgaccctaacctcaacctcaatcaccgaccctaacccaaaaccccaacgctcaaccctaaactccagcctcatacgatttctaaatattataatataagctaatacagattatttcttatgtattgaataatataatccttattatataaaaatttatggttgttgttgacgttaaaaagtggccaacacaagctcgctagattgacgagatgattaataagtttaattaaataatttagagagacacacaaaatttatagtagttcactccccatgtcgtgatggtaatgaatctatgtctacttcgaatttttatttctcacgagaattatagaaaaaggctaattgtttaagctctagtttatagagagagatgctcatgagatagtattgcagaaaaaggctaaatatcaaaagctccaaattttagagagagaagctctgaccttgtgggtagttttttgaatgtgaaaaatgagctatgcgagctctctttttataggtaaaggaggcccacaaaaataggaggaaaatacaaataagatgtttttgactgttgatgatgatctaacatgaaaattagctcttggtggtgatgaccattttttagagcccggggggcccgctgtaagtaaccaagagcttattttcgtaaatctcttggggtgaattttgacgacaatagcttcagaattatgtctggagtctgagacatgacttgatagagcattgaattagcttcaaaactcaagttgaatcgcgtcaattagatcaaaattgagtgagttacggttgttttactaaaggcaattcatgatccaacgcccaggttgacatccagcgcccaagttgacatcctagcgcccaggttgacatatgacgtcaacttggacgctgggtaagtgtaaaaatgtccatggaatgtacttgaagatgcctaagtgatattttgacatcacttagtctatttatgtgttctagcgaagctggtcactggtcctcaaagatgttgctgttttggagaaatgagagactcgaaactcttcatttcaggtgagcttgaaatgagaaatgcaaagttgtaaatttggcttctctaacttcatggatctttgtcttagtgaaaaattagacagacaatcaaaacgacctcagaattggataagcagaacccagtgcactaggccatttgtcaacctaagtgttgggtacttactcccgaactcctaggattttgtttttgatacttctaagacttataaacttgaggacgaggtttcctaccccattttttaccatttttaattcaatggtcacatcaaatttgacatttgagcaattgaaggcaccgtcccaggttgattatcaacctgggctttggccaaccgtaggtcaacttgggtgctgggccttgtttccagggactcaagattgtgattttctccctaagtttgcttgagtcttaattaattctaatgacagaaaaattctggaaacactttttgctaaacttgatcagaaacagctcaggttgacaatatgtcaacctgggcgtagggtagccccaggtgccaacctaggcgctgggtccctctttttgcccttcgaaaatttagtttagtccctggaaatagttgaatctcaatattttctaaaatacaaagaagattctcaaaaaaattcctgaaaaaaaaaatccattttaaatggcataggttgacaaaatgtcaacttgggcacaaggccaatccttagtgttaaccttgtcggctgtcgctgggccctgttatatgtacccaaaaattgttgttttcctctggaatgccctatttcccaaattttgatgaagacaaagaagatgcaaaagttggattttcgatttgacacttggaaggcgcctagattgacatattgtcaacttgggcactggttgctcggggcccggggtgctcaaaaatcaacttgctctgattttgactctgatacctcaaatatatctgtggtgtatctagttgatgtcccgatgtaatttttgaccattttgcactaagacggtcccaaaaactacaaacctagtcgaggatgtcaacttgggcaccagggtgaaaccctagatgtaccacagagttttacaggttacggttggaaaaattaagcgcgggtcgaaaacagattgatgcaacttcacacgaaataaaaacaggtcaaacacgataggatcagcttaacacgaatttgatacaatttttttaaataataatagtataactatgtagaaatatataattattaaattaatgttgagctaaaaacatttaaatttaatttttaaaaattaaattgaaaattaaaaaaaaatcattatatataaactatatataaatatatctatataagtattctaatagaactttaaatttgttattttctctacaactccaacttcagtatcaacaaaacgagttagagtggatcaacacgaataagacaaaaatttaagtgttgagttaagtttgagaaaattagacccaggtcgacacgcctgacacgaaatttagaagcagatcaattaaaatatgatatgaatacgactagaagacaagttttgccacccctatctcatttattcactatttttttttttttttgaatgtaatgaccaagttcattgacacatacttttttttttaagaaaatgcgttagtattaataagaaagttagaccactagatcattacataataggttcgaaggtaaatcgaaagcctccaaataattgtaccgattgtggataaaaacccatttagtcacattatgagcaaaataattacaagactaagcaacattagaaaaattacaatctgcaaatgttgctataatttataaacactacgcaagtatatgcaatcaagtagtaaatctcacacaggt

SEQ ID NO: 25888 - DNA, 5195 bp, Cannabis sativa
gagagagagagagagaaattgatgtgtcttccttttgcgatcaataatacttcagtatgaacttttcaatgatcaagacaaagtaaatggaaaaaataagtttgatataaatgtaagtgttaagtgtacctagactgttagttagtgtttgttaatatagttaagactggtttagttgctttctttctaactaacttagataatttcatggtggtgtacttagatgatatcatggtctacagcgccacttcagaagaacatcgagaacacttatatgtgaagcaagagaagtgttcattcgctcaagaaagtatcaagttcatgggtcatgtcgtggaacgcgggaggatccgcgtggatttggagaaggtacgggcaatccaagagtgaacgaccccaaccaatgtgaaacaattacgcttttttcttagtctagccaattactatagacgaatcatggagggctatttgagaagagcgacactcttgatagagttcttgaaaaatggtgttgtgtgggcgtggtctgataagtgcgaagaagcgtttcaaagtttgaaagaaatcatgattgaaaatcctgtattagccctaccaaatgtatgcaagtcttttgaagtacaaacgaacgcgtcagattacgctttgggatgggtgctcatacaggagggccaccccgtggcatttgagagccataagctctctaaagcagaaaagcggtatatagcataggagaaagaactcctaacagttattcattgtctacaggcgtaaaagccattacttgttggaatcgatgtttgcggtaaagacagataatactactgttagtcctcacgcagccaaaactaacccccaagcaagcttgatgacaagaattcttgacagaatttaacttctacttcgtgcacaaggcaggtcgtctcaatcagacagctgatgcccttagccgtaaagtagagttggcgactctaaaggtgttagcgagtatgtcagctagctggatgggtacaccaatcaaggaacgcatcaaggagaacttgaagacggacccagtcgcaaagaacatcatgactcttgcaagaaaagcaaagacaactcaattttgggtagaggatgatctcttgtgggctaagggtggccgtttgtttattccaaaagccggcgatctgaggaggacattgatgagtgagtgtgatgacacgttgtaggcgggtcatcaggggtagcataggacacatgcccttttaaagcatgggtactattggccacagatgcaggaggatgtggtagactacactaggaccttctcgttttccagcaagacaaagtggagaggcacaagacgctagggttgttagagcctttgttggtccccaagcaggccatgggatagcgtctcgcttgatttcattactagtctgccaaagacatgaaacttgaatgtgatcttggtaaccatggacagattttcaaagtacgcaaccttcatcccagtgtcgaagcagtgtccggagagacaactcaacttttctttaaacatatagtaaaatactggggagtaccccaaaatatagtgagtgaccgagatcgaagattcactgggactttctggtccaactatttaagcttcttgggtcacaaatgaacatctccgtagctcaattttgtttactctcaacagagttcttcatcgaacaagagccaatttgaagttgtgaatagacaacaactactgttaacccacacagtggatgagtaccacggacggaatctacgagccttcaattttacaaaagactagaaaaagaatacagaaattgaccaagcatacttagagaaagccccacgaagattgaagaagtgggcagatcacaaacgccgaccgctggagttcaaagcaagtgacttagtgttgatcaaactacggccagaacaactgagattctaaggggacaaggacatcagactcttgcgcaaatacgagggccctgttccaattatctccaaagttagcctagcctcctacaaagtcgaactaccttcatggatgaagatacactcggtccttcacgtcaacaacctaatgctgtatcatgaagatctagaagatccagcgcgcaaccaatctaccagggacgacatcaacattcaacgacgcaacaacgaagaacaaaaagaaatccttgccgaaagaactgttcgtgtgaagataaagaaaaaagagtgcatggtctaatggaaggatctcgctgatgacgagatcagctgggagaaggcaaaggatttgcaacaatttttgcagaagactgaagaccatgcagcaagtttgtcgaggacgccgaacaattaagtgggggagaatgtggcgtgctgtcccatgacacacccacaaggggccattttgtaacatgagcatgccttggagcttgatcgttagtcaagtcttgcaccaagcacctcattaagatgggaagacttttgtgattagttttcttttgtaattctattcacatatatataaaaagctaaaatcatacatgttcttcgaaattccttgaaaccccattaagctctttaggggggtgacctgatgacttatgaagaaaatccataactggaaaagtacctggtgctgcccatgtgtctccggttgaatcactaggcaatggtgccagccaaagaatatttcgcaagttcattgaattatcgtatgatacatttgatcctgaaagaaaatggaactgcgaaacatgaatgacataaagaaatcaattttcagcttgttttatcattgtatttttctagtttccaaatccctttgataaagaaaaaaagacatagtcatctaaaccttgcctaaataaagtaatctctagaaaattagaaagttgaaaattaaaagggaaggacagagttgagtaaacccctaaatttagatagaggatgttatatactgaagtttacctttttggcaataacccatattgtaagggaacacttttttgtcaaatgctgggtactctttggcatggaacctgcaacgcaaaccttataagtaccaagaacataaaggaaattgaccacaatgatgccacttacaatataccaagcctgccactgtctgtggcgagaaaaatatgaccatgaaaaaagtcatatctattcaatgatgcattcaacccaacagcaggagctcgagcaacaataagttcaaacaaaaatttaaggtacaaattcaattcctgcaatttggcaatgaaaacacaccactcattcaacagtgcatgattttggtagagtgaaatacattttgttccatagatgcaaacctcactaataaatcgaaacccatatggagttcgagttagttgacaacggtcttcattcgatccttcaacatcaggtacctattacattacaaaatgaagcctccttcagtgatttctttccttattaagaacaaaacatcctttttcttcttctttttcttttaaaaaagaaaataaataaagaacaaaacatatcctttagttagcaatgtcataaagattaacaatgtcaagcactaccaatgtgtattaacaaacattaatcggctttacttaaattaaattcagcacaaaaactcaatgtgtggattggagtgattatatttacaaagaattcccaaacagaatatgctggattaactagctaagacaaaatgtcattaccaactgaatcaatgaagatgtcaataaaaagtgaaaaaaataaataaatagaaagaactaacagggatcacagtggggtcaagggctcggtggatcgctgcggaatctccacgagaatcgaaagcaagacgagccaaatccaacactgattgtggaggccaccatataagctcatcctcctctctacgtaccagaactccatttctgttcgagttcaagctctttcgatgcgaacaacttatagggaccattttaatcccattgggggtaaagggtacgagaaatttgaggcaagaattgagttcgcgagatacaagaggattgagcgttgaggaactgcgtctatcgctgagcagagtaagtaggtccgaagtagtggctttgggtgtttttgaaggtgaagaggatgtcgaaaatggtttaagaggagagagcggtgacgatagcgatgagaaggagtaagcggctgacatagatagagagaagatgatggttaattgaagagagagaggtgatttggccattgaatatgtcctcttctcttctcttgtcttctcagggagtgagccctggttcttcgaaatagtagaatattagcaataggtgagagtcaaccctgaggtaggttgccatggctttgagcagtgaatgtaaattaaaaataagaaatagatcaactgaaagaagcaagatgatgatgatagtggctgccgtagagctgcttacttgggccaaatatttttgtgaaatttgtcagtgccatgtggattagaactccaaatgagtaagtcaaaaaattataatcactccaaccacaacaccaaaaacatcatacactggaaaaactcttcaaagtactgtctaatttcgttaagttctaattttgcctacgtggcaatgacaggtcactaaaaaattatcctccatggccatatttttcaaaataaaaattaacatgagtaattaaaataaaaataaaaatttaaaaatataaacaaaaccctaaaatttgtaatagacatctgaaaaaaaaaattaacagagaatattaatcaacatgcttgttactaaatttagatcctggtaaaatattcccaacattaagttactttcaaaagcaatgaaaaacccttagattgaattaacatgtgacttttttcaagatatgatatttttttgttataaattgcagccacaacaaaacaaacttagccatattcaaatgtaaggtactaggtgactttcataagtaataaaaaactctaagattaaactaacatgtgactttttttttcaagacatggtatttttttgttataaattatagtcacaacaaaacaaactcagccatattcaaaagtaaggtaccaggtaactttcagaagcaataaaaaaccttaagattgaactaacaggtgatttttttcaagacatggtaatttttttgttataaattgcagccacaacaaaacaaactca

SEQ ID NO: 25889 - DNA, 1390 bp, Cannabis sativa
tataatgtgaagacaacctttagttgttgacactccagtggagtcctcttgcaacttattcaaggaacttcgggtattgactttgctaatatttgattgagctgcatcaacataattcataaaatcgataggaaaagattagtttaaagaacaagaattataaataagtatgatgccttttcatgatatctttatatgattttcccttttcagtttcattttagtgtgggctttttttggactgcatgcattattttgccaatgaagcaggaaggtaagaaaaggattgtctttatcaatcttccttcctttaaaaatttcattaaacagaagagaaacatacctgagtatacttcacgagcatcataaccatctcctaatgatgttctttgctgcccatagttattctttgcattaagactagcctttctcgttagattgtcagcatcatcttcaccttcggaaaaaactgatgggctagaccaaccactgatattagcatctcctttgctctttcgggcaaacttcaatagtctctttaatcctttgggtgcatctttctggtagattattgcaggagggttttcagcattaccccattcaataatatcaggttcattactctcctcttgcagcatttgggacaaagaatgacgcactcgtggacttgttgatccaattggtgcagcaacggtagaagtaggctgacatggcctgtcatcacatgggggcatggcttgatgttcttctatttcaacccaggccgaaggggagattattgcttctacttcagcttgagtttctgttgagtctgtgacatttttgggcaaggcatcattacattcagcagggactgagtcaaagttttctgccccattattacattcatgccagctattttccagagcttctgagtccatagcagcatcttgatgaactactaccatgacatcctcttcttgatgctgactcactgtttcagaaacatcagcaaccacctctgcttcttgcttctcaacaatattttcgctgtttctaagcatttcttctgattgaggagaacttttagtcttgttaacagtggcactaacaccaggagcggtcctagaacccttgcggagaaaaggttttgtttcgactggaactacagtaccttttttagttaccctgctatataaaccaggctttgctggaatcacatctgaacaatcctcagaaggtgtcactacttttgttttcgttggtttactagtcttttttggtgcttgctgttgcttatcattaacagctttcacatttttcaagcccttgccactattagtcagagactcccttctttgtggctgctggggcctttccactttggagctaggccgaggaagtgacgact

SEQ ID NO: 25890 - DNA, 2046 bp, Cannabis sativa
tcagatattgtggcaagagaagcaagaatgaagcatctcctcgctgaatactaagaaggattacagaaggatccttttaatgaagagctgcaacacaaagtgaaagaaaccacgaaagcttatatcaaaactcagaaagaaatgttttcttttttgcagcaaaaagctaagctcacctggattaatgaaggggatgaaaacacttctttatttcacaaagaatcaaagaaaggagaagacaaaaccgaattctttctatagaaactaaagaaggaattagatgttaagatgcagagaaagtgactgaagctttccttgattactacaagagcttattgggagggaagatgagtaatagaaggaaagtgcaaagaatagttatggctcaaggtcctttggttacagatgaacaagcagttatgctgcttagggagtttacaaaggaagaagttagagaagccttatttgggattccaagaatcaaggcacctggcccagatggttactcaagctacttttttcaggagaactgggatatgctaagggatgatctctttggagcagtctcctcattttttcagtcaggccagctacttaaagaaattaattctactgttattacacttatccccaagattaagtgtccaaacacagaagtgacttcaaacctatagcatgctgcaatgtcatctataaagtagcaacaaagttgatatgctccagactcaaatgtatactgccagatcttattgctcagatccaaggggggtttgtctcaggtagattcattgcacacaatatcatgatatgtgaagacttaattagacattttgggaggaagacaaccaaaccaggatctgtgattaagcttgacattcagaaagcgtatgatactttagattgggactacttggaagaaatattatatgcttttaagttcctacacaagtttatccagctagttatgacttgtgtgagaactcctagatattctctcatgttcattaatgggacaacgcatggctactttgaagctagtagaggactaaggcaggtggaccccatgtcccctcttctgcttgttcttggaatggaatgtctgtcacggatcttgaagaaagtaagagataaggaggaattcaagttctttgagagatgtacaaatctgaaactgaatcacttatgttttgatgatgatgtgattttgtttttccatggagattttagaagtatctatagcatgttgcaggctctgaagctattctcttgctcttctggacttcacccgaatccttcgaagtcagcaatttattgttgtggcatggatgaaagagaaattcagagagtagtggatatttcagatttcagtaggaaaaaagttccattcaggtatcatggcataccaatttgtgctaagaggatatcaagtaatgagtgtgctaatctagttgagaagatgacagcaagaatcagagtatggagttccaggagcatctcatatgctggtagagcagtccttattaattcggttctgttgtccatacatttttattggagtcagataatgattttgccaaagaaggttataaagaacattgaagctatttgtagagcctttctttggaaaggccaacacttgatgcaaggtgtggggttaatagcatgggattcagtctatcaaaccaagaaaacttgaggcattggcttcaggaaagtggaagaatggaatctggcagctataacaaagtacatctgggcaatagcaaataaagaagacaatttatggatcaagtggatacataatgtctatctcaaatgttcagattggtggagcaacaaaactccaccccaagcaagctggtattggaggaagcttattgcagctaaggaggcagccaaacactccttggactacgagcagctgatgcaggagaacaggtaccagatttccaaagcatacaaactgttcagacctgaaggagaaagagcaagatggtgccaaattgtgtggagtaggcagaatgttcccaaacacagcttttttct

SEQ ID NO: 25891 - DNA, 3046 bp, Cannabis sativa
ctcgcccgtaagaaaattttgagaactttcaacatgaacttcaatcaaattaagggtgtcaatgagattttttggagaaccaacctgagcaataggagcaggatcggcttcagaggtggagtgtgtaccacggttgttagtatccatggccattgacttctttgaacgggatcctttccttcgacgcttgtcgttcttcagagatgaggatgaggcaccagagcccatcttgaaaggggtgttaggggccggagagaatttaggaaggtctggtacttcagttgtaaactcaatggtgttttcttctgtatgttggacacacgggatcaaagttaaactggcctttcgctttcggggttgaggacaatggtgtactaagtccgaaacatcaactggatcatgaaagagtgtaggtattggttccatcttatcaacaggagctgggcccattaattcttcagccaatccaatttcttcagcatagatgggccaaggaaagtgggtgggctcagggtgtttatggggctgcctagattgacaaagctcaacatgggccttatccaccatttgatcataagtaggcccaatgttggccataatagttgtaagtatgccactatctgctggattaggaggaggcctagaagagaacttttttaatatatcctcatcagataaagtacctttattaccttgagaatgtcttcgcagtggtctaggtgaaactgatcttacttttctttcctttccaggatttccatgccgttgaacatcacaggacataactcccttgcctttacccgttggtttgacacttgaactctccacaactttcaaatttttgccaaaaacagcacctgggccactttcattgaccctgattaccttcttctttggtttgcaagctgtttgctgcaggttctggttcccatcactgccattgataggtctttttccttcttttttggactgcgagccagccatggtaggtgtcctcgtcggagaaaccgtccgacctccatcttctctgtaaaaatcaagttggttgcgcgtgttgaaacaactaaaaaacgccgtttcggccttcatccaaggtccataagctggaaccgcttcaccttgaggagggtatgcataagcagtcgtgcgaaagcaagatttcttctcatgaccaaggtagccacaattatagcacaactttggtaatttgaaataacgaaattgtatccattctttcctacctctctttatgtcaagaaagaaacctgatatgagttggaaagaagtattaatttctacttgaaactttagaaatcccctccttgtaatggtcctttggtttgccaaatcacttcctatgaagacccctgctttagaagcaatcgttctggtattgacagcattgagatacggagtgggtaaaccagaggccattacccaaaaaacagacttccccatatccatgttgtaccagtccccatcctcgggccactctctaatgatcaaaagctttccgttgattatccatggtctgtttctgagaatggctttacaatcctcttgtttatcgaagaaaataccccacacccctggtttcattgacttgagcttccaaaatccttttagcttccaaatctgactgagaatttctcttagtctagacctggatacaccattaccacccaaaaaactcgccaatacaccagtgtttaccacttcagcagtaagttcaaagtcaggttcaagttccagtgacattgactccaagaaattgttacgcaaggcttcaatatctccttttggctcattgacattattatttgtagtggagtccaccaactcctctgctgtatcattaagagttgcatccctatttactacagaggaatgaggtaggtgggaaggaccttccacaaccataccatcaggggccccagcaccaacagttgtttcctcaatcatgggttcacgagacacaccaccactatctcccatgccttaactgagaagagacaaaagactttttaatggaatagtgctagaaaggaatattgcgaaagaatcgacaacttttagaacaggacaagggtaggagagaacttttaaaaataagaacaaagcaaagcttttaagaattctatagactggtacacgaattagcttgaaactagccagaaggtaagggattgaagagacaggactgaaaagacttcactgtttggaatagacattcaagtcaagttggacattccaacactctcatttgagagaaaaagagaaccccccagaggcataatggtgctgattgaattttcaaggagaaacacttctctcaaactttgtaaatgactttgcacaattttataaatgactttgcatttgatgtgttaaaaggaaaaagcctccatgtaaaaaaataccttaaaaaaacggtacgagcactctcagcttttttattctattctttaaaatatatagcgaaaattttacttttttattttacttcaaatttttatatgagtaatttgcagaataaattaccacgtagcaatctctgattggtccaagttattaaatttttatttttgttaaaaaaaaataaaattagtttaaatataccaatagaaaatgtgacacgtagataatgatttgacatttaacagccagatacctatggagttccaaaaatataacttaagtaatattactgtcaaaaattaaacttatatatttatttacaatcaggaattaaacttaagaatttatggcacatattactctattaatatttatacatatacctatataaaaaaaaaaaacaaaactaaaactatcaaacagttaataaaatatgtttagagtaataaataatattctataaatgtagagcatgtttaaagaagctttaaaaaagaaaaatttagatcatttgatataacgtgtttttaatttagttctttaaatattataaacaatctctattttaaatcatatgatgtgatgagttttttttcatctcaatattttgtgtttttctttttttttt

SEQ ID NO: 25892 - DNA, 3876 bp, Cannabis sativa
  modified_base (3812)..(3819): a, c, t, g, unknown or other
gcactgcccgccggtttaggaaaaattcaaaccatgaccgcactgtaaagaatttcaaactgcatttttttactgtgtgggacaatttgacgatttgatgattacccctagaaggaaaggactattagcttaaagcagtccgggtacattaagaaaattattcaaaagttccacacggaagaagcaaagtatatctgttctgttagggaatcaatttgttttgtcaaaggaatagtgtcccaatagtatgaaagagaaagaagaaatgaaggatgtatcttatgttgtggttctcggatgtttaatgtatttgatggtgagcacaagaccgaatatagctcacgctctaagcatcctaagcagattaatgtccaatcttggcatcgaacattggaaagccctcaaatagttattaagatattttaagggaacttaggattatggtctgacctatgaaaaatctaaagaaaaattacaattgtaagggttcttggacgcggactacgcctcgaatatagatacgagaaaatcaaccacttcttacattttcatgaaaaaccagaactatatatgctgaaagggtcagttatagtctgtggttgctctttccaccatggaagcaaaatttgtggcgactacggaagcattcaaggaagcattatggatttgggaaattctttatgacttgaaacaaatcaaaggaggagtgactgtgtattcggataaccattcatctatccatctttgtaagagcccgatttatcatgaaaaaagcaaatatatagatataagactccattggattagagagaagatagaagaagggctggttgatttagagaaggtcagaacagaagataatcctgctgatgttgggactaaggtcttgacagtaaacaagttcaagcattgcttgaacttgatcaatctcagaagttaatactaagattcttggagcaccaaccatgatggctgcattctttcttcatcatcgtcatattattttaatttgaaataattaggtgaaatttgtggtatagttccttcaaatgaaaagatctccacgagttagtgtcattcatggaaagtcttcactcatggaagctagtcctggaaggcttttatgtccttctgggaaatgtcttcaggaatagctagccattgtctaggatggagttccagttggctagctattcctcctagaaaggacgttccagacagtcgactctaactgctctatcctatctggatgctcttatagtgagtacctttggtctatgatcccgaaagctcatatattttttttcggtacactttatgctgacgtagagatctcactaaaatgagagtttgttaagttagttatttcctaactaacttaacaacttcaattcttgcggccaccgactttaggatcttgattctaagtctatatataccatccacccttaagcatttgaagaagacgaacatcagatggttcagattgagattaagagtcagagagagaagagattgagaggtagagagagagagaggtacagagaaaagagagagattgggtttggattttgtaagaagaatctgctgtagatgaaaaagattcttggataaggatgtgagagttgaaacactttgagaaaactcaatagagaatccttctcgaatgtattgtacctgttcttgctcaatcaataaaaaagatttggtggtgttctagaactagagtagagccatatatcacatcgatctatcagacttgagccaatatatttcttagtgttaattttttttattttatgcctttattatttctggttttctatactctattcatctctatttttctccaattactttttgtgtttgttaaatctttctatttttctccaattactttttgtgtttgttaaatcttgtcgttgctaattgtttgattgtttaaagtttcattgagttgattttgcactgttagtcgtaatttttccacaagatctaatgcattatgttgtttttttatttagctttttggtccagtaatgaattttctcttgttagagatctgagggtttatatccatgttttagttctttaccttccatttatggtggtatggtacttgaaaataattgactttgatggacatttgtgccacgattggtcggtctattggccttgttaccatgtgctcgctcttgttggtattgatttgcttttgcttattgttgagctttgtaatggaatttgtcctttggttctttgttgaatgaaaaacttagatcttttcctaaaaaaatagaaaaaaggagaacccaccatcggcgagactaaaccaagttcttcgtcaaagcctcactaacagtatcaaccttgtcttacaactaccaaccaccaccccatcccatctctctttatcttctttgttcaaaattcgttggagcccaaaagcttcaattacacccaaagtaatattttttttaaaaaaatataattggtattatattataaaagtataaagtttttttgattaaaatatttgtcattaattttgggtgtctttatctttaattcgttagatctgactttctgcatttttctattgtttcgtttaatttttcaatggttttacctttcatgatatatagtgtcccaagttagggacgaccatatatgttaatttgacgatggttatacgattatgttatttatttgatattttttcgataagtcttcgatagaattttgatatttttcgataaatttatcaaattgcttcaagcttgcatttctaatagatttccataaaaaaatattaacattttttcaaaaaacctacaaaaatgtaagtttttataactctgacaaaattgatcgaaaaaaatatcgaaagcctatcaaaattttaattaattttgttagatttgcttaaaacttaaatttttgatattttttctatggatatttatcatgcatgcctgaagcaatcaatgaaatttattaaaaatatcaaaattctatcgaaacttatcgaaaaaatgtcaaataaataacacaattgtataaccattgtgaatgatcgtatttggtcatccctaactttgtattggataatattgtcccaccggatcaaatgtaaaaatattgaactatatataagaacatggactactccactcatcaccaattagttttgagatggaaccccatgattttgaacatggtatatcagaaccatatccctagcgtacttttcgatccacacctatcaaaaagttagcgagccgcaagcgagcaaaatggtactcccagtcttgaacaagaataagcgagcaaatggaactcccagcagcaaaacaaataaaaataagcaggcaaatgacactacttatgataaggtgattcaagattagtgaacaaaaatagccagcatcttgagagggaatattggacaatatgtcccacatggatcaaatgtaaaaatattgaaccatatataagaacatggactactccactcatcgccaattagttttgagatggaaccccatgattctcaacactttggaaacatttcgtgaaactatcgaaaattaaacggaacagtaaaaaaatcaaaaaattatataagttcaaagataaaagcaccaagaatcaataacaaccatacaaatgtgatgcaaacaaattatatatttctataatatactaccaattatatatttatattaaaaaaagaactcattactttagttaagagagagatgggtggaggcggtcggtggtggtaaaaccactacaagaaatgtcacttnnnnnnnnacatttttgtgctggcaaaagttggtattgcgttagtaaaataaaatttacttgtga

SEQ ID NO: 25893 - DNA, 1541 bp, Cannabis sativa
  modified_base (57)..(59): a, c, t, g, unknown or other
taaatcttgtgaaccatgcaacattaaatgttattccatgcaacattaaatgttatnnntgatctatattaataagtaagtctttcttaactccttcttgtttcttctaattaaatttaaaatatatcccttatctttctaaaaaaatccactaagttggatgactaaacttatattgaaaattaccataatctccttacttcaccattaagtattcttgataactaggggtaaaatagtcataattaaatactccacataatcttgatattctaactgttcataaattttgtcccattaaatttaagatactaaaccgtatcaaagtgacactaatggtcaaatcatcgaatttctagtgttatcgggcataaaatatgaaagtatcaatttttataaataacataaatggtacacctagtattcaataaaatctttgtaattgatatatatttgcaatgtatatagtgtatatatgtgtattgtctaacatatatttaatcaatctcttttattgtccttgtattatttttacaattgagttgtatatatcttggtttatcttctctcgtaataatatctctaacaaggctttcatatgttcacgggggcaagtttatgagaagtgtgtacatgtgatgcatatgtgagacaaccatagttcctgaggtgagcatactgtggtggtttgttgtgaagtaattcaaaaggttttttgtctttgagtatgtcagaaggagtgcaattaatattatatgcaatagtgtgtaccatttgaggccagtattatcatggtaagtttgattgaaaagccaaggcacgggcaacattgaggatgtgttgatgctttctttcagcaatagaattttattgtggtctacctacacaagcattaaaatttatcataccattattggtgtagaagtttgttagttttaattctctagcattgccagttcttacagactttatgttgagtttgaactgaacattaacaaaagtaaatttttttcaatgatttaaggagcatcaaattttgctcaaaggaagtatatccatgtatatcgtgagtgatcatccacaatagtcaagaaatatttgtacccttcaattgaagtggtgggataaggcccacaaatatctatatgtatgagatcaaatatagttgtagaaaactatcaaatataaaagtctgtatgtttaaataatcttgaagaatttattaaatttaattggtccatcaacacaccaaatgtatcttctcacatttctacaattaatatagaaaatatgaaaattaaataagttatgacttcttttttaaaatgcttaaaaattatgagagttttttttttttacaaaaaaaaaaagaaaaaataatgccaacaaaaattattttatctatataaccctgatggttatagtaaaattaaccatgatggttatattttttttataacatgctataataggtcactaacatgtaagaattctatttttagactcaatgaaagcaccaaaatgttgactggatttttagc

SEQ ID NO: 25894 - DNA, 1726 bp, Cannabis sativa
aatatagttttaatttataaataacacaagtgttctgggatttcatttaattgtcaggtttttcagaggttaaggctgcttgttgtggacttggaaagcttaaagccgatgtttactgtctgccagtttcaaaagtttgctccaatagaagcagccatctgttctgggatgcaaaccatcctacagaatctgctcatcgcctctttgtggattacatttttggtggcccttcaccatacacattcccactaaatgttaagcagcttatttccacttaaattacatctaatatttaacaatagcatgactagctagtttatcatcaacctctttcttattttatgtcattatattttaatatttttacattactattatccatatagtactttatagttgtatctctccataatttacctatagtaatggaacattattgttatcattgacaaatatgtacacctaaatttaaagtgtgtttgttgattagtccaattatttccccatggaattgactacactagcgtaaataataaggttaattataaaattttttatttttgttttataaaagttattaattgtgccttctattttgttaaatgaaaaacattacaaaaaatagttagcaatttagtaatacttgttagtcacaatattaattttttgtggctaaatctgacttttagtcacaacaaaaagttagttgtgactaaaacatagtattaatttagattaatgttattaataatttagttttagtcacaacaagtactgtgactaaaaacgtatttagtcacaacaaattgtaattattgtgactaatacttttagccacggatattttagtgacaccatagcaaatatgatgtataattagtcacatattttttttattttaaatcacaagttttgttgtgactaaaagtaagaatttttgtaatgaaaatagaccaggtatgtaatgaccgcataaataaattatgtgaattaacaaaagaattaagggattttaattatattttatgagtacgtgtttcctagtagaaagttatggcttattattagaaacaggccttaggaaaatattttttttcaattacaaagataaatttgaattctagaggtaatatacatactatatatgaaattttatgttttccatgttttatgcccggtaataatagaatgtgacgatttggctattcgtatcacttggatacggtaaagtatcttagaattagtggggtaagatgagtagacatttagtatgttgtgaatcactggagttatgattttggaccaaattaccactaggattataagcttaccacatgaggaggaaaagggtaaaattgtcattttgttataagttgataatggttatctttagtgggatttttagcttattcctaaggctttaatgctaaatattgtatttaattaaagataatttggtattatctcaaaggttagaaaattggaaacaaacccttatctttctctctcccaaggttcggcccttaggaaactcaaaagaaatcaaattttctctctttattcaaaccaaattttatagtgattgcagcaaggatacaagtattaaggaataacctaaggtaaactaaaagcgaagggcgctttggggctactgtccttgtggagtaattaagataattcttgatctaactcccttttcattcgaagcaccgtaaacataaacctt

SEQ ID NO: 25895 - DNA, 5740 bp, Cannabis sativa
gttgtaattgtaaatgtaatactgctattcattcatattaaagggtaatcgttttctatgccaagtggggtttttattggcactttggtagttgtagattttcatctgcattaaaggttattttattaggctaaccatattatatgcagctgcaagagcaggattacagtcaaaggtgctttaattttgtggattttcccaccaagatatagttttttctgcattaatgaagggttttccatgatttgaaaatactatttgaagaagggtattatctgatattagagtttatggtgtacttctgacaagatgagagaaaattattgaaagggacatgatttttgtagaataggatgattggacttttcttattgtctttctatttggtttcgtttctacacatattactgaaaagtttttgttattatttcttttatatagttatgtgcagcttttttacttgaaactttccataaagtagctggtactatgcatttcttttacagggaaaagaagattaaaggatttattgcatgaaaaagataatcgtgtatgtgctgattgtggtgcaccagatcctaagtgggcgtaagttctgtcaccttgatacactgatactgtatgttaactgtgaaaaaggtgttttctgtcataaagtagttctgggaaaagaggtggatgagtgagaacaactaaaaattcatgattttatcctatgttcttctccatgtgaagtttacaaaagattgactgcatttccaggtcagcaaatattggagtttttatatgcttaaaatgctgtggtgtacacagaagccttggttcacatatctcaaaggtaatcccttttatactggctggctcaccttgtgtattgttatagttatagagtaagggaattattgttgttataaacatagtaagtaacaaattttatgtacctttttgaataacatgaacttgaattcttcaggtcttgtctgtgacattggatgaatggtctgatgatgaaattgattcaatgattgaagttggaggaaattcttctgctaactcaatttatgaggcttttattcctgaaggaattaaaaagccaggaccaagtgctagtcacgatgagcgttcaaaatatatccggtgagctcaaacttattttgtcaaacatgacatataatcttgaactctacgccatgatgaattcagcttatagatcttctttactcttaaagagagtacttatcaaaactgtaatacttcacataggtcaaaatatgagcttcaagaatttttgaaacctagcttgagaatttcatccatttcttctgcaaagacctctcttcaatcgagtttctctaggaagcttatggatagttttcggagttcaaattcacatagtttggtaagtttgttattgccttagttgtttgtcttttgtgatggttccctagaataatgttgatgttgataagatttgtacattaatgattcactttttcatcaaaactgaggatttcaggcacccgggtagtttaagtcatttatacttatgtggtatttgagcttttcattaacttgactggaccagcaacagtcttaaccatgaaaataagagatgaaacttatcacattatttgtttctttggatttttaacgataattatgaactttttggcagcttagcttctgtacaactgaccgtcgttgaatataattacaggaaggaatggtagaatttattggtttattgaaggtgaaagtgataagaggcaaaaatttagctgtcagagatatgctgtccagtgatccttatgtcattttaaatcttgggcaacaggtcttctttctcttccctttgtcttttttgtagttgtaactactcttaacatatctgctctaatactaacattttccccctttaatagtactcaaccctgtgtgtagtgtgcttacaatgtgtacgtagatgaaatatagcttcttttatgcaagaaagaaatgagcagagtgcaataaagcactaataatggttgtggttaagaaaaatggtagttaaagaaatggaggcataaccctgattatgtagcagttgctgcataatccttatgtctatgcttccatcaagtgcatcgctttcacctacgttggttttctatacttatactcttaggctatgtttggaagttgaattttggcgaggaaagaaatagataaggaaaatgtaggaaaaaaaaagtggaaaataaaaaatagtaaattctcatatttagtatggaaagaaaaattgtatagaaaaacactctattcaacaaaattttccatatcaaacttgaaaaattgatttatttttttgttctccacgctttttgtttcctacatttttcctacctttttctttcctcacgcaaatccaacttccaaacatagccttagggtacgtttggttgagggtgatgaaatggaaaggaattgtttttcattcttttgtttggttccactccattgaaataatttttttttactatattatttttattccattcttattccctttgtatttctcattcccattcctctattttcattactcccaaccaaacacacccttacgctatgtttggttgtgagtaatgtaatagaacagattgaaatcaattcacacttctttgtttggtttcattttaaattgtcaaagtgttatcttcctataaatggatagaaaggtcattcctatggaagatgaagaagaaaatgaattacttttttgttgtcggtttcattttttttttcttttttggtgaggaataacattattattagttagttagaacaagagagtacaaattagaggagagattcctctaactaacataaactcattttctagccaaagtgcgtgcaaaaatattctcggaaatttatacaaaagtttaaaaatatttaaagcataggttgaaaattgttcaaagccaaacaagcaataaggaatcaaattgctcattccattcctttccactcttattaccaatcattctgtgagttaaggagtgccttcaccatgtcatcctcatcaaggaaggctcattgtgtgatccactatttgcacttcttacattcacaaaactggaatcataacctcccggtctgttgcagttagccttacgatgtgcccgctggaaagtctgccatctcgatgggattcccttttgcaggcttctcctcaagccttcgagtgtcgatcttcgcttgggcctcttgcagatcttcattttgaacctttgcatctactatctcttaaaggatgaaccatgtcttcaccaattttcattactcccgaccaaacacccccttaggttgtgtttggttagaggtaatgaaatagaaaataaaggaaaagaattcattttcattctattcctatgcttgattgcatttgaaagtatttgaaagtactagaatgtcatttcaatagaatgtcttttccactattttggtggaatgactgttccattcgatgaaaaaaaaagttaataattttttttatcattttaaattttattccattcctattctctttcccatttatattcttgtgtattcattccttccaacgaaacgcaatgtcacgttgaattttatcactccaacattttaagtgaaaaacatgagaacctgaacaatagcttagtattagttggaagccaatttattcattagctgctataaatatgatttaattgtttcgtgtgataagagaatcatcttcataagaatatttctatcacctttttatcagatttttcaagctggttttgttgttgttaaataattgaagtttttcgataatttagatggccatattaattgtgtgatcatgataagttgttgatactgcagagtgttcagacgaccgtggcaaagagcaatttgaatccagtctggaatgaggaacttatgctttcggttcctcagccattcggacccttgaagttggtaagtatattttatatgtttttcaaatttcaaatttgtcagacttgcttttctctatgcttgtgaacgcaaaattaatctacatgaatctaaatagtaagagaccccttcttgcttgtgaatagtatggatcgggagcttaggtgttttcttgttgatttccatactgttgtttctggcaatatatctcaacccgttcacattgcatttgtagaatatcgaattttttttaagtaagaaaaattttaaaacagttctaaaaaacctgtgtcaaacactattaaatttttaaaatgataaaaaattattttctattcttacttttgaaaacacaattctgaaaactgaaaactgaaaacacagccaaacaacttgcatttgtattctttagaattctttgcacatatgttttattgatgactcaatactgtgatcaaatcttagtgaaaattgtgataatcattggtctttcgatgttgcagcgggtgtttgatcatgacctcttctcagcggatgacataatgggagaagcagaagttgatcttcaacccttgataacctcagcaatggcattcggtgatgcgggaatgtttggaaacatgcagattggaaaatggttgaagtcaagtgacaatgccctcatagaagatagcactgtcaacattattgatgggaaggtaaaacaagaggtgtcactcaagcttcaaaatgtggaatctggagaactagagctagaactagagtggatgcctcttgaacaataggtacatatcttgttattttttcgattttcttctaataagaatttgtaacttcaatgatgaggatattcgcaggacaatggaaccgaacaacttaccttctttttcttgtatttaactatttataacctaaaatctctcccccttttctctttaagttactcagattttgtccaatgatgaagatgaggttgcatgtcttttccactttgtgtttgttcttgttcattattagttctgtatttgaatgtacatgagaatatttaggctatatgctaattgctaaatgtgctttgcttgcttatatgagaagatctcattacctttgttctgattctttttttgtttgtctctttttctttgaacccaacaaggtaaggtattgaatagaccacatttccaaaagtaaatgctttgttgactatacttaggagcttttgacagaagtatgttttggagttccactacttttattttgtaattttctacagtaaaaaggtgcttttgacatttgacaacaagccaaaattaagtactccaaaatgaaatgattcttaagaagaggtgggttgtgaagattatttgtttctagcaaaaaagaaaaaaaagtaaatactattttagatctgtattttgcaaaagttagtaaatggattttctgttttgttaaatgacaaatagattttatattttttaaaattgtacaaatagaaccctgaattgatttttttatcaaaataaaatttaataataatttaatctaaaggttatgataagactaattacattttctgtatctgtttgtgttaaaaattgttttaaggttgattatattaaaaaataaaattgctgaaaattaagtttatggttttatttctaccattttggaaaatatagggtttattttatcatttaataaaatagaatatctaattcataatttttgtaaaacacaagattcaaaatggtatttactaaaaaaaaaaaaa

SEQ ID NO: 25896 - DNA, 3159 bp, Cannabis sativa
  modified_base (49)..(71): a, c, t, g, unknown or other
  modified_base (1243)..(1244): a, c, t, g, unknown or other
  modified_base (3052)..(3062): a, c, t, g, unknown or other
tatcaaccattagatatttgatccaatggtcaagaataaaatatccatnnnnnnnnnnnnnnnnnnnnnnncatacccatatatatatatatagagattaattgattgattggttaatcttgttataattatatcaccattttattatgttattaatagattaattttagtcatcattgttaaaattatatttttgactaaatcaattatattaagtattgtgacaaaaaaaattaataatttattttttattttttattttaaataaagttaatgtaaaatattttattggcatatttgataaaatagacaaaaatattgtgtgtggtattttcgaaattgactttaattgtttatcatttattttcaaaattctagtttccttttcttgtgtgaaaagacttttcaaaatcaaatgctattcgtatttgactttggtcaaataaatatgtgttttccctttatataatatttgattttattcttttctttttaaggaaactcttatttatttgttattttttatctgatttcttgaccaagaaaccgtgtactgctatgagattgaatgttgtcagagttgcctcatttatttatggaaactttgctgaaaaactatctaggttttttgtatccatttgaacggactaactatatgtttaaatagattttttactttcctttttgggaacattttcatttaatgacctgatcgttttttggttatttgtccacgacctagagggtttctaaattgtatatattcattctaaggtcactggtctttttgagctctcttggtgtatcaattctatattacttttcaaagttagagagtatttttcaatgttgtgtgaagaacttgagtccaataagttcttagtattttattattgtgtactctgtattgtttcttgttgaaattgtgcaggttgaacacctaggatattgttaatcaagctttaggagaagtcttattcgtgagtcaccttttcggaaggaaaaagtgcatgtgagccactcttcaggaggaagatagcaagtgagtcactcttcaggaggaagattgcaagttagacactcttcgggaggaaaattgcatgtgagacactcttcgggatgaagtgtgcaagtgctacgaattgaaggaagttcaaggtctctgcacttcaaaaatttgattagaagaattggttacaacaattgcggcaaattcaaagagggagtctttatttgtataagnnaatttagttttgtaaacacttgtgattcatctaataaatttctttctctgggcgtggcctcatggaccaagagaaattcgaaagagttgctgataccacgtataaaatgttgtatcatttaattttctgtattttactttctacagtatatttatgttctgtcagaatttgtgtctgatataatagagacaaattctgttcaaataattttactacaatttcacattatttaaattgcagaattgtagtaagattgtttgataatttcacttgataattattaaaaacagaattttaattacatataaagtttttataataaatcttaataaatgaatactaaataattattctttaataaaaaaaataattattatattttgttttgtaaaaaaattattctaactatttaattaatttttgaaattttttattttattttttaataacatgtgatattataatgataaaagtacatgttggtaaaagaaaattataaagtaattacagatataaaatatggagataattgcggtaaaagtttccaaaaaacttagggttgatgcagattaatctccaacctcaaaaattaacagtaatagtccccaaggtcacattttctgtaagtcagttggtccctaacttaagtgatccgttaaacccaaataaaatggcacgtgtcaatttttaattggtcaataataatttaattaaaaaattttaaaataaaataaaaaactaaaaaatatattttaaaattataaatttattttattttattttatttttctttttttttcctagtcatcttcttcctccaaccacacccgactcccctccccatctcatcttcttcctccagccacacttcgacccccacctcgtcttcttcctcaacccctttttcttctctctgtgcgacggtgtgtgcgggtctcacgtggtggtgtcttcgacagagatctctgtccaaagcgaagggtaaatgttgtttttctttttctatactcttaatttttctaggttggggttttagaattaggagttgggttctattgtgctattggggttacggtcgtgggttgtaggatgagtgggttgtgatggatttgaagttaccttccttcatcatgttttttcttcattttttaacttcttaaacataataacaacatgcctttcgattgttgatgtggttgtatattttttcagtgtgaatggcggagagagacacccattaacaatcaaactgagtttctatttttctaagatttgaatatattgttattatattgggaatttatatatataacatgcaaacaaagaataaattcccagaaaaaatgcatctatttctaattaataaattaacccttttttatctttctatgccgccgacaaggcctcgtcgtcaaaaatggaggccactacaagcctcaccgtcgttctttggagtcaggccactatgaccttcactgttgagtcaccattaagagttcgccggagtaagtgtggttggaattgagtgggtgggggtgtggctggaagaaaaagacgaggtggggagggggctcgagtgtggctagaggaagaagacgaagaagaataagaagaaaaaaaagaaaaaaaaaagaaaagaacaagtaaaataaatttataatttaaaatttatttttttgtatggcattaaaataatgaaaaatataaattgtaaatcctatacaaagtggccggccatattagtgaataatgggcctcacattgcaattttgccattttgttatttctcaatcccattttctcaaaannnnnnnnnnnccaatttaaccatttaaatgtcaagtctaattatataataactagaaaataattattaaataatattgtcattcaatatatttattaatttagacat

SEQ ID NO: 25897 - DNA, 2317 bp, Cannabis sativa
  modified_base (50)..(67): a, c, t, g, unknown or other
aaaagaggtatgtttcaattaaatataaaattagaggtaaatttaattannnnnnnnnnnnnnnnnntatttttcaacttacccctattaatgctatagattgggccgagaaggtttatttgagtcgaccctttgggccaggtttagtgaatgggctattattaaaggagttttgagtggcccaaataaaataaataaaaaaaaaaaacaaaaggaaaaaaagagaaaagagggtgtcgtgtcaagaaacaagaaattagaatctcattattattactatattttacttaacaacaaatgtatgatagaaacaacagctgcgtcagccgaaattgggaaagcaaagtcagagttgggatagagaaagaaagtcccaaaaaaagagcagttgagttgagtttgagttgagagaagaaaaaagataacacaacatgagaatgtgaaggtatccctttcttttcttcaaattacagtagtttgaacacaaagcaacctttgcctctgcctctctctctccctctttatatctttccttcctctcttttgagaaccccacttcaaaataaaactctcttcattctctctaacaaaaaagaaagaaaaaactaagaaaggattaatcttttttatctcattctctttctgggcttttgtctattgttgaagaaatatatatattttttcccataaagggggaacatatgtggcaaaatcaggctaccaaatcttcttacagagagtctttgaaagctcttgaagcagatatacaccatgccaataacttgtgagtctcatttctgtttttttatttttagtttcttaagggaagaattttttttcccttttaaagttgtaatttttacatagttatatgttttatttgatcaaacctgtgaatccatttgcatttgctatgttcttgaatgattaaggtgtttttttcctttttgtttttggataattggtggtgttgtatatattaattaaatgaaatcgtggtagttgggtagtttatgtcacatcctatataaagaagggtaaagttgactcaaaataataatgtagtcattgtatatttttatgataatttcttccaattttattccctttgtcttatttttgagtttaataatgggatttatatatatatattttttttaaaaaatatatatatagatgaaagcttatgctaaatttagttttgcctagttaagcattgaccaagatgagaatagttaatcattgtgatttatgattgaggctttgcagggctgctgctatccctagagactatgatggggattgtgttcagatgaaattgtcttacagtcctttggctccacttttcttgtatttgattgaatggatggactatagctgcatcgattcactgcctagctatttaggccttcttcacatacttgtatacaaggtagctattcccttatttaattgctatcttgttattgtaattacaacaacttaaagagggtagcccaaatgttaatgtggtttgcttctgggtaggggtgggtcgcaagtcgtattcatgttgtgttgagacccctgtatagttggtatattctcgacccaaacacgacccgtctaataatcgtgtcataaaataaaacctaaacactatccgtttataaacgggttaacctgatacgacccgcgtaactcatttataaacatattttggcaactaataatacgtttatgatctatttatgacctgttaaagtactaaaataactttaaataggtcattaattgataagtttcgtgttagtcgtatcaacccgaatacgacccgtttattaaacaggctagacgagtcaacccgaatacgatccgaacccatttaaggcaaacctaaacccgctaactcgtgcgggtttcaagttgtgttatcgtgtctgacccgttttgccagtcctacttctgggtacttacatagtaattgttatacatgtgatttgctcccacaaagtctctgaatttcgactttcgagtcccaacttctgggtaactacacagtaactgctatagctttctggtccctaaattgtagggttaggcaggtagcttagtttcaaatacaaatatgggcatggtaactagtttgagtgtgtgttttttttgctttttgtctactttagtttcttgttgtgtgtgttttctttcttacattctttctctcccactttgaaggaacaaaactaagccttacatgattgtttaggtatatattgatggaatgccttctatctcctcaaaagaaaggaaagccactttaagggaattttatggtttg

SEQ ID NO: 25898 - DNA, 1536 bp, Cannabis sativa
taaaatttaattatattttttaaatatgtaagtttaatttaactttaaatttatttataaaaaaatatatttaagtaaataattttatgtattttaaaccttataactaataactttattagtaaagtatgattaattaattaaattaacgtctaatttaaattaaagttaagatttatatgaaaaaataatatttaattttattgatacttttaataataaataaatcaaatttatatatttataactggtatccgtgtattcgacaagggacatgcacgtggacacaagacagataattaaaacatatccgtgagtcctatacgacaagaatagagctaagcccaatatcaagctggcttcgaaggcaatcacagtgcacaaccaagtgaactttcgctacgcactccgtatccggagagcttcaggcttcgcatagccgaaaagacttatcagcgtttatctagaagccaacaatagtttcccatttgcctattcgctcgcacaggataaaaaagttaccttccacgaatctcgaactaagaataatatcaaccttaaaaggaaaactacatgattgaagatcaaataattaatgcacaattaattatcaacaatcaaaagacatgcatggcatgaatagttatcaccgtgatcaacctgccaagttagcatacaactactgcctcatggattgggcttcacgcgataagctcaataaattcttcatgcaaagagttagaatttcttactcacaagcttgagaagagaatagaggaactatactcattgtaatcctattggcttttctagttttacaaataataaaactgactcctggattaagaatctttatcgccttaaccaaataaaaactctgagtactctctcttattatttttttttttgaatcgtttttctttagtttttatattaaatatttcattttttaaaaatctcaataaataataattaatattttctaaacaaagataattaatttattgatttaacaatgttaatttagttaaaaaaaatcataaaatcaacaatttctgataatcatatttaatataagttatatatatatatttatatacatatatatatgcagggtcggccctaggtataggcgggctaggcccgcgccttggccccattcattttagaggcctaaataaaaaaaaaatatcttttaaaacttatatatatattttttaataatttttaaaaataccatttatctctatagtaagggtccaaaattttatttttatccatggcccatttcaattcaggatcgaccttgtacataggtagtattgaagaaaaggactcaagaagaacccttcacttattgtacctctttttattattattgaaaaatacaataatacaagcttggaaactaagagcatcgatttttttttttttttttgagtggctataatagaaaattataacaatggttcattgttttattttgatatatttaaaaaaaaaaaaaaatgaaaggattatttcaccaatacataa

SEQ ID NO: 25899 - DNA, 2189 bp, Cannabis sativa
atcttatatatcacaatttatttctatatattagcaatgtgagactaactcttaatataagttactaattgatattttttttactaaacgataatttaattttagtcgaactgaagattataatactatgagttgatatattatgatcagcttgaatacaaaatattatttaaccatcagttattaactgtttttttttattattattgtaaaaactaataattgaataaaaaataattaaagtagtttaaatatatatatatatatatatataaatttatatgtatgtatgtatgtatgagataaattcaaatataatggttatttggataactattgattgattatatttttgttgtaatagcaacttaaacataaatcacattcatcccacaatatactttagctgctccaacaaaaatattacccttcataataatgtacaatattactctttatcaccacattactctttctagtttctacaatatttattaactttatttatttatttattttgtctaagtagatccatgaggaattgaaaattcataggaggtacctaaaaagggttggcattttttgccttttgatctcatatttatttgttattaacactttatgtgtgtatgatatataattatgcaaataatgctatggaaaaataatttctcaatatgtaaaaaaatacattattattattattattatttattgattatggctacagacttaaaagacatagtcacctaaagatatcaatcgattttccaaacctttgcacccaaacagttggtgaattcatttgtgtgattagttcaatcattgaagtatgattttttatttaaacttaactctaatatcataagggaaacttacaaaaatactgaaatttgagtaaatttttacaaaaatattgtcacacgagaattttttcaaaaattctgtgtttttataaaacatcagtaaaacacgaagcaaaacaactcaaaacaacagtagaacaattaaaaaataccagtagaacaccagtgaaacttaacacagtatactgcagtatgaaacttatcaaaaaatacagtaaaaaagtaaaaaattccgcctaacagtatttttgtaaaaaaaataacaaaagttagtataccatagaaatttcccaaccctaaaccttaagattgtaaatcataattcatctcttacatacttttctttcaaatcactatgccttctcatctcaatgctaaattcataattaagtttatgactttatgtggatgaaatcttgaaaacggtatttaattataaatatatatttaaaattgatgtaattatcactaaacaaaacacaatcgcacgcgaagcgcagtttatttcttagttatattagtaagtatactaattcatccaaaaaataaaaagtaacaaacattaagggcttgtttgtctttataatttaaaaattgttttcaatttttaaaagtataaaatagcttttaaaaactaataggaggcgtttggccaaattttttaaaaccagttttttgaaaattgagttttaaaaaataagaaaacagagaaacatcaaaatgttgttttctattttcaaaaacaatttttttgtctaacatattcttttttatatttttgctcacatacctagatcccggacctagaatcgaactagacctggaccttggactcgataccagacctgaaccctaactccgacccccgctctcaaacgcggatgtggatgcgtaccccaaactccgaacctgaacacagaccctaacccgaacgcgggctcgtggtggaccctggacctagataccgaacacgaatgcatacctcggactccaaacctcggaccctagaccctaaaccccatacctagtgatcttttagaatatgagtccaggtttaaggttcaagtctagggtccgagtccgagattggggtctgggtcctggttcgggttccgggtccgagttcggggtttggattcgggtccgggatttgatcggaggtgggatgagctcatgttgtgatatggtgtagactgtagaatattgattatttttaatgaaaaaaaaaatctaagaatagttttaaaaaacttgggtttgattggtttgtgattcaaaaattttgttttttaaaaatgtgttttggaaacaaaaatttaaatt

SEQ ID NO: 25900 - DNA, 2073 bp, Cannabis sativa
tcccacaccacggcttcttttgagttgtagtgacagagggtaagaacatcttgtgctgctgtggctatgcaatcgtgacagagttggtcattgacatagttcaggcacatgtaaacaccatagactttgtctgcatctttttctcccattatggatgtgtggaacttgagagtagaagcattcgaagggaatgtggcgagtagattttggaggttactctgaaacagactattctctgtgtaattactggtggtgttagagcaacgtgtataaggagggtcagcaaaacagagattggaaagaagtgtcaaaagaaaataaagcaacagcaatccataaatatcgtccataactgccttctgatgattgctgcgaaaaactagatcaattttattatagctaaatcttttttctaccgtatgtgttaaaggtacgtgtatgcattatttaatttttaaatattggaaaattcttagatacatttctgataaaaaacactgtagtaaatacatatccacttgttttaaactattttatatatatgacgacacaaatatattttatcagacttaggatttaaataagagcattaattgctataaggtactaacgactaacgactgtgattagttaaaaatacatcattatctaaagaaagccggaaattgagaacgaaatgaaaaaacaagtcatcaaagccttttctcccagtccccccaaaaaaaaaagtcatcaaagcctttcctggtccaaaaccatttattgaagaacaagtggacagttggttttcgtagaaagtgcttctgcttccattttcaaagtcaagtcttaagcctaacttttacagagtaattcattggctctcgaatcaactaccaagggtgccttctgttttctcttcatcctttttctattttcgaagtaaccctgtgtccatttcaaaataaatacataaaggaaaattagatttgagtgaaaatctaatataatctagtggtggactcgtaatttaatatatttgtttttagaagaataatataacatattaaaagaaaatttatataaatttatattattataacatcaaagtaaattgtgatactacaatttttttaatctaattttattttaatatttttgtttaattttattttaatatttttgtttaattaagaagttgattatttggctccttatctaattttgataatttatctacctaaaaaatatgttctgaaaattattatttaatttattagtattattactattaagaaaattacataatttattatagaagactattttaagtttttattttatttttttataatgaaaatattttataatttttcaggagtgtgtgtataatacaaagatttagaacatgtgttggaggctaaattatatataatacacgatccggacataactctctctcggggaaggggactagagaatgtcatggcctatgtaaaaaattattaactcaataaaaaacaattatttttatacgtttacatatgttgcttttcggctctgaggcagaatggctccgtgtagagtctagcttggtttataagcgtcgggtttttttcctggtttggcctgtttgtgggttgtgagtacagtgtagttttttccctgtgagtttgttcctcttgatataagtttttggacgtcttattcgtaattcctatcgctggtatggcttcaatgggagttaaggatatacaagtcgaatcggtggatgaggagatgaacaatacattggtaagagatggggccattgaaatggaactactcgagctgttcgaagatatcactctggaagaggtggtggtaaacaaagcttgcgtcgggaagatagttggttgcaaagacatgccggcgtcggtggtcaaaaagattctaacgggcgtttggcgcagactagggccatggaagatgaagaagtgtgaagagggagttctaggattctttttccataatgaggaagactgtgctttcgttcttcagaaaagaccgtggctggtcaatggggtattgctgaacattaaaccttggccggtg

SEQ ID NO: 25901 - DNA, 2205 bp, Cannabis sativa
aaacttattcacatttccagggagaaaaatgaaatagctcacagacttgcaaagtttgcattaggcctagttcaggaagtttattggaaagaccataattttatttgtaacctgtgatttgtaccacaaacgttttgttttgaatggaattcaggttttctttaaaaaaaaatagttttgagacttgcaactggaatccttaaattgccaaaaaaaaaaaacattagatttgtaggtgtatatatatttaatagaactgttaagtttaacagaagaaaaaaaataccgttaaatcaaaatttattgtcaaatagcacttctaatttaggaaaatttttcaatagacactcattttaggggcgtaccaatatgtccaatatcaaaaaatataattggtgacagctattaaatgaagaatttttgtagtagagctgttataggggatcaaaacttagtgaaattggggtgcacttatagaacctttaaattattatttaattggccctaaaaataacaatccctctctatatctctatcttcatcttcttcactccaaatcgccgacggttccctctccccttctccctcagttctggcaccaccaacaactccctctccctcatccctagtccaacgggagattccctctccaaccctcagtccctcaaataaaagtatacattcaaagatggaaattcgatcttcaatcaaggtttgcattcaagataaaaattccagatgatcatcacaaaaggaaagaaaaaacaggattaatttcgaaaaagaaagaccacttgttgctgccatttgactctcttttaatcccatgaatcaacttataatcaaaactctttgtttaatacatcatggttgatggaacaaagtattaaaatataaatatatattttgttaaaatataaatatatatatattttgccgaatcgaatataaatatgttctccttctttgtcccgatattcataaataaatataaataaatcatgaatattttgtttaattttggtattcaaaatatctcaaatatttgtctcgctaagaaataggttctaaatttacatatgtgactctaacggccatctaccgcattttccgtcatcgccgaacaaaaatcataaaaattgcataattcatatttaatataaataatacttctaaagtttaataaaatctttaaaattgtgaaattataactctaatttccatttctaaaaaggagacccacaacattaaaaaatctataaataattataaaaatatcattaattaatgctaattgtatttactgacaaaaatgtcaaaattttaccagtgcacatttgcagtggcaaaagtctaacttctaccattgcatttatgtgctagaaaaaattagttttgctagcgcttttcatttagcattagcaaaagttctaatagcaatattgatttgccgaccccttttgccaacacagaaaataaatttcgttttgctagtacaataccaaacttttatcagtagaaaaatatgctgacagaagtgacatttttcttgtagaagtattaagtatccaaacttaatgaaaactctaaaagaaagatatattggttaatgtccacaaagataaatgagagatattaagtttttaaatatcaatgtgaaactatatatcataatataaatatacatatcgcattcatgttatttgataaagataaccaataaattattacatattttacatctcaaagaccacccttttagatttttgaaagaaacattggctttttctatgagtcaagggtcgttaccaatagatcaacaccgatagaaccaatattaggaaacaaaaatagaatttaaaagagaaaaagacttttagatgcaaaattgaggatcaatatttaccttgagaaagtcattaatatttgaaggttagattaaaaggcaaatgataaaaatttaacatattcatttcgattttgagtcaaatacttcatgcgaggttaatattgtttcttgtattcttggcaaactcttcaaaaaattcaaataagttattccatactcttggaagggtttccatagacatgttgacataaagaagtttgaccccataaaacatcatttgcaagaacaaaaatcttaaagaagaatagttttgagatttgcaactaaaatcccttaaattgcaaaaaaaaaaaaaa

SEQ ID NO: 25902 - DNA, 1385 bp, Cannabis sativa
gaataattcactcgtgaaaaaaaaaaaaatagtaaagcattcattattttattttttcaaaatatttcataaagtttttttagtattattttttttgattgaaaattttgatgtgttattaaatttacaaatatgctaataaaatagtataaagttaaattgggataaactttcattgaaccaacgatcttaaaaagaacaaacagcataagtcaaataaatagttattttgttcgttgtttaacaaagataataaaaatattatttataaaaggaagtaaagacctacaacctaaaagtgttaacgaattggtttggtctaaatttttaattttttctaaccaaactattattacggttttttaaaaatttaaaatcaaaccataccaatgaaataatcaaactaaactaaatcaaaccactcaaaaacggattgatttggtttgaaccataatttatatttcgtagttgttttaattttttttacaataattgttcattttttcagtattttttttaattaataagtttataatacataagtagcaataaaaaattattatcatatcaatataagttcactatcaatattctacataaagttgttcccaaatataaatattttgtcccaaaaaaaaaaattatattgattggtttggtttaaactgctaccgaaatttctaaaaccgtgaccgaaccaaatcattcacaccgaattcatttagtccagtctcaaatggtttggtccggattgattgagatttagaaccacagattgcggattatatgaacacacccctgctacaataattaataatcaacccaaacaaagaattcatttagagtgtatgacaaattgtatcaacaactacttgataatcaattttaataacaatttgagaaaaaaattaatgtttaattcagttacgcacctctttcactcctaaagactgttattgttgattgtatacaaccgggcaataactttgagttagctttcatgatatttctagcatggtcgtgtaccacccaactaattccaaaactatcattcttactaacaataaaagcatccacattgatcttaatcatattttcaataggtaacattcattgctcgctactaccagcaaatgaacaagtagatttttctatattattgtcaatttttttaagcatctttctatatcgaaaataatagataaaattactaaaaatgttatgttagatgtggagaagaaaatattaatttttgtacctagttattaaacatttaggttttaagcacctgatggagtaagatttatcttttttctttcttttctttttgcaaaacacaatttaccctaacataatttttttttttttgttgattatgttatttg

SEQ ID NO: 25903 - DNA, 3770 bp, Cannabis sativa
taaaattcatgtgaaatttgaagaattttgattataaaaaacttgtattacataatgttttagtacatatttttaaggaaattttttatttttatggtgttttttttcttggcaaaataatttacaaaaatataattttttttaagaaaaaaatttatatttggtatgacagaaaaaggagagtaaagaaaaatttaattagaagaaaaagtggagagaagtaaaaagaatgtttgtttggttagatagaaaaatttgagataggatacattaaaaaatttctcccccaatttagagagaaaaatggaaagaaaacttttacagaacaacaatgatgtaaaattactaatttatttttgtaagaaaaatatattaataatttaaggttattgttgtaattctataacaatttaattttctttcttttctacccaccaaacaatgaaggaaatatattttccattatttccttctaatttttttatctatcctataattttgtttccctttattttcttttcttcataacaaagataatgttataggataactaaagggtaactaatcaaacaaagggttatcttatactaactttctcattttttttcttttttttttgagaaaaactcattttttaactatttttaaataaaatccgattgccaagtcttcataaataaaatcaagggtaaatattattttggactctgtattttctaaaagttaccaattagactttctgttttgttaaatgataaaatagaccctgtattttccaaaatagtaaaaatagtactttaagcttaatttttgacaatttttttattataaccaactagaagacaattcctaacacgaacacatatagaaaatgtaaacaattttgtcataacacctttagattggattactattaaattttattttgacaaaaaatcagtttagggtcatatttgtaccattttagaaaatacaatatctattttgttatttaacaaaatagagagtcaaattagtaaattttacaaaacacaaagtctaaaatagtatttaccctacaatcaaacataaatacatttctctttattatattataaagaactagaatgttttagcttattagtaacaaataaaaatgttgttattattgattatatatatgaaattatagattaatttttttaaaaaaaaaaataaaaaaaaaaagtaatgaggatgataaaggagtgggcaagttgattaatacatagatgacccctctattctatagtagtactgtgatgaaggacatgaattgactccatatctatttattgagagagaaagtgaaatgagtgagatgatttctacaaattgacacctttttattgtttgacccattcattcatttaatcatcaatatataatacacaactacctagctggcatatattatatataccaaccaaccaatcattcaatactttttgctaacttatttgccaacaacttcagtaaattataacctaatattttcactatacatacagtatatcactcctgacttcaaatggattataggcaaaaaaataataataataataaataaataatatttttaaaaattattgaaaaaaaatatgtatattttttaaaaaatattttttatttagacttttaaaataagtaggccttaggcgtgaacctaatctgctaatacctagggtcggtcccgtatacgcgaatacaccatgtgttttatgatgttgttcaatttagaaagagagagaaggagaaattgtaaaatagagtgagtaaattatgaacaaaaaaaattagttaagagggcaattgttaataactatatggaattagtaaaatatcaaaatataaagtgatactcagtgtgttttaaataatgcttgtacagtacctgtatttttaaaatatccatgacatcttaaactcaaattttatcaataaaattaatttattttcagttatatataattaaatggttaatttgaatctataactcattgattgaagatattttgatcatattggtaatgttttattgatcagttttgaatacagcatacaaaataagtataattttaatatttaaaagtatcaaatgaacattattgaaagtacatgctaccaactctttattttttaaaagtataaagtgtcaaatgagtatacacatatataatcattaatatattttaaagtaaataaaaaaaaaataagaggttatatcacaggatcaaaaaaaaaaaaaaaaaatagattttattttagattttgtattttgtaaaaattcttattcaaattttttattattaaataagatattagatcgtgtattatgcgaaatgggatagtttcttaaatcacttaaacatttttaggattaggaatagaatagaaattgaaccacaattgttagagttatgaaattgaagttttaaggttaggaagataaatttttatagttaggattaaaaataatttaatcaaaattaagatcaagatatgattatgttctattattttgtaaaatataggtctaaattgattatcattaaataaatagatatactaattagtaatttttacaaaatatataggatgtgaaatggtatttacaaaaaaaaaatataattattatatgaaaaatacaaattaacactttatttataaaaatacttccataaagtgtggacaacaattagacattttatgtacttttaattaccaaaatacttcttacagacttatactatcacttacacaatcagatgaaggttgctgggtggttggccgaaggttgcatcagacgaaggtttcaatcagacgaaggttgctgggtggttgatcaaaggttgcatcagacgaagattgcttggtggttagctgaaggttgcatcagacgcaggtttcaatcccaggaagcatggatcgtgggttgttgttgaaactgtaaagcaacagttatatctgttgcgagccaactaacatgtaacttaattgtaactaaaaaaatataaaatgtgaatatgtatatgtaagaaactatttgtcagtattttttttttttggtcactgattgataattacttgtaccataataataatatgtggagaaataaatattagtaaatatttatgcaactgttatgaaacattaaaaatcagaatagtgtttctacgtacgtaactctatctacatgtctcttcgtcatttaatatgaataaatttaccattagaaatttaaaaaacaacgaaaaatacactaggataaatattttattatagtattgatgtaattttgtttggattatacttaatttggattgtttgggaactacaatttaattttttgagatatgcattttatagatctaaaaattgaagttaggacattagttttatgcgaatcaaattggatttctagttgaattttagtttcgtagtagttttttttgcattttttttcatgaatacgaaacagcccttgttttgattgattctagtcgttttttcaggtgaagtcgcggggaattaatgatggttctctttctggttaggtttcgtttcggttgtgttgggttgctaccgggtcgttgtcgaaggttgcatcagacgaaggtttcaaacccaagaagcatggatcgtgagttgttgggttgttgcccgaaggttgcatcagacgaagattttaattgttagaatgtgggaataagatgaatgaagttccatctcaaaaccaattggcaatggg

SEQ ID NO: 25904 - DNA, 11155 bp, Cannabis sativa
  modified_base (10971)..(10979): a, c, t, g, unknown or other
aattttgtgggagcttttctactattttaacctataattatcaaattaaaaaaattacatttaaatttttaaaagataatatttttgttagtgggggctatagcccccacattgatatatgtgcatccgtcactgtttatatttgtctttttattattttatagttgtttttatgttgttgtttaggtattctataattatttttctgttatttttatgtgtttcttttttgtttagttgttgtttagtttatgtgcattttttatcgtgtatattttcagtttattccagataatatttttgttgtatctatttacatttcttttgttttttttatattgtttttttagttatttttcggtttatgatcattttttttaactatcactaactcaaaaaggaaaagagaaaaaaattgaaaaaataaagctgtaacaataaattccataaaaaaaataatgtaatagtacaaaaagataaattaaattgtcaaaactaagtaaaaaaaatcgtaatacaaaaacataataaggaggagttgatattattttgcttattgcaatcaagtcaatttttattatgtttctgttgctttgtaattatattttgttgtttcatagttattttcatgttgtttgttaagttgttctagggttgtttttgaattattttttttattttactaaaacacagtatatttgtaattttgaaactttaaacacagtatttttgtaatattgatacagtaatatttttgtaaattttctttcattttatagtatttttgtaagttccctatgttctactcggtcaggagaagaaaattgagaaaaatatatgtagttaaaaaaattgagatcaaaacttagcgttggaagactttaaataatatattattatgggctcgtttagtacactgtgatatattgtattgtatagtattgtgttggactgtaatagtattattaatacaatactgtatttgatattgacttgtactaataggttgtgtaaaattataaattctttataataaactcgactccaaccccgaccaggcctgggctcggacccagacctagactcggactcggactgaacccagaccctggaccagaacatgcccaggactcagacctagacccggaccccagatcggacctcggaccccggacccagactcctgacccagacccccgacacggaccccaaactcgaaccccgtacctgaatcgggacgtggaccccgacccaggcctagactcgaaccccctaccctagacctagacccggaccccgtacgccggacttggaccccaaacccagacctggactccgtattggaatttatgccctaaaatcaaataattaatgtataatatattatataatatataaaatgcaattataagataaatgaatatattaattatacaaatataattaatatctgaactttcttatttatatggagaatgtataatcttgtaagatcgtacaagagaattaaaattatataatatgaataaaactagtcggtagtgtattaaaataaagtgatctttaatatagaactactaagtacggtttactgtacactatattgtgtgtgattttaatttggatcacatatgtagataaacatatattaaatgtgttgtctataatttcattgtacatgacttgatcgatatgtaataatatctttcatcaatgtgttgtttatcatgaaagagttgttcatatcacaatgataattattagtagatctgtctgaatcatatgatgtatagatgcactcctatttgtgttcattgagttctttgattcactcgttaaagtttatcagagaagataattcttacaacttttattttgggagcttaattatatgagtagctgggaacatgttgtataataattgaattcaagctttcaaaagaatcaaatattagttctcttatagtattaattctgagagtgctaacagttggatccaaatctataattggattataaattaactgttcacattgaattaatggtacataaggaatcaagagataattaaaaaggtaaaacaataattttgatcaagtcttattatgaaataataactggagggcgaactacttatattgattataataattgagtactagtaaaaattttgtaaatataattttatattgtcaaagagtgaaattttatatttatagtggagtaataatagaattaataaactggattattctattaatgagatcaataataatcaagtgtttattagagctttaaaatataggttcatgatcctctagtcatccctatacaacactacaggaaaatgtttaatttgataaaagaaattgaatgagaattaatttctatgaaaaataattcttaagagtaaaatagtaattttgtgaaaattattattttgaataattataacgattatgaattgtgtaatataatagtatttaattatttagttttatttgataaaactacattaattagttaaatataatattattcttaaataatattaaagagagaaatatattattcatcttaaaactacacgaagaccctagcaatttaggctgccaaccaccgcgcctccaaccgaagaccaccaacccaagacccaggatctctgaaccacgaccaccacaccatgaatgtaaattttccattttattttactgtattaagcatgatttagagttgaaatgtatgattttattaataggcttattgatttaggaataaattgtatgattaatgtctgttacctgtgagttgatgttagatttatggtcgaagatggtcggatctgagttttggacaaaaaactagtttttttgctaggctcgatggtggtccaatagtagctcaatgccttcctgttattaaaatgagtaaaggttaaagatgaagatccgatggtggttcgatgtcttcctgacgaccttaatgaatggagcttaatatctataaatgtagaatatgtttcgatagtggcctgatgctaccatttttttatgtataaaaatatgaaaaaaaaaaatggttagcattgggacaccttcggacccccatcggaccactatcagtatgaatgagaatggagagtatggataatgaagttagaaaaaaaaatattatgagtatcaatataaactgtatctattttttttttaaaattttaataagcttctatttaaaaaaaatgtaatgtgtaggcgtataaatttaaatttccttattgaagcctcgttaccaacactaaagtcattaacatgtactaaaagtcgatgacttatacacactttccctcaatgtatttgcgtgttaatgaataaaaacatagtaataactaataagagtgaaaaggaaaggaggttgattattagaatgaatgtgtatatagattaatattgcattcaaagaaaagatgctctgttgagagatattataatgaattatatataaattaatcaagtcttggcaatatccaatgtccttcaacaagtaaatttggatgtttgtgatcctatttttctctatatatatcacactttaactttcttctcctcattctaatagctgttggatttagtagggacccaccgacatataaagatacagctaaatttatcacttccatccaatagaactaatgcccaccacaacctttcctttctattctcatcataacttaataatgcatgctaataaaaaagagatttgcaattgagtgaaaaaaaagacatttttttagaatgctaaaggctatttacagtatagcatatttgtgaggtgaaatgttattatcaatgtaatttaatattaagttttacttattttattttaataaaaattataaaaaattactaactaataataaaatgttatttcatagtgacactagatattttagttccacatagcaatactcaattttttttagcattgctataattcacttagaggtcgcatcttgcaatgagttaattatattctacaaaaattattatattaaattatttgaaacccaatatttaataaaactaataataatataacatttaaaatgctaacactgctcgtgcccttagtcatttttttcctttttcacaagagacatttttaagctaaactacagagtgacatgaccctctcccttctctctcccactacttcacaaatcaccttatcatctttcctctaaaagattttgttagtattcaaagaaccaactcttctctcatcataattattcaaagttcaaacctttaaactcttttgtagtgtttaattcaaccaaaatatatcatatcatctcaaagttatggacactactactcatcatcatcatcatcatcatcatcagaatctagcaacagagaagaaatcttgggaaaccaaacatggtagtacaacatcaacaacaacaactactactacttgtgttcaaggaatcaaagaagttaaatcactgtcatcatcatcatcatcatcatcaattaataactcttccaaaaaacaggtaacaatatcatctcctgtctcaccaccttcatcttcatcctctccatcacatgaattctccttcactatttctctctccacaaataataataaagccacaacttcttcttctactacaaagactaataatagttataacaataacaataacaataataattcttcattcgccgtcgacttgtctccggccgacgacatattcttccatggtcatttactccctctccaccttctttcccatcttccaatctctcctagaacttccactaactccatggatagttttactcttcccattaaggagatttcatcatcttcatcctcctcaataataatggagcatcaaaaacagagcaaagatgtctctgcaaccgccattaccaacgaagcagcaggaggaggaggaggaggaggaagatcatcatcaaacaagccgggcaacaagtctttttcgcttttcgggctatcgaaatggagaaataataaagggcagcagttaaatagaaataataataataataataataataataatatgggtgatggtattattgaggatgatattgaggagaagaagaggtcatctaaggtgaaattcgaactgatcagtcaggtaatcaaaaggtacatgagaatggtgaggaggccactgttgttttccaaggctagaagagataatgatgatgagattagtaatatcgaattacgtaggcagccacactctttctctggtgttttgaataataataataatagtaatagtaataagatgatgatgatgagaggaagaagaggagagttttcggcgccggcatcgatgtggacttcgccgaccaatagtggcccccttgtggcgatgcctcctcctaataatactgctaatgatagttccatggaagagttgcaagcagccattcaagcagctattgctcattgcaagaattccattagtaataataatgctacaaataataataataataataataataataataatgtagtcaaatgttagcatttccctattaattaattataattggactactagagagttgtagtaataatggtagtattgattttaaaattatttgttgtactgttttaattaattttgtataaaatttgcaatgttattattctattattaagtagtgtaatgaatgtattattatgaaaaagatagattattattgtattcatgtgaacattgcactccgtgtatacaataaatatgcagcatcttattcatcttaacttatctataatattatatgttcatgtatttgtaatgcggaattctttaacatctcttagtttttttttttcattaattttggataactcaattacaagtagtgcttttggtttatcgaatcccaagcgacttttggctcactatttcaaatcacaagaaactcttttggattaggtgagtgtatggtatggtgtatgaggtctcatctcaaaactaaatagcaataagagatgtagttcatgcatcttatatatagtattatattttcacacctcaacaatgtctgactttttaacaaaatgtacatgttttctgttgagaaaaataataaacttcaagtgcagcaaaataataaacaaagcaaagcaaaaaaaattcactcggtttggtaaagttatcaaatccacaaagagagatatattttacttatcacttcaaaattacgtatactctatctcaatctctccacacaaatttcaatacaccacttgcttctttctcactttcgccatacaaataataaacttcaagtgcagcaaaataataaacaaacaaagcaaagaaatttcactcggttggtaaagttatcaaatccacaaagagagatatattttacttatcacttcaaaattacatatactctatctcaatctctccacacaaatttcaatacaccacttgcttctttctcactttcaccacactacaaactcactctcacttttcatttcacgactcactcttcttctcacacatacacccttctctcatacaaaacacatattcataggataaaaaaaaattggacaccaagataattttgggaccaagacattccaaagctttctcaagaagacttttcaaaacttagctatcaagactttcacacaattaataattacctaaaaaattagaacttaacaaatatagaaaaaaaaaaaaaattaatttgagtcaaactccaacaatatccacattgagtcaaattctctaaactcacaactcaaaccatcaataagagtatatatgcatcgactagagcagtgtcttcacattcttcaatctttcactgatgccttctgttaaccgagttttttggaaaactaattattaaatataagagctaaagaaaatataattcaaaaagaaatatatatgaagaagacactcagagtttttacgttgttagggcgtaacgagccttagtccacgagttaatattattatgagaggttagaaaagcctaagggattacagtgaagtatgagcactctatttttgtatgagaaagtgagccaagattttttaaatttttgcatgaaggattcaatgagtatttatagtgttatagaagtcatactagttaccttttttcctctaatggaaagtttacaaataatacattgactttgagcttatttggtgaagctcgacccatggagcactttgtgtatgctgacgtagaggccttatcatgaagctatatatttatactgtgtcctatattcgtgggcaattaatgacatattaattacctgatttctaattattaaatttttctttttagcaagatattattctttatccaagattttgggaagtaattcctaatcttgtgcgatttggcagtaaacggaaaactataataatcttccagatacacgctgatgacctcttctagatacacaaagatagaccttttggatgctgaccaggcttgacggaatctcacttgggtgagttatgttgttgaattcgtggaaggccggatagatcctaagttcgacccagtttatgttatttggatccactgatgggccttaagtttatatttggaatccacgtgtcccttgccgaaaatgcgaataacaaattctttcttcaaacaacctttaactgaaattagagtcttctctaccttcccgcattccttcacactaaatgaatcttttgtgacttgactccacattcacaactccaactaaaatagtcctcctgactaatttatacaaatttttttcttttttaaccttcacaactaccaagccatctttcttcatagttattttaccatcttttgcaaaatagtcatagtcacgagtatccaaaactctcaaagagattaaagttctccttaatgttggaacatatctcacatcagtcagtgttctcataacaccatcaaacatttccaccttaacagttatgtttactaagatttttaaaaactaaattaaagaagagcttaaaaaattaaataagcagttatgtaatagagatggaaatttttacgtggtttgagtgttaataaatcctagtccatgagtcaatgtattagcctaaaggctttgaatatattacaatagagtcttataagttgaagaaccctagtttatggctatagtgtttttcctctaagttttttcttactttgtgaagaagaaagtctaaagaaaatataaccagagttctcacttccctttcatgaaggtataaaaggctatttattggctacgttcggatctgggcatacccgtgacctattatagttactgtgcaaactaggtccactattaggataaatacatgaaatacatgactttgaggcccattgtagaattttggcttgtagggtgaaggtgtgcatatagataaggcccacgcggtccggacaggtgtcacgcacagagtactgctacaataggcaatgatgtcaaacaagcatcgttcgacaaagatgatgcattttttttggtggtgtgcacactaccatgttctgacataggagacaaggtgtgatttggtgggactgggtgtcagagggatgccacatcacccctcaaagggcttttggcggtgccttttggaattcctctccaagtgcgtcccaatattcatccagagggttttacctattatggaagtcagggagccttctagattcgagtaagtctcatccttgaaggtgaggcttctaggcttcaaataggctctgacccatctcccgtctagattgggccttcttacgtggaagagctttggcttagaagattcctacttgatcattctttggaagtgccacgtgtcatctttccgaaaacaagaataatatttaaagacacgtaaggcgcagccaaaggagttctaaaatactaaagggaaaaatagataagtttatttcaataatggtctttgatttattattggtctatagtcattattgggattaatatatttttcttgccgtgcaaagcaattcgagaaaaaaaaattaaatgatgatcatagtgttggaatacaatcgtgtattgtgaattaagataagtatataatggctctagttggctggaacttttaaaatgcagtttttttttttttttttggacttttgaagctccaaagcatttgggtaatctttgaattttaactttcagctttaaaattttcttttaacaaaaatcagctttagtagttttcccgagaagctaaaatctaaagcagaagcatcatattgttgaagagccaacaattaagcataacaaaacaagccaaacaccctcaaacaatccagattgaaaaaggtgaaaatatgaaagtaaaaccatccaaatcaatcatagaataactttatattccaagtccaagacctcgggtaattgcattataagttatatattgatgcttgattatatcaaatccaaaacactttaaaaccttttctcctttcctagttcatggccctcaatattcaaattgcagtgtaactatttcaatacaaatacagagaagcccaaaatagttacatgctcacagctttgaaactgggaacttagggaaaatatcaggtgtaaatttctgtgctgcactcaaactgcccttaatcttcattaatcccctgcattagtacataaaaactcagatgagaatgaataggtgaaaaacacctaatgaggagttaaattaaaaggtctgacctcatgaaagcaatctggggattcatctttcctagtgcaattttgataaaatctttttctttgaaggaaaatgtagcatcaggcttttctccttccaatgttcctaaaatttgacaaaaacgtcagaaaaagcaaaaccctgttgacaagaacaattagaagttcttctttaaaaacatgaaaccaagtaacagatcaagattttagtccaattgatcaagtgaaagtacatatttgatatcaattaattaccatatgaaaattttcaaacagccaaaacgaatcccaaatcataaaatacaaaaacacaaaattaattttagaataataataataataactaacctttgatgaccttgccattcttcagatcaatagtataacagacctcattgaacccaattttctataaacaaaaacaaacaaacaaaaaagcattaggtcatacttaaatcaaaattaattaattaattattattattgaaaaataaagaaaagaatataagacctcgggtgcgagtttgatctggtaaacgagattaattttcttgcagagctctttaccctcgtccgtttcaaagtgtttactcatcaagtcaaacaaagtctccggcttgagctgaggggtcgccattttctttactgaagtttctcaattgtacgacgaagaaatatcaaatatatataataagctgtttcgtgaccgaatgaaccttctggttctgccgatcactgattatttatattccaaaattaattaattgctttcgttattttagaggagaagggtgaaattaggtggttgctttcgtgtgaagataggagagagaagggtgaactgtgagggcacgcatttcgaaacaagtgtttttttaattaatatatcaaattaaaatgataaggttgaggaagttgggttttgtgttgattttggttttgtttcgttcaagttagatagttgcaggagtgtgcattagtgaatcgacccatctaattacaatccatcgttaaatattagatatttaattatgattggattgaattagatagtaatgttgaatatttaactgaattagatcggatccgatgttagacagagtgtccaaaaatcaaatattttaatttagtttggatgagtaatttaattttacattattatacgtaaaatatatatgtatnnnnnnnnnttaacattaaaattttacttttttaattagatagatctaattcaatccaatacatactgaatttaaaatattaaatggatcaaatctgatctaaaaatactagatctaaaatattaaataaacttaaattaaaccaataaatatatataaactacatccaatggatagaaccgatc

SEQ ID NO: 25905 - DNA, 2314 bp, Cannabis sativa
atccacataattattaatatttataacaaataagaaatattttagtttttgaatataaataattttttttcaaagctctaagtaaaaggattataatcgttgtctagccgtttataatttaaatggtcggattatgtttttattttcatttgtttgttataaaggaggaataagaattagagaaattattagtgattgtatttttcggatttattttttattttatttttgtaaaactttggctcattcctccagtgagcagtgagtgtttaataagcattttgccaaataatatatagtgattgttttacatataattgggcctcttgtaaaataagtaacaatccaaaatttttaaaatttcccataaatagatgaaaattgggcctttaatgccttggcaacgggccgaagaaaacgtctgtccaattctctcggtaatgtttacaacggtcgaaagactaaacgacgtcgtaagtttcctattttggtaggaaaatttcttgctcagacaaaacaaccaggccaggccaactcttttcataaacctcaaactctttctcttcttcttcgttctgccatggatgctttcgatttttgattttgaaatcccctttgtagtttccttttctttccctttttctttatctaagtctctctaattatttgttcaactttcttttcgaaacctaaaagcaatgggcgttggaggcaaattctgggatttgcttaaaccttatgtccgaaacgaagccttcgactttttgaggaacaagcgtgtcgctgttgacctctccttctggatcgttcagcacgagaccgcaattaaggacagtgtgcgaaacccacacctcaggctcactttcttccgtactatcaacctcttttctaaggtttgctatttcactttatgcatatatatattaacacttgtgtgtgcgtatgtagtattgtattgcccggttttctgtttggttcttgagaaaaataaatcatatttagcagcccgcttaagccattatcatttgtagcgtttctaaactgggcaatttgtagaacaactagagaatggacattacatatatgtatttttgtaacatagatttttagttagaatatggataatgggtctactaaacttgcagtttggagcattcccggtctttgtaattgatggaactccatctccgttgaaatcgaaaaccagaattgcaaggttctatcgttcttctggaattgagtcgtcgagcctgcctgtgcctgaagatggtgtttcgtttgagaggaatcgggcatttacgaagtgcgttcaagagtgtgtggtgggttacttttgacattatttattttttgctgttatataaaatatggtttacattttgacttttgagtttcaagtttcaattgaattgtagcgaaacgttttgtgtcgtttcatgtattgtttagcttttattctaaactgcctaattcttaagctgtttcaagcttcctaatttcttccattgtcgtttatgaaatagactatccctattatgagatgaaaacgggaatagaatttcatgatatgttatcatagaacttctaagagcaatcatattattatctatgctcttttgaaactaggatatgcccgcctaactgtacaattttggggaaccaggaaattatagcaactgcacaacaggtgcttgaatatgctactgtatagttttagaagaaacggatttcaaattcaataagaaaatatctttggttatttcagctaaaaattttactcaactcataagtaggccaacgtatgagactgaagcttttcttgtgatccttcacacgttgtggtgttgtgattatcttatttattggtgattctcgatgaatgattaaactagttaaaaatttgattaaacaggaactacttgagctcttggggatgcctgttcttaaagcaaatggagaagctgaagcactgtgtgcccagttaaatgctgaaggacatgtagatgcttgcatcacgtctgatagtgattcatttctctttggggctaagtgtgttataaaatccattaaaccaaacactaaagtaagtgatgtttctctgtaggttcttgcatttcaggattgattatgactctgctttcatttgagtcgttgactgattcatcattgttaaatcttcaatttttagctgctcatatgactattaagtaaaacaaataagtgggaccttaacctagtctagtaatttttttaataaaatgatttttttactatagtagtggtatgcgtattcagtggtattgctcatttttta

SEQ ID NO: 25906 - DNA, 4590 bp, Cannabis sativa
  modified_base (27)..(45): a, c, t, g, unknown or other
  modified_base (4446)..(4453): a, c, t, g, unknown or other
gcacttagtgcggattggatgttgttnnnnnnnnnnnnnnnnnnntggatcggatgaacacccctagatcagccaattcaaaaagaaaaaaaaaataataaataagtagaccagaaatttgcaagttgcatttccattcccaattttagcatataaataatttcacatgtgtaaagtggataaagtataatttccatgcataattaaaagtattttagcattttcttcaaagacttattaatttagacctttactttaattttatgtttggagttatctatgcaaatatcttcaaacgacaactttcaacaatgcccattattaaataatacactaggaagaaaatacctctaagcctaggcaattttcaaattgtaagtatgagagtttggttaccaaattgaagtgtgtttttatcttttgttagaaagaaagtcaaattgaacacatgtatacggtttttggtaatatatgagattaggtacatcaattataatgtatcatcactaataaaccaatgagaaattaaaatctatccaacttaatttacactctttctcatgttaaaaagtccaaagaaagctagcttggaattttgtcagctggaaaaataaaattatgtactaccaactaccattggccaaacataatttaatttttaatcatttattggtatgattctatggagaaaactctcattttcacatgttaatgaaagggaaaagggaaaagatggtacagaaaaaggaaccacaatcacaaactatcatgatacatctactacttcttttactattattttatttctatgattttttggctagatatgattttcattacttgtcataactaattgacccctcaaaacatttattccattaagaaaaaaatatgaatttttaattaataaccagcactattccaacaaaaaagaaaattaataacctgcattatgcttttccaacatgcatgtcaaaatcaagatttaaatggtgagatatgacataatcttatggaaattgattgtagtaccggcttagaaaattaaacaattatcctaatatttttaaacaaaatatctataagaaatggaatattaaattatttttttaaaaaagaaaaaaacatttttatttccgtttagctgtaaaagtgtgggagataataaatcactcgtgtatattccaactattgagtacaagaaaataaatatgtattttactccatacactaaccttagttactcttccccatgtcttttttttaaaaaaaaaaaacaattaaaagtagtaagaaatgaatcataactatgaaggaaaaaaaaaatcacgtttactaataattaccaatccaaactctcatctctttacgcaaatagaagattttctaaactcatttaaaattgaaggccaaaaaaaagacatttgtttttaaaacaagaatgcaagttgaatttatatattatataaagtgagaagaagaagaagaacaacaacataagaacatgagtcaaaaaacaaatgttataagggaatgttttgtataatatttagcagatacaaatacatatatatgtatatatatatatatatatgaatatatggatacgtacctttccaatggcttcaaagagagaagcattgaaagaagcagcagtcaaaatgggttgagggaaactagtggccccaggaacgacattggaaaacttagttccaggaccaacatacgacactccatggagagcctcagaccaccattcgtatttgggaatcccaagcctactcacattcccagcactgttcaccaaaaacccaattttctctcccaacgaaagcctcttcaccaagtccgccactctagcatcaacccccaacgacgtgtcacaaaacccgaacccgttcgacccggcatcgcatgcgaaaaccggtttctgacccgaaactcggctcacagtcacaaaaacaagagtgactgccaccaaaacggagtagtaagtaagtactctgttttctctcattgaaacagaggagaccatattgttgtgagaaaaataaaaatgggtttatctttttaatgagagaaatggggttgttttatagctacccgtgatggaggaaagttgagtatttgggtttgcattaaattcggattatttaaaatgtatattatttaaaataataataaaaaaaagaatctaaggtaaggggtattttttggcattgcgttttgatgtacataatgaccttaatatgagtccgtgatgagatgtacaagaaagaaaaaaaataaaggcttttgtataataaggtaagagaagagtaagaagagactgaaaaaactttcttaattctctgaagtattttgtttttgtgtctatgtattgtgtatggtttagtattatcatgtgagagagagagaagagtacgtggttttctcaattccaagttgggttgggttggttgggggtggtgtttttggctttactatctcagtgaaattttaactcacgtgagagagagcttaaactatatggctccatcggcttcactcggcttcttcttagccaagccggaataggatggaatcttagataatttgaaaaatctatttaacaaatccattccaaaatatgggttaccaccgtaacaaaataccattagtttgtttgagatgagaaaaagtctgttaaaaaaagaatttattttatttttttatcttttgtctccatagtttgttactgtttttaatggaaacaaataataatagaggtaaaaaataaaaattattgtaaatatttttgttattcaaaactaaacaaacttctaaattttagtcaaaatcttcttaggtggatcatgtggtcaaaattaataactatagcttacaaataggttcttaagttacattaattgaaaaaaattacttgaaaaagttaaacttctatgtatgcggtagggcaccaaaatggttgaatttttttttattaattaaagtatcacttgattaattttcatcttgtgatgatataatttcattttggtagattattatacacaatgatcataaaaataaaaaatcttggttttcggctattttgttgataatttgttttctatataattgctaagtacacatttaacaaattattatccgttcttgctaagaggaatttaaagtttaattaattaatatagtttttgttttgaaagcaataattaatagggtttttacactaaatttttaattttatttatttatttttactgtgggatagaatttttttaaaaaatattatataagtttatacgtactatgttgttttttagttgttctaccgttattttaattgttctgttttgttactttacagttattttataaaaaaacagtatttttacacgtgacagtaaaattataaatttttacttaaaatctaatatttttgtgaaaactctgattaatattgtttatatctttcgatatatactatagtttttgattcaaaatccaactacatatgagaagtcaaaaaaacatataaatacatataaatggtcattaattaatagatgactaaaggactagaaattataacaaaccgcacactttaattaataatgataataataacgtaattattatattgttttttggaatacataatttctttctgcatcttaaatattgttatggacaagagtgcaacgcttgtttgtttttactattttacatttattaataaaaaggtatagtacgatattttattttattttttttttaaattttaggaaaatacaatggacaatttgatcttaactagattttgagttgaatttaaataacttatactgtgaaattaaaaaattatatcactttttctatggataaacgtaaactatatactaaataattaattttacataattacttgatattatttttaaattttaattatgaagcaaaagaaaattgcgacaatgaagtaaattacttcaagtaatattacaaggttaagataagaactaaaagtcctttaaaaaaaataataaataagaaataaaacaagaagtatacgtaccaaattgctgaatattatcaaattattaatatgttgtataaaataatttgttaatcgtactagtacgtacgagtggttgcattttcctactcagctttattctgatgataaagttgggcacataaatatgagcttggaagaaagacccacttgaccaaacaaattacttcatcttaaatcaaattgtgaggtattaggtttcttgcaattaactccaaaattattaattagaaaacaaaattattaggagaattaatcaaatacgtgtatacagtcggtatattcataaatcccatctctaattgttatattaatggtaaacataagattctcaatctaattttcgacaattttttttttaatataannnnnnnnaagataattcctaacacgaacagactagacacagaataatgtaaacagttttacataacacaattagataggatttttattaaattttattttaacaaaaaatcagttcagggcctatttgtaccattttggaaaat

SEQ ID NO: 25907 - DNA, 1903 bp, Cannabis sativa
agtatctatcaaactataagggtttttctttctttctaaattccttctatactctgatcactgagtaactaactctaaatttaaggctaaagaagcaaatttacagtgagctataaaaagacaacaacatttcacttatatgatatgaatgagagctactgctattggtaactagctatataaatgcaactccatacttgtcatcttctaaaagttaggcttggctttgtttcacagaaaagaaagttgaaataaaaaaataaagggaaatctatgatctaacaaatttgatgataaatactctatatttagatgtgtatttggaagagaaaaaataaataaataaatagaacaatgtagatgtactagaacggcagtccacaaagacagtctctttatccttagtttcagagttgtttttgtaaaataattaatgaatcaaacaaattaatcttaaattgttgaatctatattgaaccaaaccaatttcggaccattattttagtcataaattatcactaaaatcaactatgaaagttaatgaaaagaaaagaaattttgaaccattattttagtcattatatatagaacaacatttatgcagagatgagaagaaattttttaaacaaaagggtatagtacatttctaattgctttattcatttaatgttatgaagaagtttaatctataattgtaaagagtagagtgcagatgcaagctaaatgatacattgtcatatttccttgatgcatgagagaactgagagtgctactaatagttctctatcgtactcgaattaattaagcataacatatatagttaaacttgaagaactataacactattgtggctgaagaaaaaccagtgtaaagagcatgggatttggaacatcacttctctctgatttctctacaatcacagcttaaaattatacaagaaacttttaaccaatttcttaccaagatagctatgaagccaagagaataatacctaagacataatcatggaagtaaacttaaagaaaactatatgattctgagtaatgttacatactccagtctcatgtttgactaaaattgtaaaatcgaatctacaggccattgaagttaccttcgatacgtcgtctgctaggaagaactttaagaaactcggctcaaagcttctcgacgttaatggctttctcaatgtcactcagcctcatgctctcaataaacaaggaccctagaatagaatttggattaatttttttaaaatataaaacacaaatacccattgtttaatatttttttttaaaaaaaaaacccattgtttaatatgattattctctgcattttcttagaatcccatgaatgattaaaacataagagcaaataagaagacagagatgtgaaaaattgcaaggcatcaacaactacggtactaacgacgacaaaagattaagctgcccaaatcttaaaaattaagcaccaaaatgaatataacgaatcgttgctcacctggttcagccgtcgagtctgctgcgcgtacggagaagcaccggcctccgcctgagagggaggacctcgcgccagcctcagatggggaattttttttgggtctggttggggtaatcgcacgagagagaggggtaggtgtgggcactggggaagaggatgaatattgggctgatatattttatttttttaaaaaaaataaaatggcctatggtgacgtgcaaagcgtgtgaccaaacaggtttgcccacgctttctgcgcgtcactaaacgtggctttagtgacgcgcagaaagtgtggggaaacctgtttggtcacacgcgtggcacgtcaccataggccatgttttctttttaatttttataaaattatatattttgggttttatttttagtgacactccatatt

SEQ ID NO: 25908 - DNA, 2870 bp, Cannabis sativa
aatgcagttttcaaattaatccaattagattttgatttattaagttatatgaatgatgataaaatgtaaatcttctaattcttacatatacatagtggagtacccttaaattgtgtagtgttataagcagattagaggagataagtttctcttaccacaataagttttcctttgttctccggcaattttgcaagccttagggctgccacagtattagctccagatgatatccctacctgcaaatgttatagggtgtgagagaaaacatcatgcaacaaggttttggttcttgatataatgaggccaattgagttttcatatgaaatctaagtttggcacaagttttgatccatctggttcagtgttcagagagtttgagaatttaccataagtccctctttcaaagccaattgccttgccatgttaactgcatcttcactactaacctgcacaaataataagtaccaaaagacagttaaccaacatttaaacttcgaaattatagtcttcgctcttagaacttagaagcattggtctttttttgactacttgcctcaagaactttgtccattacatccatgtccaatatatctggcttaaatccaaccccatttccagtaatatgatgaggacctaatccaataagcaaaagcacaatgaacttattccatgattgaagcaaccaaacagagaattttacaagagaaagacaccaaaacagagaactaaaccaaccagttgtttacctggtttgccaccattaagtacattactctcagaaggctctactccatatatctgccatgaacaaaacagattgaatatagaaatgaataatggaattcaaacaagggatcgtgtacaaataggctgaagtatgttataaaacgaaaaatgaaacttaaaaattacaccttaacattgggattttgggacttgagatactgtccaaccccagagacagtgccaccgctaccaattcccataacaaagatatcgacttgtccactcgtgtcctcccatatctcagggcccgtagtttcataatgtacctatttttttccccaaaagtacaaaggttagtgatccatccattaagcataaaaaccaagatgttcattgagcacatacaacagaatcatggagctaaacagaaatcaaacattttaaattaagtacctgagtgttagcaggatttgagaattgttggagcatgaaagcatcaggagtagattccagaagttggtacgccttcttaacggttcctcccatacccttggttggatcagtgagtattaagtcagcaccaaatgccctcatgactactctgcgctccaagctcgtgtaagaaggcatggttagaaccattttataccctctcatggctgccataaatgccatactgattcccatatttcctgatgttggctctattaaagttgtctgaagcattgacaaataaagcttaactattacaccaaaaacaaaaactaaagtaccaacaacaaatcacacacactactgagctagctaacctttccgggagtaattaagttcttcttctcagcatcattcagcatagaaaatgctggtctgatgaacagcagtaacaccaacaaaacaatattcatgattgatctcatttacagagttaaaattttgaaaacaaaataagcaaggtaaactgatataatatttattacctgtctttgatgctagatgtaggttgcatcatctcttgcttaacagcaatatatgctccacagccttcagtaactttgttaagatagactagaggagttcttccaatgagctgaaaataacacaaatagattcaattcaaaactaacaaaaaatgctaacttgctcataagccttttatatataatatgtaacttttgtgttcttctttccaccaacaacaagaacctaattcccaaattggtaatcattgcttgaatatatgttgattgtacaaaatattagattgagtttttctagttgaccatttcacaggcaacttttcagtacaaattaaggaataaatgttctcaatcttaccaacttctcctactaatccagtgacaggggctaatgtcattttattttttagatttagtggagctttgttcaattttttccaaaattttagactacaataatgaaaaatagaaaataaatcacaatactcgtgtcaaactaaactaagtaaaaaaaaggtacggtaaaaattaatttttaaaaaagtaaaaaaaaaaaaaaaaagagcaggaatccattgaaacttcacacctgcaaattatttttcttaaatgatcataaatcatacaactcaatttataattaaagatctcatcactatgtttttttttttttttgaataacaccactatgttttcttggtttaaaagtaatcatagaaaataataatatattttttcttaacaataataatatatgattttagttcataaaaaagtcatagaacattttctcaggaaaaagaaataacaaaaggtataaatcaaataacagcataatagagcagcgcctgtatgtaaagcgatttatattaaaatttatttttagaaaattcttgcatagatagctctaaaaattataattaattaatactggctgtttaatcataaaaaatatatatattaaattctaaaacgagaaaagcgttaccactttctctttcggaatataattactctgtacacctagtaaaaaaacagaccgaataactgacagctttccaactattccactaattaatttccatttaaaaaaaaaaacaaagctaagcagtgggtatcaataacataaacagcaaaaaattagagaaaagaatgaaggaggttttt

SEQ ID NO: 25909 - DNA, 2831 bp, Cannabis sativa
aaaaaagacatttgacaaattatataaaaatacataattagaattaactaacttgaagagagagtatatatatagtgaaaagaaaagtaccgataaatctctataaataatattaaataaaaattatcatatttttttcctgatttttttccattatatttaattaaaaatcaaataaatgctaagaatcaataataaagaagcaaaaagtgctcaaaaaaaaatctgattgaagtttttcccaaaacaccaattttctttttcttttcttttcttttctttccctttccctttcctttctttttccaaattttcctgagaaagtgacagttcagtaatcagtagtagtaagttatagggtcacaacaagccagcctcaaagaggtttcttctccttaaagtctcatccacaagcttgaaagtcttcttaacgagcttttgatcgagcgcggtggttctgtagatcttgaaaactcggtctactctatcgggagctgtgctttgaaaatacaattcctcaaatttcttcttcacaaacctgaaatgaatggagagatttgaaatagttcaaattacttttccgaggaaaaatctcgacttacgatccccgcttaaacttttacaatactgcactagaaaactatagcaattgctaagcacatcccgagaataaactcgaaccttttatgggatcatgaataatcttcaaaggtgaaaattagtggtggcgattcgtgttgttgtgtcatatttgtgttcgtgttatgcaaaaagacatgtctaattagttaactgtaacccgagctatatatatttcgtgttcagaaatctcaaccctgacttaatttgctaagcactcaacataggtttactatctttaattcgaaaggacaacgaaagaggaaaattattactcgtatgcatgttcaatctcttgttttcccgttgataccggttgataatctttaaaccactcgcatgtattaagcggtacctgcagaacagagatgaagaacatttaatcgaaagctaattctcgagcagcgttataaatggacattgttcgctactactctacttacatttagcaccttcttctcgaatatatcgaacttgtttagaaacagcatgaaggatgtcttctgtattccaaaaccgaaaaaaaaaaaaaaaatcttagcattcttgtcgatacaacaagcaaagacacaataaaaacaatgtagcaagaaagaaaaacctcgaaacacggttgcttcaagacccattcaaagagttctttcgtctccatcattcggttcttgttttcatcttcaaatagtgtttgatcatacctaagaaaacaaaaaggaaattggcttaaataaccgaaattcaggctcagcaccattgtagctacaagcatttgattaggcaaaaaacatttacttactcactaattgcagcacaaaaaatcactgctgtaacaccttcgaacagatgaatccatttccgtctctcgtttctctgtcctccaacatcgaatagtctgtatacttcaccacttttcttattttctccaacaggactgccaaattaatagtttttcacataaaatcttgtgagcgttttgagctgaattgtacgacggtaaagtcattattcacttcaatgaagatatctacctgaactgaatctctactacacccgttgtacgaactctagcatagagaacatcctcctgtaccgtagaatacaacaatcgtgtataagatatgaaattctcctaacatcgaagtaataatacccgagcataaatttcaatattgtaacatgataataagaaaatataaacagttaaccggtaataggacaactacatgccccgataagaaagttaagttcattatgagatctttgatacacaattattcaccactcggctttttaatgctaaaactatcttaatgaagagcgttagaagaagggtttaggccctgtttggtatagcttttgtttatacttatagcttctcaaaaaagaccatctttgctacacaattattcactaatcagctttttaatgataagatcgccttaatgaagcgaattaaaggatttaggcttcatttgacatagattttgcttatacttatagcttcacaaaagtgtctttttagttctaaaaccttaaagcagcttaaaataagctttatccaaacatggcttagtctatgaacaacattcgggtccacatatttcgtttatcactacattattttcgggaattcattgaacaaaaagaaccttccctaacaatgcactttagaaaagaatgtacaactcagatgccccggtatatattgacgattataaagaaacaaagaatactgcaaaactttagtttaggaacctttgttggaagataattggagtccgacaatctttccagattctccatgaaataatgagcacagtcgggaacttggagttcattgccacgattataagtttcctatagcgatcaaggtacacagatattaaagatgacacaataaagcaaagggataaacacatcaaagagcagaccgagcaacgaatcatcatttggactgatgtaaccagttgaaggacaaatacctgaatcgcgggatctttccataaagtctctatttcctgtgcaagatctttggtgagacggggatattccaacttgcctccaatttccgatagtttttctccgatctcctaaagaacattttattattattattgtcattttgttatcttgggcaatgttcaaacacgcgtagacagcagaactaagttctttctttcaacttaaattttagt

SEQ ID NO: 25910 - DNA, 1494 bp, Cannabis sativa
aatacacaaaaccacacacaaatacataatacccatttctcaattttcccttaatcaaacatatttgaatgccattagcataaataaacagctaagattagttttttattttcttcatacaaaaaatccccaaaaacaattatacaaaatggaatggaatgagagtaccttatcatcctcaaaaaccacagtagaggggatttccttgctgataattttatcaaatctgcacatttcaaatcagaaaaatcaatatttttttcttttaaatgattctcatacatgaaaggaaagatgaaagtaagaaagagagatacatacatggtgggagaatcagaaggaagagcagccaaggcagcttctttctcagaagccatggaagtagagagtagggatggtttaggaggaaaaagggtggttgagaaatgtgagtttagtactgcaaaacggctcctatttatcatcaaattcgattctgacacagttttgttgtttatgtttatctttctcatttcaccattttttttgagaccaaactttttgattcttcctatttaaggccaatgaaatactaacacatcacatcacataaaacttttttattgtatttttttgaaaaatgacacaaaatgttacaacaatttttaagccaaaatatatacatatagagatccattatagtgacttgaataggagcattgctaggttcggacctgaagtataatggatcataagaaaaacaaaatggctcttatttaaaaaaaatatgatatttttcaaaattagttaaaaaatgtatagttttagaagagattaatttttttaggcctttggattaggggtagtaattcgtgttcgcgggtcgtgttcgtgttgtgttaagaactataagaggtatatacttgacccgaacacaactcatttaataatcatgatcgaaaataaaactcgaacacgatcagtttataaaagggtcgacactaacacgcttatgatgtattcaacacctgtataacccatttctgacatgttaaagtaataaaataactttaaataggtcatccgagtcagttttgtattagtcgtgttaacttgaacacgacctgtttattaaaggggttagacaagtcaacccgaacacgatctaaacccgtttaaggcaaacccaaacccgctaactctcgtgcaagtttcaagtcgtgttatcgtatttgactcgttttgctggccctattctgggctaagtagaccctaagcacaaacctagcctgcctataccaaggatcagacctaattgctttggtgcctagagtcttgtgactagttagcgataaaaattattacatgagacacgattgttaattgtacaaataagaatatgacatcttggagggtaattgagcaactggtatctcttagcgtttctctttgaataaacatgttattagaaaatgattttattattgaatgattaaataaagtgtacagaaatag

SEQ ID NO: 25911 - DNA, 5504 bp, Cannabis sativa
gtactaggctgttaagctcttccttgaatctcttagctcgtgccctagtcactggacccactggaattggacttgatacttggtccttgatgtcctcatcagttatagtccaggtctcggtccgagttcagctctaggtgtcaatcccattctttgtccgggtttaggttggggtccttgtcagggtctggatcctggttagggttgcgagtcttaggaccaagtgagggtttaggactaggtgaggtctaggtcccggtcaaggttcaggtcctaggtcttaggtctcactcctagtccaagttgtggtctgagtttgggttatggtttgggttcggttctggtgtcaggtcctggtcctagtcacagttttagttctaatttatggtctgggtttggttttgggtccgggtttgggtcaaggttggggttggggtgcaagtcttattccgagtccgggtactggtttctcagatctcgatctgggtccaggtctgaatcaaggtccaggtttaggtcctcggtctaggtcccaagtttaggtctgggtttgcatttgggtcctggtccaagtctcgtgttttgatcccggtctttgtctgggtcggtattcgggaccgggtctgggttcatgtccatgtccaggtctgaataccaatttaggtcaagggcttggtctgggtttgggatcgagtcccgagttcgggttcaagtctcagtcctagtcatggtccgggacagggtccgagagtgggtccgagttcgagttccgaggcttggttcgttctagttctgggtcgcggtgcaggtcaatgtcttggtcacggtcctgatcctgttccagggtcctggtgacattctagttcaagtttcggttttgggtttagggtctgggtttgggtccagtacctgatccagctttggctcttggtccgagtccaaaatcaagacatcgactatgggtcttttccaagccccatttctctgatcccaggaaaacatctggatcccaatcacgtgtcccagtcttgtttcagttcatctcccaggtctgggtctgggtctaggtccaggactgagattggggtccaattttaggtctcgatcccagttgtcggtcccgagtcatgttcaatgttcgagtctgagtttaggtctaggtttcgagtcccggttagggtttggattcaagttttggacccaatcccagggtgggtttgtgtccgagtgtggatcctggtccggttacaattttgggtctgggtccatgtccttgtccttgtcctaggtcctaatcagcttttagtttcggttccagtttcaagtcacgaggtacaggttcggggcaaggtttaggtctgcatttcggtctcgagtagggttcgaggctggctctggttccgggttcgggcctgggtctaggtctcagtcccgttcaaagatcttggtctggttccagttcaagtttcagtttttgttccccattgtgggtctgggtcttggtatgtgtccgggtcctgatttgagtttgagtttgggttcgcgttctggtctaagtgctagatctagacatcgacaatgaatcgggtccaaccatcgagtcccagatcccaagtccagaggggggtgctatgtccaggtttgggtctagggtcaggtccccgatcctgatccaagttctaaggcccatgttctaggcctagttttggggcccaattcttaggtcagggtcccccatctatattcgggtcctaggtcccggtccgagttcgggtccgggtccagtccgagtccaggtcccagtttggtttcaggtacgtgttcgggtcccagtcccagtctagctctgggtttcgggtcctaagtccgagtctggttcttgggtcctgggttcggccacagttttggggtcttggtctaggtcctatttaaggtcttggtccaggtcccggtcttagtttaggtcccaggtcacaagtgctggtctagttcaagtcccagtatgggttctggtctgagtttgggattaggtttgggtcctgttacagtcccagtcctggtccgattctggttataagtctgggtccggtatcgggtcgtacctgaactagggacccgatcccagacccagactcggacctagacatggatctagatacaaaccttgacttgaacctagactcggacccatacccagaccgagattaacatgtgggacttgaatatggaccgagacccagacccaaacctggacccgtacccaagacttggactcagacctatacccaaacccaaacccagacagggatccaaacttggacccagacccaactctggacttgaaccaggactcaatccccaacccaaacccggacctgaacctgaacctgaacacggaatcgaaataagaactgggactaggacccgaactaggacctaggacccagatctggatgggggacctagacccgagatccgagcccgcaccaagatctgaactcgaacttggaactcaaaacaaagattttgaccctgaccgagatttaaaacccgaacccgaactctgactacgacttgaagctccaccgggtcctagacttggaccgggacctaggacccagacctagttgggggacctagacccgggactcgggcttcggagacctgaccccgaacccagaccctgaacttggacccagaccaggtcttgggacccgaagtggaactagacttggactcgagactgtgatcctgatctagacccggggcttggacctgacccatagtcgatgttttgatctgggacccatacccggactcaaacccaaacccggactcggacccaaacgcggaaccaaacctggacacttacaccgtgaccagaaattggaagcggaactggaagcggactgagacttgggaacaagaccaagggactaggacccagacccacacccggaccaggacacagactcgaattaaaactaggatcgggactcgagacacaaacccaaacccagacatggacttggatccagagccaaacgtagaaccaggatcgggattggaaactcagacttggaccctaatccagacctagattggggacccgaacctgaaattagaaccagaatcgggacccaagatttataatgtgacccaagactggaccgcagtcttggtcccaaacccgcgcccagacacggactgggacccaagatctgaatcgaaacgagatcgggacccaagattgggaactggatcttgacacatgacctagggcttggacctaacctgtagtgggtgtgtggatcttggaatcttaccaagacccaaagttggaaccatttcaaaactaggaaccaaacccagactcggactaagaacctgaaatttgaacaagaactggaattaggaccttggaacaagaattggacctggacctagaactggatcttggtgcggaaccgaacacggacctagattgggatcgatacctgaaccaaaacccaaactcggacccagacttgcgccaagacttgtgacccagaacctggaacccagcacccgtgacctgggacggggactagatcttagaaacgtaccaaaacttggacccagacccagacctagaccaagacccggacgcagacccggaccaaaacccaaacccaaatctagacccaaacccgtaccataactcagacacgaacccgagactcaacctcaaacccgggactcggacctagattgagccttgaacctgtactgggactggagcttgaattaggatcgggaccgggacttgggacccgggactcggacctgggacctgagaaccaaaccgttaccaagatgggggacctgggccccaaacctgaacctggaccaagacctagatcaaggatccagacctagatgggggacttggacccaaaactaggcccgaccgggacctagacccaaaacttcaccccaaactcaaaacacaggactcgaccttggacctgaaacctaggaactgaataccaggacacacctctgaacccaaacccaaaccaagatctagatatgaatctagacctaaggctttctcttgacccatagtcagtatttgaatttaggacccgaacccaaatccgtaccaagactcggaccttaacccgaaccgggatccaaacccgatcccagactcggaattggaatcggaccagcactgggatgagaacccaaacttgggactgtaacaggacccaaacctaaaccaaaacttagaccaaaacacatatcggtacttggacccagaatgggacccatgacctggaacctaaaccaagaccaggacctggacccagaccaagacccaaacctaaaaattggggccaaacccagaacccaagaacaaaaactcggacttgggacccaaaacctaaacccagactaggatgggacccaaacccaaatcgggacctggactcggacaggaacatgagacatgaacccgaaccgaaacaacaacttggacctggactgcaacctaggacccgaacatagatgggggacctagacctaggaatttgccccccagattgggaccagaacttgggcatcaaaacttggattacaattcgggacgcgaccctagacccaaacctcgacgtaggacccaccttgggacttggcatctgggactcaatgcttggactccacccatacctcgttacttgaaaccagaaccgaaacaagaagcgaatcgagacctaagaataggacaaggacctagacccaaaattgtaatcggactaggacccagactcggatacagacccacaatcggattttgtgtttgggttcgggtttgggtctaggtctaggtcggtgtctaagtcctggtccgagtttgggtccgggtctgggtccaggtttggatcctgatctaggtctgggttcgggtttaggtccgagttagggtccctggtgcgggtccatgtttgtgtctgggtcaagatgtctatccagatctaggtctctggtttcgatcccagtcttggtcttggtccgagtcaaagttcgtatccagatcccaatctaggaccgagttagtgtctgcgatcgggtcctagatttaggtgtgggtcaaggcccgagttcctatctcgatttgggtctggggctaggtccgagttcgcttttaagtctgggtccgggtccttgtcaggttctagttttgagtcctggtctaggtctgggttcgggtttgggtcctggtccaggttcggaacctagtctgagtttgagtcccacatccagacacctactacgggtctgttccaagccctgtttcccggatctcgagtccagatctaaatccctgtcacgggtcccggtgtggttctagtttaggtcccaggtctgagtttggattcgagatcgagactggggtgcggttctaggtcctggccccagtttgtatcatgagtctggttccatgtttgggtctgagt

SEQ ID NO: 25912 - DNA, 3079 bp, Cannabis sativa
aataagatggggatcataataattcttatttttctggttgttcatttctttaattttcaattattattttgttttatttacttttctccaatatttttattaatcaaatagaaataaagaattaactaattggtaattgataatcaatcctagtgggaacgatactctattttatcattatgctacttgattcgattgctatacttgcgtatcaattttaccaaacaagtttttggtggcgtacgggggattgaaattatcaatatcagtttaattaatttttattctaatttgatttttattttctcttttttctaacctgtttggttgagattttttcctatctcatgtgaatctattatatgcgcagtagaattggtgcagagaaccttgttcctttgaatcctgagattgagaaatctcacaagcaaaacaaaaagaacaagagagaagcaaagaaatcatagagcatggcgcataatgaaggggatgatctaattcttggagttatgcaaggaggtcagactcactctaatgttgaaaagagcctgcatgattatgtactccttactcttacgagggtacagaacagtatcagaccaccagcagtggaggccaacaactttgagatcaagccagctatcttgcaaatggtgcagtccactctccaatttagtaggttgcctactggaagatcctcacactcactcggctaattttctagaattgtgtggtactttcaaatacaatggagtaagtgatgatgctatcaaactgagattttttccattctccctaaaggaaagagcgaaaaactagctgaattatctacaaccaaattctatagtcacttggcaagatctgactcaaaagtttttatctaaattcttccctccttcaaaagttgctaaactgaggggagaaataaataactattatgataaatagtcagctccatggctcctttaagggggaaaaggtcttcgacaaggtaaccctatttcttctttagtttgtgttgattatgaaatacttgacctagttgctccttcatgccattagaatcaaaggttttgggtttcatcctctttgcaaagatatgaagcttgtcaacctctgctttgctgacaatttagttatcttttgcaaagataatctaaagtctattcagatcattaaacagactattaactgcttttgtgaaacaacaggtcttacaatcaataaaacaaagtctcaagtttactttggtggtgttaaagttgattgtaaaaaccaactattgaacattgttattatggaagagggagtgtttcctttaaagtacttggcttgaggcaaacaaagtggtgaacaactaactgtggtggaattctcgatcaaattcaacgaatacttcacaattggtctagtaagaatctttcctttgcgtgaagagcccaacttatccattccatgttattgggcattagaaattattgaatgagtatatttattctccttcaaaaaattgttgctttaattgataaatactgcagagattttctttggggttcaaatgggaattgtagtaaatttcaccctgcttcttgggaaaaagtttgtttacctaagaagtttggtggaactgggttttctaaaggtcgaaaataaaatatttctttgatggctaagtatacttgggcaagcaagacaatctatgggttaaatggattaactccattcatctaaaaggtgaagacttttggctagggccgacaaaaccggtcagacacgataacacgactcgaaacctgcacgagagttaacgagtttgggttttccttaaatgggttcgggttgactcgtctagcctgtctaataaacggatcgtgttcaggttgacacggctaacacgatattgacccgttaataatctatttaaagttattttagtattttaacgtgtcataaataagttataaacgtgttgaatacttcataaacgtgttattggttgacatgtttaaacaaaatatgcttataaacgggttacacgggtcgtgtcgtgtcaacccgtttataaacaagtcgcgttcaagtttcattttttgacacgattattaaacgggtcgtgttcaggtcaagcatgtacctgttatacatgggtctcgacacgacacgaacacaacctgcaaacacgaattgccacccctacttttggctagcttagccctcttaaaaatgacacaagatgtactttcgaaagcttatgaagctaagatatttgtttgataaagatacattgactaatgcagttggaaagggaaattcaaatctaaacagttctatatctcccttatttctgttgagaatgtgaagtatgctactgtaatttggcatagaatgtgcgttccaaaataccatttcactgtgtggtaggccttgaacaaccagttattaacctgagatcatttagctaaagttctggtgctatcctctaccctctgtcctatttgtgaagagagaaatgaatcgcatcagcatgttttttttttcgagtgtgtgtttgcaaggaaagcccttgctgatgtttcctcctggtttggtctattcaaatggtcgttgactatggaggagtggcattcctggtgtgataatatgcggcctggttgagtggatcaagtattaatgccatgatttctcctttgatttattttgtttggagaaatcgaaactattgagtttttgataatacttattattcagttaagatggtcactttatcaactaagcttgccattaaagctagaattatgagtcttttttcttttctaaggaacaaaagagactgatgttttgaacacgatttgtaattaatgcttagttttctaatttttgtgtggggctgtctttgtggatagctgcctttatttctttgctttgtttgaatgatttttttttttaaaaaataaattattttccctctaaaagtttagggtttattttataaatatggcttttttgtaagtggtttagaaatatatggagaaataaagaaattttataaaaactggaaaaatgaataaaaaatttaaaa

SEQ ID NO: 25913 - DNA, 3759 bp, Cannabis sativa
  modified_base (3713)..(3723): a, c, t, g, unknown or other
tgtataagagccattcaatccgtgggtgtaagggcccaatggaagcttgaagcgaggacgttacagtgagtgattaaagattactagaaaaatttgcttatcttcagtttttaagcgtgtttattttcggttaaataaatacttgatactgaagacaattgaggcaaatacataggtccagaatataccgaaaacataggtgtttattttcttaaaaaacatgatatttttatcctaaattgtagtcattgtttaacactgatgtcgtcgatccccaaaatcgatcctaaatcaaacaattattttctaactatgaacccacttaatcttgcacttatatacaaaatattaataggttttcaataataaaatccataaacaacattattttcggattaaaattaaaagttagaaatgtttacttgattttcgatcatcaccactaaatttttgagtaccgccattaattttctaacaccactgtgaattttccgaccaccaccacaggtatccaaccacatatcacacacgcttaaaaatataaaaaatacacacacaaaatgccatgtaaggtaaaatacatatattaacgtgatgcacacctcaatgcaagccaaaaggcaacatcgaaaccctcaaaattatagccattagccgactgcccttctccaaaaattctaaaattttgtcggcctaaactcttacatctactctcatatcctaaaataaattatttttgtagtgtatatgtgtttttaggtgaggaaactagaagatttgaaaattaaaaaaagaaaaaaagaaaaatgatgcttcatgcatggagaaaataaagctttaagagcaatggtggcggtgctttttcgttgagagaaagatgaagaagaaagaacaaatgagagtttgagatctcaaagacacaaatcttcatgtgtatctgatatgaggttaggccgttaaataatcgaagatataagcctccacttgtctatgatatatgagataaagatattagaggcttatgtcttcggttattttgaaataattattcatatctatggttattttaaaaataatacggagatataagtttgtaattttattcttttttctttctagacttttgtctttggattttattttatttttcttgtaaattaaagatggaaaatatacactatttttctagtactgtctacattatttatttaaataaaatttaatattaaattacatatataataatatttcatattttatgatgaatgcttgccaatcccttaccatttttcttatattttaataatattaattacagttctttctcaatctgaatacaataaataaagtgtagtgattttgtttttgtggccacatgctacacaatttacaaagcaagggacactgtttttaatgtctttctctctttttagaaaaattctgaccccgaaactctgataataacgggtgatcatttaatgaaattaatgtcatttattaataccaagcctagactactactactacatcattataaattcaacctcaaataaaaatatttaaataaattaattaattgcaccaaaaaaacaaaaacaaatatttaaataatttaattaattgcaccaaaaaaaaacaaaaacaaagctcaacaaaccccacatcccatcaataaataaagagcattaatattaaacactaattaaatttgacactagttaaagataacactttaaagtatttctaataatttctctatttaatcttttaaaatataaaactaaattttacttttttattttatagcacaattttatattgtaccatacatcattttatttaaaatacattatcaaatctccattttttttaaaaaaaaattattatattttatttattttaaaaatacataatatatatatattaatatatacacacatctctatacaaaacttattattaaaatccaaaataatttgtaaaatatatttagagcaatagtattctataaatatagaacacaagtaataaattttaaaaaaacttaaaattgaagaaagagtttaaagcatttgttgtaacgcgttcttagtacagttctttaaattttttgaagtttttttattttagagaagttgttgtgagtgttcttacgactaattaacaatattctctaaaagttattatcttaaattatacgtgagtctgtgacttaatacttaattatattaacagtgacaccgaagagcatactaaacaccattcgtacctcttagtattcctcataatgagttacaattaataatataccttctaatcatataatatctattattattgaaactagtggtgcctaacatattctaaatggcgccccgtaataaattagcaatacttcctaaaaataatttcattaaattatatgagactcgaagagcatactaaacaccattcgtaccttttagtattcctcataatgagttacaattaataatacccaactttctaatcatgtaatatctattgttattagatgttagtggtgcctaacatattttgttaatccgaaattaaaaacaataaaattggaacgaaataccgttagaaaattctggctgagtcgcggacaatgtcgctttctttaagacgtttcgcggctctgcccgaagtgtgcacggtagtttagcaaccacggcgtccccaggataaaacaacatctgtatatgtactatatgttctgcaccgaactatatcgctctattacaccttaaattttgctatgagaaaatcgtaaggaagaaagaaatttttttgatattgaaaaggatgcacctcacccgctagcccagctcgaatcggtcggacggcggcggcgcgcgcgcgtggtggtctagtgtgtgagtcttcacccatgcgcgtaaaattggatacctcttgaggcccatacccaattctcaaacatgcactatatatacacttctaataataaagtgtttctatctcatgtggaactccaatcattcacacatttcacttttcattttgatacaatttcacaaaagttctaacacattttataaggaacgcttcgtaattagttagtgatattatctaaacgtaaattttttaagttatataaaactcaatacttaattagtaattataccaataataatatgacaccgagaaaaataatacacactaataatactttttaataattatctaattaataacattcaaaatgtactaggacttgtggttagctagatgtaccacattttaaagatgatgaggtaagagaacacgtcatccttactccttagcaacgaatatccttagtataattatacgtataccatacgattcaatggtgctaattaatgtggtttagtaactaataaatgagattatttatattgcatttgcatgcaaacgtatacagagaatattaaggaatttttattttttatatattttaattataagatcatctcgaatggatagtatatattttaagttaaatttaacctaaattataacacaaaattatatttgaccaaatttttatatttgtgctacaatgtataaggtgcaaattaactataaaaattaataataccattaatactcattaaaaatatacaaacaattgactttgtttatattattttaataacttataaatataaaaatattttttattaatgaannnnnnnnnnntaattaaaaaagtaatatttattgtgggctaaattt

SEQ ID NO: 25914 - DNA, 4834 bp, Cannabis sativa
tcttgcgtaattattaggactattagatagtatgtagggtgtggtagtataagaggatttttctttgggttaatatctttgaagaaaattcaagactgaaaaccaatgttcaagatccaataacagaattaaactatctcagtttaagaacataaaataaacaattagggaacaagaattaaatcaaagaaaagcatataaaacaacacagaattatgcttgttcggacacaacatcaatgcgatgttgttcctacatccagtgctagagtcactatccctttcctttacccaatcagaacaactttagtacaagagtcacagtcgagctatacagagaaacacccagtcagatgtgtgtgcgtatatatttatatatatatatatattatataaatctctctaaatccgagtaagccctttcaaacagttaagctagtccatgcaaacctccccaagaaaccagctctttctttctctgtactcactagcctcattcttgaatatataaggcttcaagatacaacttaactaagtgacagctaagttagttgggaccaagatcaattaaaaacggataactgatttctgttgggatttgtaagtgctataccgcaatctttttatttttgatttggatgctgatgaaaataaaatgtgaattatgcaatacagatagagatccttttatgtgaggttagacaataagttaatttcacataattatagttaggtagctgtcgaaaatttgaattttagttagctgcaaatcttaggtgtagacattatcaagtgtttacgtgagttgtcatattggttaaactttgactccgttttgcctttagggtttaagaaattcataatagtattggcattcttatgcgaacttaaagcattatatcttattttgttctacattgcctagtatttgttttcttgtaccctttcacttaacattatgaacttttggacagctcccaatcttgggaatgggcttgatcttgaaaaatactcatggacgcagagcctgcaagaagttactgcagttatcccagtgcccgctggaaccaagtcaaggtcggttgtctgtgatataaagaagaaccatctaaaggttggactcaagggtcagccacctatcattgatgtaagtatgagtctgtaatgtaatagctgtttggtggagtttcttttgttaattttgtttgttgctaccgccgactattaatataaatatcaatttcatgtagggggagctctttcggcccgtcaagcctgatgattgttactggagcataggtatggtactgcaaacacatataaaatcatttttccgaagactattctgtatatcaaaacaactcacaacgtaaatgtttgggcttaccaatcgactgttaaaatttttactttgattctttctgtgctcaacattttggagtttgtgctttatgtgcttttgctgggttattttattcatgaccaagtttctggttctattcatgagtaacgggtaatatcagattgccaaatcttctgctatgcctgagaatgcatatgtgattgtgggatcactgtgtgtgtgccatgtctgagaatgtgatagtctttgatatttgaaagttgtattcatatgagtttttgaatgtgccatccttaatgcagaggatcaaagttctatctctattcttttgaccaagcatgatcaaatggattggtggaaatctttggtgaaaggtgatcctgagattgacacccagaaagttgaacctgaatcaagcaagttatctgacctggacccggaaactcgacagacagttgaaaagatgatggtaagctatatgttttcattatttacatcaaaaagggactttaaatttttttcatcaggttcatactcagctgagttctttagtttatgctttacatattcagacagatgctttggctacctagaccactgaaactataatccaaccattttgttcttgtttacagtttgatcagagacagaagtctatggggctcccaagcagtgaagaaatgcagaaagagaaccttctgaagaaattcatggctgaggtgaacccctaagacacaaaaattaaccatcttttttaatatcaactcctcacttatatttactaataaagatttgtgtgttttgttttacagcacccggagatggatttttcaagggctaagatatcataagttgcttgccattcaaaaatgtgtgtttcatcccaactttaccatatggatacaagttacctattagggtttacctcaatttttcttgtcattttttgatgctagactgtttctgaactcttatcatataatgatataataatagcaaagtttatattttaatcgttttgtttgattcatcttcctcgtggaaattagttgagaaaacccaaatactctctatgttagtttcgattttatgtgtcgttttttgtattcttctaaccaaaagcaaagatttttatctcatttttgttatgattacaacgacccaaacatttcataagggtttcaaaagtgaaataataatggagaacaaaaattattctcctcatgattttcatcaacttattcttgaactaacactataaaatgttagtggtttggtcaaaaagaaagctttagtgcataaattaatatacatattgaaaccatgtaaacagcattgtgaaacttttatgtacttgggcatttctttaatatttttctctcaacaattctaatgccttgaccatttttcttctttctgttttgtattaataattactcattaatcaaacatgggttgttattgtatgtatatatattttaatttttatatataaaaaatttgagggcagtggatgattatgatttcaagacaagcaaattaattttagttacaaatataatgtaaagatattaatcattataaacaacaaagataggttttgtcctaaggtaaggaaaatattatatggagctaaatgtcactcagttaaatatataaaaattgaacgaaaaaagaaaaaaagaaatataatcactaaagacaagtgccaaacaaacttacaaatcgattataaaaaatgtggttatttgttaactatactcgagtattataattatataaaatacacaaataatttattatttatttttatttgtttgaaccaaagttcagagataaaatttattttacaaggtaatatcatctctttaaacccagtagaactttgtttcgaaaaaaaaaaaagccccagtagaactgagatgcataatgtgggcttaggtcactgtgactcgggtattcaagttttaagaaaggattgttttacaaatacgcaaaaataataaaaaaaaattataaaaatacggttatacgaattttaaatatttttatgattttatttattaaaaatatagtcttttgatgtatttttatgttgtattcttgttaatttattattattttttgtcagttgtatattattattattttcttattattttatgtaattttcttattgctttcgtgttgttttaatagaaaaccgtaaaaatatatataaaaaatttagaacgtaaaaatgtaaatcttttataaaaaatagtgctttatgtaattatcgaaatttaaaagcattagtagaattgtaatttgtgggttttctaattttagggaaatttacacatactactaattttggtaaaaaaaattacacttttacatttaagaaatatttttatatttttactgtattcataaaaataacacaaaaaataacaaaaaaaactactaaaaaacaacatctaaacaacataaaaaaaaataatatataaataataaaaaaccaataataaataacaaaagtacaccgtgaaaatacataaaaaaaatactgtatttatgtaaattaaattttaaaaattataaaaatatttaaaatttcatataaccttatttttgtaattttttttttattatttttatgtatttgtgaagtattcctgaattttatcattttaaattctaatttagggaccttgggcttgacggtcctaaacttgggtctgatccacattcaccttatcaaggctcaagccttttggggtagtcatagtgtacaatttttttttttttgataaaacatagtgtacaatctgataatggagacatggttactgtttttttttttttttttaaatgcgtttataaataaaattgaagttagactttatggtcaatacaaaagatattaacaggtatagtagatatctctactatgcccgtaacattattggcaaacgcctatttggccacattataggccgcgtagttacagtttttagttatataagaaaaattacaattagtcataaaagtagagaggagcttgcaatgacacacatagttctcaatcctccaaatagagtcatccccttttaggttcttgatgataatctctgaatcactctccaccaaaacaaaaggatgatgcaatgagaccgccgtctccatggctaaaagacaggtcgcagcttctccagtgagtgggtcagagaagtgtagccttttcgccgccacccacaaaactgattcgttatggtctctcgtaatcgccacagtacacatagtttcacctccgactttgacatcacagttgattttaacccaatcttctggcggcgaagaccaagcccgagtcccaacagaccgtgaaagggaaagaaggcaggagccatagtctgtgtaacaagaagagatagagtcaatatagtgtttaatgttacccattgatttattatgtaccttgtcgttg

SEQ ID NO: 25915 - DNA, 3304 bp, Cannabis sativa
aactgacctttaaacccagtcaaaaccacgtgtttgaccttctacataggaaaccaaaaaacgacaactctttagtaatgagctacaaactgtttaaccccaaacagtaaccctaaataacaattgcacacatatataaatccctttttctttcaaacactcacagccaccactatcaaaaccctagcagagaaataaaaggcccttcttcttcaatgttcttctctgaagaacatgaagaacagccacaaaacccactgcctagaaatttcacagttcgcaccagaccactctaagccgactcaccttcttcgtagttcttcactgaagaacacgaagaacacagcccagaaaatagaaattaaaccccagaaaaataaccctttcctaaaacgattatagcccagaatttataaacacaaacaacaaagataatatagaaaagtaaagagaatagatatcaccggatttatagaggttccccaaagaatctgggtacgtcctcttgagctcgcctcttccactatagatcttcaatgatcaagagattagaaagcttggattccaactcacaacattttgagaggtaatcggaatatatatttatatatacagtgtttactcctctattttcttctctgttttctctctaaatttgtactgatgttgtgttctttttccttgtgcttgaacaatctctcctgagttctggatctccgaaccacaccatgggttccaaagcttactccattgtaagcctcttccacaaactaaccctgttcttgttctgattctcaaaactgatctggagaaaaatattcagatctgagttttttatttttcccttggtatttttgttgatatgattctgttttttgatgttgtatatagatgttgtaattttttgctttatatatgttgtagtgaaatacaagatagttagttataaagttttaacaaactttataaactaacttaataacctgtctaggtaaatagaggccaaagaccacctagtattttactgctttgtaatactctgtgtaatattctagtttttacagtgtggttaatatggggtttacttcaacagatttcttaatgaaaactatcatcataacataaaccaagtcatttagaaaatggtagctaggtacaaacctgtgccataccaccacgaccttgcttttatgctctttatagtgggggatttgttcctgctttggacgattcgtctatctaatgtaattgcaattttattgtctgaaaaacattaaaatcaatatgacagctgtaatataagtaacaaacaaacaatattttaattaattgcttctataaataaatataagtagtaaggtgaatatataacgtaattaccaagattattattataatactcatcatccatctcttctttctaataccaataccaacttgattccttgttatttgatcaatactgggtttggaaaagagaagcagaagtgggaatgattcgattagcattcaccacaagaaaagttgtgttccaaaaaatatttgattaaaaagttattttatatacactaaaataaataaggatgtatttgcacattcttttaaaaaaagtgcataatgaaattttacaataatatatatgtataactgattatcattaattacttcttactcaacttatgttatttattatatgtaatataataataactgatgatcattacctagcactataatttaatgtatacaatttttttttaaaagaataattatgaagccaacattttgttttgccattcatgctttgcttggttagtctaatatatctatctagaaaatttggttgggaccaaattgaatgatgtgaatttgaagaagaaagttgctttgctaaccgttgttgaaaatcataaaggtgaaaaggaagtggattttgttaaggaattaaataattaattaatggcattagaagttcagaacatatgtgttggataaattcccatactaacaacctcattaacaagttacaaggaaaaataaaataagaccttttacaagcctcaacagaccattataacccttggagtagtcgattttgttttcatagacttagatctttaagctctttacaataaagaagtaaataacaatatctcaagactctaaccaactttcagcaagataaggaaatatcaattacagtttttataactattttctcagctcaaaaacacaacaaaatcacagtcaacaaacactataaataaaggagcaacctgcccatttgaaggggatattcggctcaaccatagcgagtggcagcagcatttttctacgaagaaaaacacctcagaaacaagagagaaaaacaaagagagttagagagttccattgtaatcaaaccaaaaataagagtgaaagaaaagagaaaagcttagaaattagctactgatttgtggcatggaatctccataatcttgtaactcacttttgaaattcatagtggagactcaagcaagtttgagggtcgcttgacggagacgtacctatgatttagagggaactccgaaatcaattgttgtggtgtctatagatttttcttttgctggttttattttcgggtgtctctagttttgttctttggtttttttctgcaggtttaaagcttggagaaagaaggtttcaacagctatattttgcagcaagaagaaagaaggaagaagaactaaggggctgctgcatttcgaaggttgaaggaggaacaaggttttcaactgctaggttttcaaagctagaagaagagaagaagaagagaggctgaagggggtatctcggctgctagggttagaacagaaggagaagtgattgtggtggctgctagggtttcagccaacaataagagggtttttaaagccatcagaacgacagtgttttgagggaccaagtcttgatcctcacaagcttggtaaaggtcctttttgaactttgttttttgatctttcgggtgtaggtgtaggggcatttttggaatgctttatttcctacaatggtatcaaagctcggggaagcaagaagattcaacaacatctagaaacaaagttaagaaacaagaaagatcatcaaaacattgaagaagccaaatctaaaattattaagaaatttataaacaggaaaactctaacctatactttgtcttgttacattcttgcttttattatcttgttcaaataattaaacatgagtaatattagagtagatgttgacaagtttgatggatcgagggattatgtgatttggaggaaga

SEQ ID NO: 25916 - DNA, 1601 bp, Cannabis sativa
aaaaccaattagcaacatgatttatacatcataatttcaacaattacttaattaccctttactatagaataaattatccttttacagtttttccagtccatgcatatcatttggggattaattagtttaaattaatttatattaatgtgaagttcccattagtttaattttcatgatttttaacgagtataaacataaatttactcgaagttcacacgctttaaacatattaaaggtaactcagtccctccatctcaaactcaaaatagagaatgattgctttattggaattaattattatttattgcaattattgaaatttgatttaagttctttttcctttcttttgctttttgatttttttcaatcttttgaaaagttaggttccgttgtactggttccagcaaaggaagaaaataacgttcaattaaaattaatgtatctttaaggcaagtttgccagtagttactattccaacctgtatttctagtcgttataccaaagatggtataagtggacaacaatgctcactactggaaacataattaaactaatgttatgtattgtttaatttttaattaaaaagaaataaacagacacacactgataaaagtaggtaaactcttcacataaaataaagtgatcacttttttgattacgcaaagaaattattaaataacaaaattaacaacgtaacgtcaaacacgttgttcatgatttgcagtcactccatttggtggcgtattaccgccgacggcacccacgtggcaataatctattactctggtcggtcaattttctcaattatagttgaccaaagcaacctagaacttcgtaaatatataaattaatattaaataatttgtattattgcattctatgcatgccggttgagaatattaaactgaattattcaaaaaaagaaaattaagaaaaacttggcaaataaattgaccaagtaatgggagtagttttagaatagtatttgataaatataataaaataataatgagcgttttgatgataaatgatactctcgcatctatgaatatgtaggtagtgaaatcactcgaagagtaaattgatcagtttggtccaattgtaacatttaactagtgtaaatatcaagttgcacatctaatttgtaagctactcaaataggctaattagtaattttttctcatgaacttttacatgtaccaaaccgtgttctctgaatttttttaaccgttaaaaattcccccgaattattgagattgttatatttaaagatttttgtctaatttcattcaattttagtgtttcagtaattgtttatgtactaaatcatgctacccaaactttgatatctaccaaattatgcccctcaaactttgatatgtactaaattatttcccttgaactttcatccatgttagaaattttttactaaaattacacaaaaatccttaaatctaacaatttcaatatatagttcaaggaaaatttttaacggcaaaaaaaattcagaaagcataatttgttacatgtcaaagttcggaaaaaaaattacttattagataatcaaataagaagaattttttctttaacccatttaatgg

SEQ ID NO: 25917 - DNA, 2064 bp, Cannabis sativa
attatttagggcacaaaatccaacattgtgttggacacatcttgaagtaagcgactatatctctaaaatatgggtgtaacagtaatactagcccctgctagatgtggcactctgaccatgccatccaactgaaggtaagctggcatgctctctaatccctcgagggcacctcttagtggatgcctctcactagtccactcgccagtatcctatcaaaagcctcgacaaggataacagatgaaggagagacccaccggtctccctgtgacccagcattaagaacctgaggctctgaagactgtaccaagacatggtctctaattgagggctgaccaagcctattcaatggttgcctatcaacatcatatgagtccaaagggtagttggggaggacatcacaagtcctgcacgtcttcctcctagcaggcggagcatccaccttagacttggtgttcagactctcagcaccttagttaaccataggaatctctacctgactgacctctagatctctatcgttaaggggttatgcgacctcctctactatgccaactctacccatcgttaccaccctagcaacatgaggatcatatggtggcacactatagcacgaccgtttagttttggccacactatatcattatcggtccaaaggtcactcaaaaggaggcaagggacaaactggatgctacctctcaaaagtaagactgactgaacctatgacacagcggttgtcacctccccagaccaacactcaaaatcacatgcatagaagagataaggggaggtgagcaacccgaaaaagctacaagatatagattgagttccaaccaatcgtacccaagggtacttgccagataaattacattatacaagactggtatcagcgaagtactgtctcaagtatatttacttagataaattgagtcctaaattgtgcacttgactataatggactcactatcaagagttatacatagttcctaagggaaccacatctgagattatagttgtacatgcatacaaggccgtcattaaccccttgctgaggtcaaaaggggacaaaaaatttactgctcgcttagacacttggccttgctcgaccagggttcccaagcttagagagggtcagccaagttccctgacctagccaagggccgaccagggtccttatgcctgggcgtgggccggccaacttttgggatatcaccctatggacggccagaccccatgatgaagacccatggtcggccaggtcttgaacaagacccccatgctgaccaaggtgtatgttagatctaaacgtgtattttacgtgtatttttcaagaacttgaacacgttctttgtgttcttcatgactcaaagagccaagaatcacaacaaagctcaaaatcatatcttttttgtcatgaaatcacacattatacatcctaagactatcatgcagattaaaataccgaaaagattacaatctaacatgggaattgaaaaacattcaaagcgaagaaaagcttcatgcaaccatgaaaaaatcaactaaatcaagcaaatagcaggaatagaaagcttacccactacaagaaacctttggtgaagagattgggaagcttggattgtcaaaatggcacgaaaatcttaggagttgaagaaatgtggggcttcgacctatagagaaaaggaggagcttttatttttctctagagagagaagagaggtttccctccattaagcttatatagattttgtgggaccgcatctttacttggcatgcagtgtttaactaaaaagcatgtagaagtataatgcaattaacttactgcaagaaatgagatcaggaagtcaagagcaggagactaaatatgcagtaagatttacccagttaaggctacatcagtcccagctaagctggaaagtccctatctacatagacgtcaacatagagacttgggagaaaatgttatcctgatttcccacttgacgcggcttgtcaacgtggccaatattagtgccatgtggttgtatagcttgccaataagaaggccaagtcatctactcagcactt

SEQ ID NO: 25918 - DNA, 1796 bp, Cannabis sativa
  modified_base (1754)..(1755): a, c, t, g, unknown or other
aaatctaattatattgaaatggattttatttagtgcacaaaacccaacaaaatgtacatgaaaaatctcttggaccggactttatgcgggtatgggttgatgttgatattttccagatgcttatttatttcgtccaaaccatgcaatgcttaccatacgagaagctgttggttccacagttgcatggccttctaaaaaggttattccaagaggtacataatcaactattcctattgtaatcttttaaagtaaaattatttaactctactcattttgataatctggttatgaatttgattatgaaattgtgattcatgttaatgaaaactatagtaatatatatgatttaagtttctttgttgttttattgaaaatgagaacctggaaaaaaaatatattgagaaaaactctccaaatttgtaattttggcttccaaagtgtgacttatttttcatttattaccaaactcaaaaagaataatctcttataattattttgctatgtgaaaagttggtgaattcgttaatgtttcatatgacagtgcctttataactttcaataaacctaaaaatattgtcttcttgaggattaaacaagagttaagggccttagtatgctatcctaaaataattgtaaactcagttagagtattatgtcatggtattgtgttttagtgtaattgttaatttattattttgtaaagtggtgtcctctcttgggaataattctataacatttacatatagtaatttgagatgccagaaaataataattaatactttttttttttaattttgcagatgtgacaagcgaaatagaaaagagcatcttattttgaaggcattgtgttggcaaactatagtatggaagaatattttatgctgatagttagagtactttcaatattttgaatatgttgaatatttaagaaaatttacatgactattttgagaatattttgttgttaatcaacaatgttgaatgcttttaaactatggtggattgttaattcactattgaatgctttccatttctactgtttgcaaattaagtttaattgagaagactaagtgcatattagaaagcagattttgaattatatgaatagaaaataaaaataaataaaagagaaatcacaatagaataaattagtgtagtataaattaatatataataaatatttaaccttatctaaagattaatataatacaaaaaaaagtgttataatacctattacataacatttttcataagtaaataattcgttatgcaatccttttacataatgcaagaaaagtattatagtaaagtatattataacacaagtatataagtaacaaaatgtgttatataatgaactataaataagataacaaaacagtaatctatttattaaaataacataaaaattatgttatcgttgactatataataatacatctctataactatgataaagtgttatgtaaagtaccctaacctacgataacatagtcggtcttaacacgtcaaaaagtattatggtatattttattaacacatttctggtcttattaaaagcactttttcttgtagtgttcttacaagggtcaaagtgtgatctttgactaccgaaattatggatattacatatctgccacggcctaggactgggtcgtgatagaaaaatggtattggagcaccgggtttaattaattaccttgtattgtgtcaccaaatagtttagatttattttaaataataatagtaataannatcttgatatttatatgtataaggcatatttatattattag

SEQ ID NO: 25919 - DNA, 2910 bp, Cannabis sativa
atatatatattattgataaatttatcataatgtatagctatagctgcatgcatgtttttagggtttttaatagtaattttaaattttatgtttggttggtacaagtgaaaattactatacttaagtttctggggattttcatgtcatgcaacttatatattaatatttttttgttaacttgtgtatactacgtatacatatatctaattcatagaaattaaatattcttctattaatttaatttcattaaattatagtttactaattattttttcataaaaaaaaaacaaaatctttatatattggtagcagtaataaagtggtccttttttaaaagagatgaaaacaaaaaatctcagtttttatagaaaattatatataatgtaaaatttgattttttatttcttgaactcatctcacgtttttcctgatcaattcacaaaacagctcagtaattttaattatcatgttgttgaaaatagttgttgtatattcaaaataaaaggaacgaaattactaaactaatgtttgggttgagtcgcgaactaggtctctttaagatacttgcggcactgcctaaaactgtacaagcaaactatcagtttcgtcgttcccaaaataaaacagcccagtcgaaaacactctatcgaaactacattgcacgatagagaaccgtcgaaataccatatcctaaaattatccaactgctcaaaatacatttgtaatataatcgcataaaattgtatataattttttctaggagaaaaataatgtctttctctcattggttctgatgcattatataaaaacgcaattaaaaccttaaactttttaattaattataaataataataatttaataaataaaattttatccaaaaagacaaattgacaacacacccgcctgccagctcagctcaaccgaacagcagcggcgcgcacgtgtggtggtcctagtgtgtgagtcctcacacatgtgcaggaaattgggtacctcttggggccctaacccatatttcaaatttgcacattatatacacttctaatgaagtgttcttatcccacgtgggactcaatacactcacgacttcacttctcataaaaaaaatttgtaaaatttcactaaagttccaacaatcttttgatttaaacatttgcgatgtgaatacaacttagaatatactagagtgactcgtagtcttgaactctatatctcttacaatgtaccaagcacaacgttttttgggtgtagtccaaaagcccatgctttaatggtcatgcacgtctttccaatgtagtgaaccactctaaaaaatttgcctaaatttcataggaagcagctccactcccacattcacgtaggtgagtctattaagagtattcttgtagctcggtattccactacacatagagtatatatctcattaagagtttctattatctcaaccttatatcgttttaggaattcatgcttcacatttcttatgacaatagcataatctcactcttattacatcataacttgttattgcccattgaacctatttcttggaatctacaatctataggtcgagttttcattatgagtgactcattattctaagggcaatagtctcatacctttcaagattttaagaactttctctctagctaatcatttttccaaaggatcggctaagttttcatcagtgcatacatgatccactcttactgttctaatagagaggaaatccttaacactactatacgacaaatctgtcgtctcttaccgttataatatcggttctgaacttttacaatagccgcggtactatcgcagtagatcaacacacctagtatcagtcttttctataaagggatctcagctagcaggcttctcaaccaacctgttttttcactagcagttgctagtgttatcattttagactctatggtggattgtgccaaaatagtttcactaaaagaaatgtgacttttttcaacgcattattgggttgaaaaaaaaaagcactaaatgtgctggtacacttttaccgacgcaaaagtgcgtcgataaaagctaccttcgaatctctgtcggtaaaacaacttttgccaacgcaattgacttttgtgccagcaaaaatgatttgtaccagcgctaatatgcgtcagggaaaactaaacgccgatgtaaactatgatcctgaatttatttttcgacaactaaaacaacttttaccacttcttaatgaaattgatttgcactgttctttggcctttacatcactagtgtcagatgaattctcttgagcttgttgtgccataaaattaaacttttcagttgatccatctaagtctcaaaacttcagattaatgccatagtttcattgataaaaaacatcaaggtgaatttcattctttggttctacatgctacagaaattgtggttgttgaggcccaaatctttgtggagggaagccttgttgttattgttgttgttagttagctaatttcccttgataatgaggtcaacgacccccttgattgtataagtaattatttttattgtggggatagtttttaatagcttgagcttgccctattggcaaactgttaataataacatgacacctatcataagagtgtgaccttctaaataactcactagtcacaagagcatgttgaacttgagctatcataatcttggtcaaagtttctacttagctagtcaactttgtgatagcatcaaattcatgtaaacctgccactttcttcgagtggcttctctcacttggtcattgttgattattcatgacaatctcttcaagtaactcatatgcctcgttagcacttttccttataaagaccctgtcagaagcggcatctatgagtgttcgagtattactagtcaacccttggtagaagttg

SEQ ID NO: 25920 - DNA, 1696 bp, Cannabis sativa
atatatatcatccatgcaaattaaacacaatattttcccataaaaattcttgggtgaaagacttgatgactttttataccaaagttaatgtgaaatataatatagaattaagaagaaaaagaaaaagtgcatgattgggattttataattaatggaatactagctagggtttcatatgatcatacctaataaatataaatatataatagacaataaatatgaattgggtccccatggcctccttagtggctatctagttgttatgatttcttattatttgatctaatatttataataatatgaacaatatatatatgatcaaataatattgttgctccatgtgaaagctttgaagttacttagaaaatgctattcttcgtgaccaagttttagtctctattattagtcacatatatagttgtggcccatattatatatgtatatggtttgtctattcacataaatttaatagtgccaattcaatatattattgtatactatgcatataattaatatacattattatattatataagaaacgtcatagaggggttttggatggagactataacatatggataacgttggtctttgtgatctgtatacactctaattattaatccaacttttgtttttcaagttacatgagtacaaatttcatattgttaagaaaatttgtgtccttttcttttaataaaataaaaattttgttaattggcaaatcaaataatagtttataattagcaaatcaaataatagtttattacataataatatattacaaagagtagaatcgacaagacaagatatataaacaaataagcaaaccatgttgttacaaaattgaaataaaaaccttaatagtacattcaactagaatactaataagctgctagccatgaccgaccctgaaatatagtgggctatacgaaaaaaataaagaaattacttcatatactatatttaatcttttttttttttttattttaacagtttgggttgctccggtggtatttatgtggattgctatgtggatttaggtttctgttagttgctaatgtgcgtggattttcgtaaaaatgtaaaaagaaaaaaaaaactatttaaaagtgtaaaaaatatatatatttttgaatccttatttagaaaaatatagtatttttcaaaatcaataaaaaaatgtataattttaaaataataaattttatttttggacccttaaacgaaagggataagttgaaaaatacctcttttttatatctattaatcaaaaataccctcatgttgttttttattaaaatatacccatttttttgagtagattgtccaatatactctcactctctacttaagtttagcatataatttacataatttaaagggtctaatggagacatcatccataaaagtgggtatatttaaaaatatatgaaaatagaggtaaaaattaaaacaagttaaataaagtgtgtatacaatgtaatttcctctaaacgaaatgagccctaagcacaggcctagcccgtctatactagagttgggcccgcaaccagtgttgaagcttcaaatcgtgtcaattttttttggtgctttatatttttatcaaaatagtcatgtaataatatgtattttctatataatttttatttgatatttatattttaaatttaaattagatcaataaaatttaaatgag

SEQ ID NO: 25921 - DNA, 2210 bp, Cannabis sativa
gattggattggatcagatcaatatttaataaataattggattgaatcggttggatctaaatctattagatgtgatccaataaacacccctatcaagaagcatgaatagtagatgtggtccaggatggtcaattagtttggacccagctaacacccactaagaaccaagacacaacattggcccaagagggtaaccctataagtcccagggaataataaatggggaattaccattatatcattttttaatttttttaaaaaaatttacggtttagagcttcggtgattactccgataatttctatgtggattactatgtggattttagttgcaatttaggttgttccgttagctcttatgtgagtttcttaccgaaaaaaataccaaaaaaatattttaaagtgttaaaataaaaaatcctcataataattagcatccatcaatggatatgcaagctcccgaaagcaaaaagctcctagataaaaattaccagtgtggtccgtacctgtcaatgtgtaaatggaaaaaacattatagcttattcttttcgtaccaacgataaaatgagtcccttataaagcaaaataaacgttgagatttacactcactgttcttatatacacctttttcatgccgccaaagggcgactcacacatgcatatttaataagctttatttttttggcagttttataatgagatcgtgagaattagattggacttaactaatatttattatgattgttggattattaggttgtaatttatgtttatatatatatatatatatttatatattttaatgaaaatcaacttaaatggtataacacatggattagatagatccaatctaattcgatagaaaatcagtcaatgcatcaaatagttggaactaatccaatccaatacatctattagattggatctgatgactcaattcgattggattggatcagatcaatatccaataaataattagattggatcagttgggtctaaatctattggatgtgatccaatgaacatccctatcaagaagcatgaatagtagatgtggttagggatggtcaattagtttggacccacctaacacccattaagaaccaagacacaacattggcccaagagggtaaccccataagtctcatggaataataaatggggaattaccactatattattttttaactttttttttttcaaatttacagtttaagttgtctcgatggttattctgataatttctatgtaggttactaatactatgtggattttggttgcaatttagattgctccattaactcttatatgagtttctatgtgatccctacctgtcaatgtgtaaaaataaatgtaaaaataaataaaaaaataaataaaaaaaaaataataaaaaaaaaactcataataattagcatccatcacgaatatgcaagctcctagacaaaaattaccagtgtagtccttacctgtcaatgtgtaaataagaaaaacattatagtttattcttttcgtaccaatgacaaaatgagtcccctataaagcaataaatattgagatttacacacttactactctgacatatacctttttcatgcggccaaaggtgactcacacaggcacctatcacatcaacggtagacacatcagctttgctctacctaccaggcatggtgggcttgctccatgggtgaatgtagagaatctaaccacccaatcttgtattatctctctattagcaattagattatttactcttaatcaagggctctgctaatcagcccatcacattacatgactctctctataaacagagttactcccttatcaagcttaaatggtgctaaaattccttttcttagtatagtaacttgtagactaagacttattaatacttcaatcacatcaaaaaaaaaaaaatattttgtttatcttatttatgctctctcaaaatacttattctctttttttaatctaattgccaaaaatctcaattaacaaaaaaatatttataaaagatagacatttcatgtagaacaaatgttgacactattatagaaatcaactttgaaaattctgcactcaactaaattttaagacagattgttgtataacatttttattatgagcattgctattaagcaccagtggtgcttagcaccttctcgacatgtcgcgttatgattggctagcgatattctctaaaagctat

SEQ ID NO: 25922 - DNA, 3155 bp, Cannabis sativa
atagaagtaaaagtttaatttcaaagtacttaactacaatccttgtggattcgacctcactctttgtgagtctataactttataacgatacgtatacttgcgtggctgaaataccacaacactaagtcttaagttgggggaattgagttcaagaactcaaatgtcacccatccatggtgaatttgatattttgaggtggtttttttttttttagttttgaatgcttgagtatgctattttttatgttatagaattgttctggaaagttaaagcaagtttgaagaagctttggtttagttttaatgtgaaaaactagggtttttgcctttctgcaggaaccgatcgaccggttctataagccattgaggaactaatcaaccgattggccagtaaggaaaaccctagtttttcttcgaaactggtttttgctcgtacaatttttctagaacctagtttagggtattttagtgatgttaaacctatttctaagccagtgggagttagagtttgtccagttgtgaaactagggcttctttcaggatttggttaagttgttcactaagtttcattatcgtgacataggacctgagatcgccgagcattattccacttaggtcggcccgcatacctaattttggattcgaggtaagaaaagctaattgcactgcttagcatgccaaatgtgatatgattattatcgtttgtgactcgattataatcaaggtaaagatacggtaattaccgttgttagaaatgagttattacccacttttggaaacctctagtaggttccttacttataggttgcttcattaagcaacgatagtgacatatgaagcttgttggtaacgagttgtaaggatgttttataaagcatcaatgacggtttgtcttataagataactaattgtttatctaaactgcattatgtttgaatgattgtttagtctatcggatgcattgttttgagattatgttttatcgtgagtctttgtgactcatgggtctgtgtggtgcaggtaagggtaaagaaagctggactagccatgatttagaggtctctcggcaatgtacatatcagtcgtcgtgtcttggctctcaatggacaagatccatcttttgggtctattttgaaaatgtaaccttattttgtaacaactgttttgctacatgttgtaaaagtttataaacaaggggatccccaaagctagtggcattttataagaaaagtcttaattatgaaattaagttattttattaaaagttttaattaaaccacattttgttaaattgttagtttattattataaactattagtaaaagcacacatatgctgcctttacgggttagggcattacagcatggtatcagaacgaccaatgtttacagatcctaaagactagtttgatatgtatattggctgcgatgactcgttcgactcatgacatagtaagagataattgttagttgattattagattatttgctaattgattaaattatctatttatttgaatgtgcaagctattagactagcatgataggttataaataataattgttatgtatgtgtatgtatagaaatgcttattagcattggttttgtgttggaagattctaaatgatggaaagttatggttgcatgtgtattatgcacctgaggcgatctggtagggttaactgtgaactctctgggctcagggctggcggtgagggtatgaatcctccactaccacaaaattggaaacaaatgtacgctgcaatgcaagagaccatccagcaggaaggtgatcagatcagagagctgagggtgcagcaagcttgacctgctttgaatcctaaccctaaccctctagcacctttattagtgccaccgaatgtgggaaatcatctggagtcgttgtatgaacagttcagaaagcagaagccatcaatgtttaaaggtggtgcggatctactaaaggcggagcaatggatgaacatgataacatccatctttgatttcatgcgtgttgagggtaatgatcaggttggttgtgctatctttatgttgcgtgaagatgcttgtatttggtgagaaatcgtatttcttggtcatgatctgaataacatgacctgggttgccttccagaccccattctacaaaaagtattataatgaatctatccgtgctgcaaaggcaaaagagtttacacgactaacccagggcagtatgacagtgacagagtatgccaccaaatttgatcggttgacaaagtttgcctctgatgaaatggccacaaagtttctggaacaagtaccttcctttgattgaattttcatataacaatagttatcagagtactattggcatggcaccgtatgaaatgctttatagaagaaaatatcgttcgcctattcattgggataaagtcggtaaactgagatatcttggacccaatgtagtttaaagaactagtgaggccattgagaaaatttgagctcgtatgcttgcctcagaaagtagacaaaaaagctacgttgattcgaagcgtatggatattgagttccaggttgggcactttgccttcctccgaatattaccaatgaaggggatttagagatttggaaagaatgggaaaccaagtcccagatttattggttagtttgagattctagaaagggtaggtcaagtagcctatcggctagccttaccccctgctttatctagagttcacaacgtgttccatattttaatgcttcagaagtatgtgtctgatacaacccatattctgagttacaaggacattaaacttcagacagacttatcatacgaggagcaaccagttcaaatcttagatatgaaagagaaagtgttgtggaactagactattctactggttaaagtgttgtggagaaataacaaggttgaagaagcgacttgggaattagagttgcagatgcgggagcagcatcctgaattgttcaggtaattttttgaggacgaaatttttataaagaggggatagttataatatcctgaaaaatgtaataatatttaattagacatgtttttattaaatatgtaattatatgggcattagagtaggattataatcttacttaagctaattaagagttaattagtaatataaataaaacgtaatttattaat

SEQ ID NO: 25923 - DNA, 3578 bp, Cannabis sativa
ctcctggctcgcgtagaccaaggtgtatgtgccccccaaataatcaaagaagtgccttcattggtcactttccataccaaatctccctggggcttcttgatcatgaatcttgagtggtgtcacatgtgtatcgctctccaattatctaaggattcatgggtagcagtgtttaactcacttaaaaaacaactgaaattatctcaagaccaactcacagctttactcagcacttagagagcgtcgccaggtttgtgagttgtaattgattaatttaaatgaagtaccaaaaaaaaatttacttatgctttttctcattaaattaaatacaattacattactgtgagctaagttgaaagaagaaagaatacactttgaagtagtaggtgcataatttcttcttcatccaagcttagtttaagtgatcctcactaagctaattccctgtttgacttttagcataagagccataccttagcaatggacctcttaacctaaggacaactttgtatcatcctatcagtcaaggggcgattgattcacttacacgaagtaaggtgaatctcattatgaagtgagctattttggagacagttgcttttattggtactaccatcgtagatgcaccctgttccaataccttagtactgacactagattcaagttgtagtcataacgtcttaacttgtaagtttcgggttcaagtgcttcagccctgacatatggtccttccaaattaggcccgagtactcctactattgtgtctttcatattcaggaatacccatcgtagcaccatgtctccaggcttaaatttcctatctttaaccttggagttgtagtgttttgcgaccttttagtgatacgccacctttctaagcttagaactttctcttatctattccattccatctagggatttgaccagcagctgatgattgctttgcttgtcgtatgtaagccttcgatgggatggaggtttgagctctatgtgtattatggctttgtacccatacggttagagcgaagggagtgtggcctattgttgtttcttctatagtgcgatatgcccatagtacttcggggagttgttcgggctaattcccttttgcttgctctaagaacttctttagcgtatccttaatatgactgcttcaacttttccattttcttctatagtgtgatggtggctaagggctctgctttggcccacttggtgaagtagtcgactgctaccacaacatagtgaactctgcctttccccttaggtagtgagcctatgaggtcgattccctagacagtaaatggccagggtgtttgcatacttttgagttcatttgtgacagctctgggtattttggagaacctttaacatttgtcacactttttaacatagcccattgagtcttctgtcattgttgaccaaaagtacccttgtctcaagatcttctttgagaggctttgccccctagcatggtttccaaaaaggcctcatgtacctcaaccatgaggagtccaacttcttccttcgtgacacaccttagaagtggcatttagaagcttcctctggacattacttcatccatgatgatgaagcgagctactttcctcattggtctcttagcttcgttctggtcagttgaaggaataccttgttttaaatattgtgtaaccaagatcatccatgatggagtgttgtcaatcattaggatatgctttgagtcctcattaatactccatttggagaggtatttaacgggaacaacactaagagtgtcaaaatctgtagtgctaaccagcttggctagtgagtctgcattggcattttgctcacgcgacacttgtttgatggagtagtgcttgtactgggctagtatctttagctttactcaagtatgtaatcatgtctgaccctcgagcttgaaactcaccaagaatttgattaacaactagatgtgaatcattgtagatctttagtgattcgactttgattgctagtgctaaccgtagtcatgctaggagtgcctcatactctgcttcattgttggttgcaatgaactcaaaccccatagcactataagttcaaaatcattttagagtaactaagatgagtccagcactagaaccgtgctcgtgggaggagccctctacatataatttctattaaggttcagtgtccctctaagctgcagtctcaagcgtatggacctggtcttcacataccatgggatcatctttgtcaaggccattgcattcagtaatgaagtctgctaatgcccgccctttgattgatgttcgaggctagtaggtgatctaatactgacctagttcaactgcccacttgagtaggtgccttgatgcttctggtttcatcagaacttaccttagtggttggtcaataatcaccttcacagtgcgagcttggaaatgtggccttagtattatggaggcacagaccaagcagtaggctaacttcttaatgggggataccttgactcggccctaatgagacacttgctgatgtagtagacagggttttatattccttcatcttcacgcatcaaagcagcactggctgcatgctcggtgattgccaagtagacgtatatttcttcaccatctattagctttgataggataggaggcttggctagatgatgtttgaaagcttggaaggcttgcttgcattcatcagtctattcaaatcccttgttgcttcctttaagtagattaaagaaggaaacaagcttgtctgctgactttgagacgaacttgctaagcgcgacaatttgtcctatgaggctttgcatgtcttttattcacgacggtgacttcatgtcttgtaaggccttgacatttttcgaattcacttcaatacctcttcagttgacaatgaatccaagaaactttcttgattggacgtcgaaggcatattttagagggttgatcatcattttatattaccatagtatattaaagcactcctctagatctttgatgtggtcttcatatctttttaactttaccagtatatcatcaacgtaggcctttatattgttcccaatttggttatggaacatacaattgactagtctctgataagttgcacctgcattcttgagtctgaagggcatttctttgtagcaataaagcttgatgccagtttggaaattcatctgttctttgtctggtgcgtgcatactaatctggttgtaactagaatatgcatccatgaatgtgagggtttcatggccggctatcgtgtccactagttgatcaattcttggtattgtgaaacaatctttagggcatgctttgttgaggttggcaaaggcggcgcaggtcctccacttttcattaggtttaggcaccaaaatagggttggatacccaaattgggtagaaagcttccctaatgaagtttttctcccgtagtctttcaacttcttccttgagagctttggagcgctttttgttaaggagcctgcatttttgttgtacaggtttgaagttgactttgtctatgttgagggcatgacagattacctaggggtcgatatcgatcatgtcctcatgcgaccaa

SEQ ID NO: 25924 - DNA, 1566 bp, Cannabis sativa
ttttctttcttttctttttcttttttttttttttttggttatggggattcttccatttctgggtttcaagtttttgaatttaccaagttatcaatttagagattttgctttaatgcgagtaaaaaagaatggttgactatcaccgaaaaaagcattcctgctaagtaacagagatttcaaaactccaagctcttgctaaactccggtattggaccaaaccaaagaagttgttattcataaactaattgttctaaggcccgaaatctgattcagggcatcgatatcgattttccgaaaaaacccatgttggtaagatggagaccggtaatgattccgtcgtaacacattacccctgtccaccgagacgaacatggggaagagttaggaacccatgatgcgagagcattggtttgtgtaaacaacttaggccatctttctttgttggtgctatctagtttgtaaatgaagtttgtggcaatataatttctaattcataaaaaaaataatattaaataattaataaaaaagtcttaatgtttgaaaaaaaaaaaaatctaaattcatcatgctacagaaatagttaaattattagtcacaaagtaaaaaaaaaataaattacaaaattttaaaaaaagtctataaagagtttacttaaactgataaaaaaaaactcttaccaatagtatattcggtgttgtaatggtcttcaaggagtttgggtttaccaaagaaagtatctgatagaatgcattcaccacatgatccaattcttatacaataaggatttaaaataaatacatatattcatgttatcacaagttatgattgtatattaaaattccataataataaatcaaagatatgtgtatgttatgtgtatcttttttagaataaaaagtattgaaaataattatatagagagacaaaaatataatgaaggatggagaatatataagaatgatcttattacttttcatgaatctcaagaccttaaaaaaatgaataaatcatgaacaattcgaagtcattgaggacagtcaagttttcaacataaaaaaaatgtttatatgtctccaaattagtgagagaaagattaagaatatatatatataaaaaaatagaaaaagaagaaataaagagaatattaataatactaattgaagattgaggtcttaatactgctcattgttcattgatgttactacaggatggagaatatgcactaagaaataaaagaaaagaaaaaaatagaaaaaactaaaaagaggaagaaagaggctgagagagatattaaaacaaaatagaaaaaaaaaaataaaaaagtgatatatagatatatgtttagggttatatatgttttaaaaattggagaaggtgtagggatagatatttaatttttttttttttaaatatatataaaaaaatagaaaattttattatttatatttataaacttaataaaaaaaattaaaaaaaatgagataattaaagagagaggatatagatttatttagagtaattttagagcgccacatcaccgtctcatacttctcctttatattgata

SEQ ID NO: 25925 - DNA, 3412 bp, Cannabis sativa
  modified_base (2210)..(2217): a, c, t, g, unknown or other
atatatatatatataacataatttccctatatttttttaattttgggccggcattattgagctcttccaatgaaaaagtcaataatattatatcacatttacttcttcctacaaaaacacacatataaatagagagagagataatatttaaggtggtattattatttgtacttagaaacacaaaatggagaaactaaagaagaagatagcaaagctttttcctcaagcagtgactttcacaagtcctcctccaagcccaagaaaactactagtctctcttgtccctgctgaggctagacttaggcccaattatggtactagctttgatacaaaggagccttcttctcccaaggtctcttgtttgggccatgttacaaagcccaaaatcaagcccaagtccaagcccaaggagtgtttgttcatcaagattttcaagggacagagaacaagaataaaaggaggtggtaaggatcataggagtgttgttaagaaagtgccttcattgggtcttatgaacaagtttgagagtgggcgtggtggtgttttatcggactttgaatggacggcccatttagctgttttgggcccagattctgaaaattgccatattgagattgagtcaaagaaagaagtcaacctttggcaaagaaggaataagccaggtcctcctcctcctttgcttcttcaaatgtagtcttatctatttattcaaggcataaaagaaataaaaagcttttatagattttataagatttgatttttatgatcttgaatgtgtttttcatttcttagctttattattggatgagactagagaagaaatggattttgagttgaattgaatggtagatttatatatgaatgcaaggtgtataatgtggaccccactcaataactcaatagatgactattgtggataatgaaagtgactcaatttcaatgtgtcttcatttcaaacaagatacaattttttttagagataacccatataaactctaaatatattttatgtctttattaattgagatgcataaccttaatgttttgaaaaatagtaacaattaagagaagggtttctttcaaatattagaaaatgatttcttaacctttatgatataataggaagcaacctatatattagacaacaagacaaagacaatagtaaatttcaaaaaatgacataaaagggtatctcaaaacttatatttttctttttggtgtgataacttttgcatcataataagaataagaaaccaatacaatttttattcttaacctctctctatgtcactattagctaattgtatccctagatttgttatgtgttatgtttgttctttggattcttagcttagcttgtatttatacatgtataatgtatttactttatatttgagaagaagcaaaagaaaaatacctttttgtgtagcattaaccaatcaagaaagaatgaaataattcaaggaagagagaatgaaaaaaaaaaaaaagaaaaaaaaaccaattaagaaataaagaatcttgaattggcccaatagaattgtgaatcacattgaccaatctcaaaagagaagtaaaaaccaaatattccttgcttgttcttattcttctccaaaatatgaaactttttggatttgaaaaagataatactattgaaatataactttcaatttttaattagagtaaagattagtttaaattaaatattgttttcactaaacacatagagagctatatttatcggttataatgattgatgacaaggaaagacatgtataaactattgttatttagggcttaaaaagtgccaaatagtttcttatgaaaatttgtaacttttgaaataacaccaatcacaatgcttattcaaaagaatcacaaataaaataatagtaaaaactaaaaaagtactttttttaattttcttttctgaagaagttgtttgattggaatggtatcaatataaccattaggttattgtgagctttggataaaaaggaaaagttttctttaggttttttggataatttttttatttgttttggcattaagggtatttttttttttcaagatctatttattatagttataaatttttaaattttttttgaataatataccgtataaaaaaataaagtttaaatagttgattacatatgtatgaaaaaaaaaataagagaattactctatatactatttttttaattttnnnnnnnnaatttacggtttaggtttctaaagtggttgcaacgctacttgcaaccgaaatttctatgtagaattttataaaaatgcgaaaaaaactgttttgaagtgtaaaaataaaaaagcccccaaaatttttttcatatgtgcaataaaatatttaaattttattttttgatacaataaacttttcaaatttttataaaaatttacagacaactctaaattattacaatgtaaacaattattaataataattagattaattttttaaaatagtaaacagataaaaaatctaccaaaataattttttaaggtggtatattataaacgtactcataactttatttattttcaaaaaaaaaaagaaaaagaatagtaactatatcatacaaaaatagtagtagaaaaagaaaagaaaagaaaagaaaatcaagttgttcaagcatagtaagttgcatagtttagtccaaaaagagaagaaaacaatgtgattcatatgactattactctactatgtctctatctctatccaaaacaaaagtcacctaatttaaatatcttttgtcaataataagactctatagttctatttatagaaaaatataatataaaataaaatactgatgatgaaattacagtctggcaattatgatcccaacgactactatcccatggacccaatctaccaccattcccattatgacaattgggaccatacatttcactttatttctattttattttaattttattgtctttttctcataattaaaactatatttatatgataatttagattattatttaaataccatatcatcactcaatcttttcttattttataattcttcttattcttatgagaacgtgtccccattccctctaagatactcaaaatgttttggtaaataatcctccatctctttctcttaccaataaaactcttaaatttaatttcatgtataaagtaattagcggcataagtacttaaatttaatttttcattgctgatatatagttaagtttaatttttgacagtaataatacataaatttaacatttgtaatttctcaaatcataactgcactgcaaaaacttaaaactgtaaaaatcatatcgcaaaaatatggtgcggcatggtttaggcaatttatacaatcattattatcaaacattgaaaaaaaattaaaagattagtctaata

SEQ ID NO: 25926 - DNA, 1769 bp, Cannabis sativa
acattttcaagtattaaataaaaatgcgacattatgattttctgcgtttaacgcttgtaaataaaattaatatttttataaaagtacaggcgttacatatgcttaccaagaagtcaatcaaatcacttaattaaactcaatcaaacgagaagctcgattcttctcctttaaaccaacaataataggattcccctcgattttctctcctttaacgattttagatttcttaggaggagccttccccgatttgggtatgggctcaacaaaatgatcataagaaaactatcatctaactttgtttccctttcccttttttggagacaaattttaaccctatttctgaagctttagggcctgtaataggaatttttccacaaagggagatggagaagatgaataacgagttatatataaaaatgtgtagaaaaaaatgcaggctgattcttcaataccagttgatgattgtgatattttagtttttttttttttttggagatatttcttctttaaatcgtgtatgaaagtttaaatgtgtaggtgaaaatgaaaaaaaaaaaaaagaagaagaaaaaattgaaatgatatgcagaaactttacagaaaagataggttggttgagtatgatagaagaacaatgacatcatcattaagcgaattatgtgtacaagtggtattttggtcaataaaacaaaataagggatataaaaattatcctactcttgtgaaggtaaaagagtaataaaagttgaatttttgatttttcatataaaaatttctaaatatatatcaacgtggactaaataacttaaccaaattcaagtccctacctatattttatatattgtatatgcagggacatgattttgtcacgtgattgtactttcacagaatgtatttcgtgatgtacgacatccgttagatgagggagttatttgatctaaggggtgagattgatctaggggtaattagggttaaacattagtaacgtacccatctaatgtaccctgagacccatctaatgtatcacggaatacattccgtgaaagtgcatcacgggacaaaatcgtgtccctggatatgtatatcacatgctaataaaccatattcgataaatgattttacaatagggaatttttaccataagttttacaaaataggtacataacaaatttatgatatgcaatatataataatacaatataaatattataattcttgataatttagagaacccttaaaattttatatattttttatttagaaattatattaataccaatcaattaaaacaataggatctgcaatccaatcgtgacatttcctctcttagatataagatcagagttataaaacaagtcaaccaattggtcatctgattcttggatcgtttgacaaaaaaaacttaaatataatcaactattatgcaatgcaagtaactgtactactaacaatcctttaaatcgtagaaagcttgttgttctcaaccgctaacaataatttgatagcaaaccatcaaagaaaaaagaaaatgaaccaacaatgaaacaaaaacaaaaccatattacagagacaagatttatcacagtaacctaaacaaaagacacacaaaactatatcacagtgagaaaacaaattacagtaacaaaaccacaaaccctaaccaaaagccaggcctgagctcagggaaggtctttcgaaagttaaggattcaagaatgaaaaatcctaatagactttattatatatttaaaattatattaaggtctatat

SEQ ID NO: 25927 - DNA, 2335 bp, Cannabis sativa
ccgatctcatgaaccaaacacaacacaaaatataatatttgttttgtctattttttttttttgttttattatattttggtgtcaaattatgcagtgaaattaattgaataggaaatctttgaaatacatatacatgagtatattaattttatattgctagacattgatattttcttatgcattattggatatttttgtatttctaacaattttatttataatttttatatttccattgataaatatctatgatatttccattgattcagatattataactcaatccactttctttattacaccctcagagtagttggaagtagaatttgaatgaaaaatgtttaagaccttatatctcctgttatcaattacattttctttttctttttatggtaaatatttttattcagccagaataatgagcacattaaatgttgaataacctgtaactttaattaattatctcaaaattttattataaatcgatgcaatacctatatgtaacactttaacaaagaaaaaaagagtcacaaatggcagaatcatctgtatccacaagaacttggatctatacattcaatgttttccacaagttacacgccagttaaaatagtgtatgttcatactggtgttttttcttttcgatgaaaaaggtatcacatcacatatagaaactacactaactgttgttcaagttagctgcaacacgcgcctctctgagaaaccgttccatctctcgagcctgatggaccttgagagcgtccataaccaaccttgatgccagatgactgtaatcaaaataaccattgaagctttaacagtaatcgtttcatacattgcatttataataatcataataagaataaatcttgtgtctcccgaattacctcattggatacatcaaacacgccttcctgaatattctgaaggatttttgcagcagttttgataaaggcctgtaagtgaagtcgatatagattagtttaaacatttcgaattttacctttaaaatagaggcttcactcagaattcgtttagcaacatcacctcttcaacattttgagcagttcttgcagatgcttccaggaataaaagcccattttcttttgcaaactgctctccttcctccttgctgacagccctccgatgagcaagatcgctcttgttacctattagcatgatcgtcatgttgggatttgcatgctgccgagcatcctcaagccagtttgccaaatgattaaaagtttctctcctacatgaagaagagattccgtagttatagttgaatccaccaaaaacacaacctctatggattagctaatgtaaatttcggtcattcacaagaggagtaacaaaagggtctattgctttcctttcctttcctttctttaagcaacaatgtgaagtttcatctttcaagtatacatacatcaatagaattagaatgtaagaattctatgttgataattacaaaatacaaagtacaatacaatctctctctatcacacaaacctggttatgtcatacaccaaaagtgccccagctgctcctctatagtaagatctagtaatggatctgaatgattcttggccagcctgaaagaaaagaaaggttcctgacctaagatttcagtgcattaccaaacagtacacatagacatgaattgttcaattcattaattgaaaaaccagttgacttactatattataaaattaagtttatcatatatgttaatgctacaggatgatcacccttcataaatatatataataattattaatatgcctaaaaactccaccacaaaatctaacacaacttttttattaatttattcatttcaaaagtggaagccatttaagatcaaagtcacatgggcacttacataatttgggcctgagaatagttagaaaatgcatttataaaacaaaggaatattcacaaacgaaaagctcactattttgaaataattttctcagctaagaagaaaaagatgcttacagtatcccaaatttgaagctttattggacgaccatcaatggtgaccatccgagcaccgaactcaactccgatggtgagatcatgaacaggttggaacctcttatcagtgaattgtaagagcaggcatgatttccctacacctgcacacacagaatcccaacccccaattcacaaaaccaattaattttttcttttcaagaatgatcggaattagggttcttgaaattggagttaaagtatgaaacctgtgtcgccgatgatgatgtacttgaaaaggtagtcgtaagacatgttggaaacgacgtcgtggagctcaagaagaagaagaagaagatga

SEQ ID NO: 25928 - DNA, 3097 bp, Cannabis sativa
tatttttataaaaaattaataatttaagtatattattgaaaaatctgtaattattaagtgtgagagcagattttcttttccttctatatatttattttgttgaagaaatgtagaaaaaaacaaaaaaaaaaaaagaaggattcgcaaattatatatttacatgtaatgatttttatgatcttcaacttgtggacatccaacattctcaattttccatcaaacactatcctattgccttatcttttcatatcccttttcttcttcctaaaaatcacccaaaactccatttttttccccttctatcgaaaactcatctccctaaacatggctacctctactctctcccctgcaactccatctcaggtatccattaaaatatctccatttcccacttaaaatttaaaatttcaagctttagttttatttaatttctattaattgtgtttctttcagctctgttcgagcaaaaatggggtcttttctccatcccaagctttaatggcaaagcccacaaggaccaagttgatgacaaaggaaaacggtatgaaagtcacttgccaggcttcaagcattccggctgatcgtgtgcctgatatgggcaagaggaagctcatgaatttgcttcttttgggtgccattggtctccccactgctggaatgttggttccttacacggctttctttgccccacccgggtgagtgtccacttcatcatttctcaaatttattagtactattatcttatttttcccaaattttaccaaataacttttgaagcttcattagaatgagtaacaactaacatgatgttgggtttcatcaagttatattccatgtctgttttgtatgttcagtaactcgatttttggtttaacctaattcagatcaggaggtggtggtggtggtactgtggctaaggatgctcttggaaatgatgtaattgcagccgagtggattaagacccatggccccggtgacaggactctaactcaaggattaaaggtacttgactcttgtttttttttttttttttttaggaaaaataaaatgttggaaattaattcaattgtggttgtgatcaaaattcagggagatcccacataccttgttgtggagcaagataaaactttagccacatatggaataaacgctgtgtgcacacatcttgggtgtgtagtgccatggaatgcagctgaaaacaagttcatttgtccttgccatggttctcaatataacaatcagggcagggttgtaagaggacctgctcctttggtaagctaactgaaccatttactattctcttaagagtgttcacctattttacttttccttcttcacatgattttaattgaaaaagtagagctatccctctgatataggaatttttatactatctatttggaacagtccttggctctggctcatgccgatattgatgatggaaaagtactatttgtcccatgggtggagactgatttcagaactggtgatgaaccatggtgggcttagaccaacttgtccataaacttaagctctcaattttatgctgggttttctgtaagccaatcattttgaaagtcggtatccaaaattcacgttggaatcagatttcctgttattattaagttcatttatatacttctgttgtaccaatttgaacataatatcagcttctccacaaacaatactgtggactttgacttttgttttttttttttttgtttttcgtttcatataaggtattttatggaagaagaacgtttttagtttgtgtataataaggacatttgtattcttattctttcacatgaactttggtaaacaattggcacaaaggaaactgaagtagcaaataaaaatgatcatccatgttattgtagagtaagctgctaacgaattagggatgttaatggggagggccaggctgagatcgaccaattaagctttttaagttggggcaagtcagggctggaccaggttgaatttttctctaaataatatatattgttgactttggttttagctgggagtcttaaattaaagcgatatagatcaaatatacaatagaaagtaaagaactataagtaaagaaagtaccagaatttctaaaagttcgacctcatgatagtagtaatagcctactcctttttaatttgtattgatttatgagacaaagaacaaattattctctctctaaagaccattatttataggggcacattaaattgaattggtttctgttaatctataatacataaaatggaaaatagatatgttttcataattacaatgaaggaattggacaagttcgggctgattgcccttactctctaaagatacgagtcattcccacaaaagtaaggatcactttgtgtcatgcaaacttgaagatatcattgatcaatgttgaaattaccaactcaaatttcttagcctgtaatatcccgataagtctaatggtaaaaaattagggtttatattatatcatgggttaattaggaaattagtggaattatgatcctactaatctatttcagcataaaatttaaattttattataagtgagtaaataaacataatttataaattacggaaatttatatagcatgtgtgaatgtaatatgagctatatgttgaataaaaatatttttaggttcggcgaccctgaagactcgataagtcggtaaataagtgtaatttgttaattacggagatttatttgagatacgtgaatataatttgagttatttgtgaaataaaaatatttttcaggttcagcgaccctggagacccgattggaggccaaaaatgtcataacagtttagttagaaatattgatgggattagtgggataagttgattttagaaataccaaaatattttaggatactcgaaattggcaaaatactttaaaagtagaggtttcttagtggctaaaaaaataataaaataactattaattataaagtttttattaatattatattattattaatatattatttttatatatataaaccttgttgtaaattagtatatatattataagtttatattagaagaagaaattttcattcattctcttctataaagtttt

SEQ ID NO: 25929 - DNA, 3932 bp, Cannabis sativa
agttccaaccatagtagtctcttcccaagaatttgctaaagaggttatgagaactcatgatgccatctttgcctcaagacccaaaactttgtacacacaaatcatactatatagcaatagtgacatagcctttgctccctatggtgagtattggagacaacttagaaaactatgtatgcaagagcttttgagcatagctagggttcaatcttttagacacataagagaagaagagatgaataatctcatggaatggattgcttcaaatgatgggaaggttataaatcttagtgaaaagattcaatcatcatcatatggcatcacttctagatctgcctttggtaagaaaagcaaagaccatgaagagatcatatcaattgttgaggaaagtataaagttagctagtggctttgaaattacagatttttttccttctcttagttttcttgctttgattagtcattcaaggtcaagattggaaagtgtgaagcaaagggctgagaggattattgaaaatatcatccaagaacataaagacaaaaatatcaaagctggtgaaagtggaatacatgaagattttgtagatgttcttttgaagtttcataacaatgatgatgatattggattttccttaacgactgacaatgtcaaagctgttatttgggtaagtttttcttttcttttttcttctatatatatatattttatttatatttctatttattttttattatgttttggggtttggtttttatataatttagatttaatttatttagaattgtgtatcaattaagaaaaagaaaataacaaacattattaacacctcgatttatagatttaggccttgaattaattgatatctcaagtaataaattctatcttcaaaaaaaaaaaaaaacttctgataagtttaaaacttatcaaacgttgtagattaacaaaaaagtttttagggtgtgtttggaaataattgtgtaattaataataattagttatgaattcataatattatatatgtttggttaaataaatagtaattataccgaaaagtaatatttttaagtatttaatattttaagtataaaaatattagtaataaattaaagagtgtaattagaactctcaattacctttaattaattatatagttagataaataagttaaattgtgtaactactttcaattatacacaaatttaatttactatggctttcaaaatataaccctaaataaaagaagagaattgctaaaagatactactagtgcctagctagtacttttttcgatttcatactgctatttgtataattaagtatggggttgtaattgtaaaaaatagttgttatgcaatgtatcactaaccaatcgtgaagcaccatctataaaaaatattgaacaccactaattaccaataacaatactcgtaaaagaaaattaaaattctttaattcatgatgatcatgactttgtcaaagtttcacctaccatcttaagatgtttggtcaaacttttattcaatttatagaattgacttgatgaaaatcccaatactaacagacaataacaaagaatcaaaacttattataatatgcattgccaaaataataatcttaccttagaaaacgaaatattattgtaataattaagtgttggtactatgattttcattgatgttatatgatatattattttttaaaattatcatcataaaaattcttacttttagtcacaacaaaacttgtgactaaaaataaaaaaaattgtgactaattattaattattattctaatgttgtgactaaaagatccgtggctatagtcacaagtaatattttgttgtgaccaagagtcacatatagtcacaaaaaatttatgttgtgactaaaaaattgtcactgaaagtagctattttttgtagtgcatatatacatatataaaatttgactaaattactcaataattatatttaatttcattaatcaccattagaatttgtcaactactaactttgacatcatataaaaaaaataacttgaattttttgtttcaggacatctttactgcaggaactgagacatcagctacaattgtagattgggcaatggcagaaatgataagaaacccaagagtaatgaaaaaagcacaagaggaagtgagacaagtgtttaacaaaaatggcatagttgatgaagcaggaattagtgatttgaaatacttgaaatcaatagtgaaagagactctaagattgcacccttcttctccattgttactcccaagagaaagtagagagaagtgtgttatcaatggctacgagatacctaagaaaactaggatcatagttaatgcatgggcaatcggaagagatcctaaatattggattgagcccgagagttttatgcccgaaagatttcttgatagcaatattgatttcaaggggaacaattttgagtatatcccatttggtgcgggaagaagaatatgtccaggtatgtcattcgggctaattaatgttgagcttccgcttgcatttttgttgtaccattttgattggaaacttcccaaaggaataaggagccatgaagatttggatatgactgagttgtttggtatatctgtgaaaagaaaagatcatctccacttaattcctatggcttattatgatgtttcaagtgttgaaagatcggaaagagaatgaaaagttggagctcttagttaatatttgtttctttgtaacttaatggaagaattctagggttctctttaaataataatgtgtgcttgaggaataaagtattgtgtaaaaatgaaaaaaaaaaaaaaaaaaaaaaaaaccctagatatctgtatgtgtatatataggcccaaaaaaaaagaaaaaactttaaaatatttaatgtagaattgtaatcttgtttgttttatatcacagattaatttaaaggagatttttaaaattatagtacattagttggtggaaagagtcacacaacacaatttacagtatcgtgtgcatgttcttgactaatataagttttgaaaagttaattctcctaattttttttaatggaatttggggtataaatcaactcaagtttcacttcaaaagaataagaaagatttatcttgaatataaatgttccacctactttattagaattattttagaaaggtgcctataaacaaaattgtgagagcgtaggcccgaacaatatcatgctaatgtaaaaatttaagtggcgtgacaacacaacaaggtagaaaaacgagacttaacgatgatccccacatataaaagttatgggaaattcatccccaaattttatttggtgaattgaccgatgctcaagcgcaaagaactaataagttatctattatattacaaaaaagggctttagaggcattttttttttgggtatatgtcgtcagttttagcaaaatttgtgaccaacactatttcaggcgacgctaaagggagtatgaaataatcgacttcagaaaggatctatggagtcggtagccatgtaaggtctgtatggagtccgttttcataataaccgacttcataggaacgctatgactgtgactttttcagctttagaattttgtatgataacataaattttttaaaattttattttagaaacctaatttatatatatacatatgattattttattatcaatatatttaatgatgtataaattatatatatttaccgtaaataaaaattaaattgaatacatatttacattactctaagtaaatgtattacattaatattattttaaaattactttaaagaaaatacataactcaaaaactgcttctgaaaaaatttaggattcataccatcagggcctggagacttgtcggggtgcatctgaaaaactgcttctttgacctcctcatcactaattggccgaagcaac

SEQ ID NO: 25930 - DNA, 2503 bp, Cannabis sativa
aaacagaaacaaacgctagtaaaactattagataagttcagaattgagtaaaaaactgtagctactctccaatccgggataactctggtggttaaagcactaacagccacttttgaatctgagaaaatctgcacttcaatccatccatcctcaatagccatgttgagagcatgcaaaatagccattaactctgcctccaacgccgaatgtgtctgcaacttttgagcactaacaaaccagaaaccagtattcgaatccactctcattgcagcaatgcccgcatccccttgaaaccaagaggcatcagtgaaaatatagttcccaattccttcattcaatcgaggaatgatcgctctatgttgcttatcagatcgaatgtcagactgatctttgttaacattaacactgccatcttgaacaagagaggacgaaatcctgagttccattgccttacgctcaatcttacacaatgcagccttagtatcaactctatgagatcgaaagcaaaaggagtttctctgctgccatatctcctccaggatgcaaccacaataagacagcaactcctttctctcaaaactatcaaaattgttgattaaataaaccaacgtgttagacacattatcgatgggaatgccatcaatcttcaaagccaatctgctcccgaaccaaatagcttttgcaaagctacatttccaaaataagtggacagtcgattcctcctctaaatcacagagactacatgttttatcttgcagaaagattaggcgagatttagtaggaagtgcctcacttagaattctccagaggaagatagatatttttggattgatacctggctcccatatccatttccatatctggtcctctgaagcaaacctttccttattatcggtaagataagcggctttcactgaaaactttccccctgagttttgcttccaaaagacctgatccttaaaaggtgctgggattcgaggaatcttaacaatacgatttcctaactcatcaccaaatatttgaagtatcagttcagcattccattcattaccttgagacacatattcgatagtctggatggtgtatcctctgcctctaattttattcatcaaggacacaaaatcagggtattccaaccaaggaatccaaggttggttccaaaaattaatggtggaacccgaagctgctacagatacagaacctttgaggatcactgctctagaatccaatatacatttccattgataggagtcactgcctttttttttaacacaccagaaattctcatatctacagtatttttggagtagacaagagacccatggtttgtcttcagcagttgcaaggctccaagcaagcttggacaagagggccttattcatttcttcacattttcttagacccaaaccacccgaacactttggatgacaaattttgtcccaagctttgaacgccataaatctattcttttccatgttccctagccaccaaaatttcctcatcaacgagtctaagtcccggcaagtggacagtggaagctttgaagtggacatagcatatattggcattgccgatgtcaccgatttgattagagttagtcgcccggcatacgaaagaagtttcatcttccacccttctaatctcttcaataagctttctttgagtcgcaaatagtcctcttttttcctccttttgaagatgaaagggtttcccaggtgtcgctcccctccattcacttgaacattgttcataactcccaatatactgccttgtcttctgctgcacaaattttttgagaagagaacactcgacttagccttgctacatgattgccccgaccatttctcataagttgataagcactcaaggagtgcctttgcttcattttcatttgctcgggcaaaaaggatagtgtcatcagcaaacatcaagtgggagacggggggctgagtgtgcaattttgatgccgtgaattacacctctaccttccgctcttcctatgagttttgagagggtttcctggcataggagaaaaagaaaaggagagatgggatctccttgacgtaatcctctctgcggagttatctttttcatggggcttccattcaaaagaacagaataagatacgctggtgacacaagccatcaggagctgtctgcatttagtatcaaagccatttgcacccaagactctctctaggaaacaccattccattttatcgtatgccttgtgcatatccagcttcaccgccataagacctccaatcccctgtttatgacgaatcttatggataatctcctgggtaagaatagaagattctccaatccacctgcccggaatgaaggccgattggagaggggataccaaatcgttcatgagaggcctcagtctattagataagatcttcgcaataaccttgtatgagaagttgcagagacttattggtctaaactgatccatactcaaaggaaaatccacttttggaatgagacaaatgaaggta

SEQ ID NO: 25931 - DNA, 2659 bp, Cannabis sativa
ttcccaataatatagctcggtaacgaattgcttcttgccccgttcgttccgctcgcaacaatccaataagttctccgggtaaaaaaacattaggcgtgttcataaaatattcgatcaaatttaattcataaagtacgaatattcgtatttgtgcggattgaattagattgaaaaatttaaaatctacatttttgcggattagatgttaattgacatgtaaaagtaatcgatccaattcaatccacatatttaaaaaaattatatatacaattaaaatataaagaaaatgataatttaaaagtttaatacatataaaacaattatatttttaaattgaaaagatcaaatgtatgttccattgttatatataattttttttaatatataatttaaaacaaaattaaatattttttatacatataattttattatttgttatttaatttattttaatttattgttagagatatacataaaataacaataatttttttttttgatgttatttgaaaaaaaataattttcttttataaatattaaataatttaatattaaaaaataactaatctaaaataattgatccaatctgcacttttataaattggatagattagagctattgggcatattgaattagattcaaaatttgaaatctatatttagtgtggaccgaatgcattatgagcaaaatagaactaattaaattggataaacaacctatgtaacaccaatagtttttttcgaggttataaacaatttatgtacttaaaataatgttatgccatgccgtactgatacttgattctgaaaaggaggctttcgtgccttagactcaccccttcatttatggcgaaagttcgatctgttctgcttgtgtagttgtgtgatcctaaatcattatccatatcaggagtttgtggcatcgagtgcaaggcgttttaagccattgattgtactagtccactaatgatccagcagcacttggaaagtgaaaatagtgtctatagacaggtaagtcccgtttcacaaagtcatttaatagcaaaaatacttgttgcttagtcgagtaggagttataactgaacttcattaactacattgcagaagaatttaatgcgctgttgtaaagagtaggatttactcttgaaataaatgcacactcaggtgaaagctaagaggaaacagttgtgcattacgtacaattttttgatttactttatttgttttgttaagtacaattcaagtaagcgtattaaattgcccattttcggcctatgaaattttgcccacttgtcaaaaatgacatcccttatcccaccaccccactcggcttaaaaaagaaaaaagaaccaaaaaatcgaagtgactcgaaacctatacaaaactaaaaaagaaagacagatttagggggaaattatatgaactgaggtggatggtaaacgaacccaaaaaaaaaaaaaaagaaaaaagacgacccctccaaacaggtcaagaacgagagatgatacgtgtatacagaaactcgttccacgtgtcaggtaacccaggaagacaccaatgtatacaatctgcatacgtggccgggtcagcctgctgttctggggtcaacatcttaccctgtcgtatggtgtggaccgaagtatgtgcatctttacggtactcagaaagagttgttatgttgaggaagtgaaccggaattttgagcgacccagttatgttattggctatcacaaacagccgacggtctgtccccacttgaattgggcttgatatgttctgtataggcatagtttctttggcacattttatgccatctggattatcccagtccaagctcctatattcaattttaaaaccagtaaataaatcagttagattataaatagagacacatgtatgtagtaatatattacatcaaacacaagcaaaagcacgagcacatgacaatgattgtttgtcataagggtaatttatggtacaatgggaagaccccactactacaaccaccaatgttaggttcttacttgcttacctaattagaagtattaggttcgttttaagaaggattagctacaacctacacgacctataattatttggtatgatatgtcttgaattttataatatatatttagttgtacttggaaaacaataaggcaatttttttgttttatcgtatcctttaaaatttagttgttaacaagccaaaagaacatgcccaagtaagcgttagttacatcagtgaacttaccaaagccaaaatttgggcaaaactaatttcaatggtaaaagaaaatcagatatagaaaagaaaaaagaaagtgtgaagagcaaaagggattagaaaattattacttgatatgaagaggggacatgctactaaagaagacagtagtacgattgggatctatattttcgttcacccaattagcccatgtcctcaaaactctcccatatgctactggccgttcgatctcatcatactctgtggccccttcatcgaacgatcctcgtctttttaattaatcccacaaagtaaatataaagtatgatcagcccattgttgaggtagtgaaaattaaaagggtatcatatcatatataaagagacacaaataagcttttttttttagttaagatatggatgtatatacttacaa

SEQ ID NO: 25932 - DNA, 1073 bp, Cannabis sativa
attagaaaaagtaactgattacctttttgagatacagagaggccacatagccctagattcttaaagttgtccccccacggccacggccggcagattttacaaaatataagtttcacttcttttttttcttgttcttcctctgatgactttgaattttctttgggagtgtttttggttgttcactctaaaaaatcacacacagagttttcatttctaaattattctaacttaatttatggatctctattctcccacccacatggcatggtcctgaaagcatttccagctaaaaaaaaaatcagcacgacttttgtatgtatttgggttacaaaaagacaagacatagtttcaggctttcagccgttctcgatggacgtgtgtgcactaagtgaattaaaaatttggatgtatagagatcatacacacaataaataaaaaatactattttcaaactaaagatgatataatatggtaaaccatttaattatatacctataattcaactagagcattgattacccacttaaattaattatttatctatctatatatgtataattgtccaacgcataatttatctaaaaaatattattgacgcttaacatctttttcggtcggtgacatattattattgctataattaattattatcagtctcatataaaatatattttaaggaatatcgctaattaatcgtagagcgccacctataaaaaatactaaaaaccactggtaccaagtaacaatgctctacttgtgaagactcagtcaaacccatataaaatagtttttaagaaatatcgctaaccaatcgtaaaacatcacctataaaaaaatactaggaaccacttgtactaaatcgcaatgttctatatgtgaagactcagtcaaacccaatataagaaaaagattaataaaagaagtgggtgggacccacaaaattatcttttttaatttatttaacatccccaccgaccctttctctgtatcttcgatttctctttctttctctcttcaaaacaccaaagacaaccccccataaccacaacctatggagcacccacgacccacct

SEQ ID NO: 25933 - DNA, 4935 bp, Cannabis sativa
  modified_base (30)..(32): a, c, t, g, unknown or other
  modified_base (1772)..(1775): a, c, t, g, unknown or other
ctcaaaaccaattggcaatgagtggagtannncatgttcttatatatggctcaattctctaccatttattccatgtgggacattgtccacaataaattggaccaaaacttacaaggaaatcctatgattaatatgcactcccccattagtgtctcgcctgaggagtaaaatattgctataaattagcttgtccacaacagattgaaatgcatagtcaacaacaacggttattttacttattttaagttaaggtagttgtatatttatttttagctaattagaagataaataaaactggagaaatgtccacgtttcataattattatttagatgaggaagaaagacaagtgactcatcaggcgtatgttccataacaatatgctcaagaggatagggtccacgaaattatgctcaggagtttgtttccctaaacgaattacctgtcaagtacaatttttgttgaacagagggcagctaattagccagtatttatctacttagacaatatcggcaacatagtggcccgagcttattatatgtacgaacatgagggtctaatcacagttcacactaagccctacgatgattcacatgcctgggttctcatttcaaaaatgctgcaagaggatgctgatgaaatcgcaatctcgattgaggggtgcagatacgttaagaaagtagcaaacatgttcctttcttggcctaaatacctaattttaacactcgaggtaacttttgttattaattaatttttaatgattagtgaaatttgaaaatcttaactattcaaccatagtgaagtaaaatcttaattaattgttttatctgtttttgtttgttattaggcatctttaaaatttttggggacgttcaattacaggcattatgctgctgaaaattcgatagaattaggatcaaatttgatatattatatggtgttttgtataaggtccactagcttaaccaccatcaagatatgatgtcgaagggaaaaagtctcacgccttatcgaaaaagtggtggagatcaagcagatctattattcacaccagagatcatggcactaattcccaagtcacttaaatggatggttgaataatttctgagagtcaatgataaaaatgagataatcccaattcgggtaccatgtggattcataacacctcgtacccagatcacgatatctggagaagatttgcagcaggtggcgttgtgtgactttatcgggaatcaaggaatattttttggaatgatatatactcttttttaatttaattaaccttatatatcaaattctattgaaattattataaaacactaatatttaacaatttaatgcgaacacatatgggagagcataaatgatttgagacgaattttcaagttttatgacccaaagcttctcgcagtgaacgataacaaaaatttaaagaagaaaaaatattttgagaatgctcacaaggattggctcattggttatcatcgatgaataaccaacaccaaatgttctttatttcttagaatatcgcgtaacactacttaagagataatttaaaattattttctatattaaaacttgaaattatttttacactatcttacatacattctaatataattttttaatgcgcattggatgctagaagtcgttgtgctaggaaaaattatctatttaaaccatatatgtgaccacaaagttctcccacaaattaatgcaatgttggaaaggtaataattaaattactttttatgtaacaaatcttttaattaannnntatatatatatgttaatgaattaaaatgttaataatttttaaaaaagaacatatgagattataggagaatcaaatatgtttcttggagcgtggccatgaatttcactagcaaattgtccaagacaacctaaaaacaaagaagtggtatttatattttgaaatacatgactgacatcgtcacacgtgcaaaaaccctaatcgttatatataaacgatcaaaaagttataagttttaattattaattatcgaatttattatattaacaaacaataatatgtatactaatataaatatttatttctttttacagtttgggaaaaagaagacatacgatctaaaaactgaattgttaccattacagtgacagcggatagaacgattgctagcggtgattcacgaaggcttgtgcgataaatgcttaaatgtagaagaatttttcttccctagcttattttttttaggttaatttgtaattagatttattaacttgttaacacttaaactatttttaaaatatttgtgtaatataattgtaatttaatattttttttaattactttcatgaaattaatttaagtatattgactaatttccttaataaaaaaaaagtatattgactaattataaagttaatttaaataatattaattaatttaattttaaaaaataaatatttaatttaaattaaataatatttatttcaatttaataaatatctaatttaaataaattaaatttttgaatttataataggtttactagataaataaattaattgtaatgacatggcatcggttattatgcatttgccgtcggttattatatcatatggtgtcagttattaggatataactgacgccatatgaaataaccgacgtcatagagtacactatatagcgttagttatattcgatcatagcgtcgcctaaattagcatgcgaatttcgctaaaattgacactaaaaggctttaaaaaccgcctctaaaacccaaatttataataatgacttctgatataaaaaacaaaaaagaaagaaatatatatatatatgttcccatttctgtctttctaattttctatccttcttaaattttctttccatcctaattgctttcctaccaaacagtgttaatttagtaatttaccttatacataattttatttatttatttattcagaatcggcttttggtgtgagttttaattcatagtactgtattgaaattattgacattataataagtttatgttaaggattaatttatgaactgagctttcaaacatttcaaatgagcacttcttctaacgcgtttacataatattatgtaactcaattaatggattaatatacgaagcctatacttatatacatatatatatatatatatatttatacacacacaaatatttcttttgaagctgacaggttcatgcacagataaacctgattcaattgtctttagacttacaaattaatcgatgatttgttcttcaaatatgacctatataaatatatagacaaaataaaaataaataaattgacttcataatatttatttttcaaaataagcttttgtaacaatgtcaatgtgatgattaaaatggtaaaatatgctgactttttgagctcatcacttctttataatattttcctttttattaattttcttttggggattcttattattaaataagttgacttctcttagtttaaatttaattaatttattaatctgttcttaattggtacatttctcagttgacttcagcttccttctcttactttattgttaaatttctcctgtactttagtcaaccaagttgacttgataattatatggttatttaagttgactttgatgatcattcaaccattttttttttctttttcacaaattcaattccgtcttctgttttttttttcccaattagcaataacaaaaatattatatatttgattatatctttccaattttcaaaaataccttttgcctaggtatattccaaattttcatatatagtggcatttatttttttgcagatcaaaccaataataatttttcatatattcacgccagctcttgatcgtataattaattcaatatggatttgaataaaaattggaaaattattatgtatactaataatgtatcaaaatctatatagggtgatcgattatattgatcattgtagttgttattattaacatatatatagacttgaatatagtactacacagtggtcattaataaaaagacgatgtacgtgaatctcactactataataacgacgaataatatatataaaattactaccatatattatatatatatatatatatatatatatatcttacaaattaatcccactgttcttgtcactattatccttctccagctaatttttttttaacttcattttcgtatttatagaattctttttaaggaataagaaaaagaaacaagaaagatatatatgtttttgtaaatcataagaggaatgaatttttgttacgctatatgtttttttttttttttttttggcataaattaaaaataaagatattgatatatatattgatacaaaaaaatagtgtttgatcttattcattacgtacattataatttaataatatatgacaagcagaatatattgatctttcaaattagggactcatcaatatcactatgtatagtaattaagtacatgtaatgattgattaataatccccccaaaaaaacatagaatagaatgataaatttcaagtaattaaataggcttgtattttcaatatttggaaaagcaatataataattgtagcataagtacgtatatagttattgctcatgatgattaagtatatgtaattaatattataacagttaagattcttattttgtttcttaattatgacgagaaaataagataattctcagtccacacactatgtcataactttcatatttatcgtcattaattactaaatttgctgacatataattgggttagagagagttattaatatgcatattaatttcagtaaaaatattaatgatcttattgaatgaagaatgtatttttttccctaacaatattacttttaaatttgatcaaaatcaaattacttccacaaattgataattcagatttatattcatt

SEQ ID NO: 25934 - DNA, 3365 bp, Cannabis sativa
tccttaaccaataaaaatatatatatatttatatatattttaaggggcatgaggtcaaatactaacaattctgaagattgcaattatacaatacttttgaaaattctttcaattatatcattagtcaacaatacataatcatctagcatacacacgtacggaccaaaaaaataaaacttattaaaacaataatttaataatttataagaacatgaaagcggctacaaaatctaattataatgaatattttggtgtaaaaagattgtgatttccatgttccaagtatatatcttggaatgtgtcaaaaaaaggtatatatatcatggaaaactctattaaataacccaaattttacaccatatataactaaaggtttctcacgaaaataatatcctatacacacctggtaccaaatagtgtgtgcatgcaaacccatatttttttttttttgcataaagccattcatctcgagaatcctgaccacccgatctacgtggcggatgtggattggtcgactagtttgtagtcagacctcagacttatcgaccaacccacatccgctacgtggatcggaacggtcgggatcttaagataaatagtaggattctttcttttgtactttttaagattcgtgtcgtgttgtaccctattaaaaatgtgggtcctatatgtactgtgccatataaaaatatatgaattgtgttgtgtcgtactttactcatgctgatccgatttttatatagactcaaatttttatctttttttttcatattttatttttataattaatatgataattaccaaactattaaattatatatattttttttaaagcttcaattatttttatataattttttaataatattttacaaaaatttatacagcaaaattgataaaattattaaaatttaaatatttatttatgaatactcaaaatattattactattatcaaaattgtgcttgcatagttgtgtcatatcatatatttaagttgatattttcgtgtcgtgtcaatttatagtatgtatattgtattgtattatgtcaaaatttatatttttttatgcctagtcatgctcatgctcacgctcactaaacacgtgtcaatttcaaactgtatctaaaaatactactcgtatgtaagagcttataatttatatatttgaatcccttttctcttaccatttcaacacaaccataaccatcatgagccagtagcactctcacacactaattgttggaatttaagctcacttggttggaattttcgcattatctccctcaaagtcaagcaataagaatttaattttcaaaagttgtcaaagtatgaaaggaagaaattaattttgataaaaggcatgactgttatcattgtttatatatataactgataagtgtgtgatataattatgcagtttatcttagatttatatatatggttcaaactattacggtctgaaaattttgccaagaaaaggaattttatgtcactacaaaaagtaacgtgtcacttaaaattttcaagaattttgtgattagggcaagttattcgaacaatttgttcgcacctattcgagcccgattataaaaaattgtactataacgataataaaaaataaaactacaaaattttttataaaaaattcatagaacttcgaatttgatcgaatttacatgtttgattaaccaataatatgagatacagaaagattaaagaagaagaaggggaaagaggaaagagaagcagagtttcactactctgttatttctctgttatgctttttattaattaaaaagtaaatgtattaagaggcaaatcgacattatccaaggaaaaaagattagtcagttataatagaaattaactgtcctaacaaacaattaaccaacaccctaactttctaatttaaaattatatatgttagaattttatagataaatgtgtgtatatggtaaaatatacacaattaatttattccaaacttaattggtggaagtaacttatacattttatatatgatattaattaagttctcacatattatgatcaatgtgggactttacaatatatatcccttctcaagatggtggcacatttggctcattgaatcacaagcagttattttagctcttttttttagactgatcacagcgactctttttgactcattatccccaaattacaaacagttcttttacctaatctttttggattgattattaaatttgaatcggatattcgttagaattttatttagctatagacctatggtattatgttagattttaggataaatgagtgtatagtaagatatttagggtttcatctcaaaattaataaataacatatatatcttatatatatggtattaatttttcaaacattattaatgtgttactttggtaaatttgtaattttcaatccatacattatgcgtaatgcatggtcacaaaattgactagatatacattatttatctataaaagaaattattttgttgtattattagtttaaatagaatttttaccttgaactatgatactttgtaggagtttaactcttgaattattattattattattagatattcctcaagatatgaaaataattacaaatttctccctttgattgcattttgctaatttttttagataatgtattgatatagccgcaagtcacgcttataattacgattcgagtatctatttaattaattaatataaactaattaaaatcaagtataataactttatattttcaaacattaacttaaaaattatgagtggaaaacagatgaaagtgaagaagaaacagaaaaaatactctgcattgaacacttttattattgctaaactggattaatacaatttacatgagagagactctttatatagagagctgagttagttgggaataactaactcagttgaaatataacagcaagagtcaagaattagttaaccgaaattaggtaacagagcatgaaggagggtaatctcataataaaaattatagataaaccagttcaagatttcatcgtgagagtactatttaattatgcaattatttttcatttaggctcttaaattacagtgcataagctttagattagttttacactaggaaactatgtataaaaataaacgaaatggaattaatcgaaaggaaaattaagttgatgcagattagtccccacctcgaaaattggcaaaagtccccaataaatggaaaattaagttaattgtgacaaaagtcctcaaaaatttaaggttgatgcagattaactccaacctcgaaaattggcagtaatcttccctataaggtcacattttttgtaagtccgttggtccccaagttaa

SEQ ID NO: 25935 - DNA, 2332 bp, Cannabis sativa
tttttaaaaaaaaaaaagagagagttatcttgtaatattctcaattaaataaagtttggtgttgtgtctcgacttaggtgtgaattttctttaacacgtgattgctaagagttgattttattctgctatttctctaacctgctttttcaagtacgcaaagacattatagaaagaaggaaaaacagttcagccagtgaagcatctcttttttcctttgcatctctcttttttaaattgttaatgttgttctgttcatgttgagtcactcacgctttaaagtaagaccaactaccttgttgggataattatctgattcgtattcagttgttattcataagtacacgaagaggataaaaaatgacaagaatttaacttggtctaataaatgtcataatgatttccatactagttttcttcatattatatattattattatgtacacaatgcaagacgaccctccattcataaccaaataaaacaacgttcatgacaaggcagcaaaaatcaagaatcagccgttctagtttacccaacgatcgcaatcaagctttgccttactgccggaattgagcaaagcaaagagccaaagataccattcagagcataagcaatagcacagaatggaagagcctcgggttccttggctgataaggcagctgtgcccaatccatgagcactgcaacaattgaagaatgaatgataaacaacaacgacaataataataataacaatcagaagatcagtataaactcgttaagggttccgttcttaaatgtaagttgttatcacaactagtaatttcttaacagcagaagtaaaaaacatgaaaaaagggaagtagaccttcaattaaaggtatcaatgttcatacctagaagccgttgctataccacgagcaataggatcacgaaaccgtagtttatccagtgctgcttgaacaaagtttgccccaacgagaccagttactacaactacagcagccgtcagggatgaattggcacctgaaaaaaatatttcacgagtcaggttagctgacaacaatgagaaacaaaaaatgcttaaaagtcattgtgtaaatggtcaaaatatttagcatatttaagctgttgctatctattatgtgtactaacactaagattacatttaaaaagtaggatttgaaaaaatttataatgtaagtttgtaataaaatttggagaggatattaaaaaaataattccaacaagctaattaatcacactagaatgagacaacttaatcaaattgaaaaacttgtgatgattttatcctattcaatccttcctttttcatgtaccttaataataaaaagaaaatacttattttcttatagtttattgttgacaaattatttaactcatttattcttctatagttttctctattttttcttaatcaaatcttatccaatctaattctcctaaatgtatttcagttggaagaagcaaaatatgggtcccaactcctaagcttaaggtcccaatagtggtaaaaagttgaatgaaaagaaaacaatgagttaactgaaagagcctcatgcatcagaggtgtaagccactcaattaacctgatgaactctaagctttgaaagtaaagttgtatgcctcataccgcagggcatacatacaccacaaaggagtttaaaattcatgttcttatcataatactacaatattcaagttggtaaagggaaaatgagtgaaaatttgataggacattggatgagtggaaactgtctttttttttttttttttttctgaaactaggatcccggcctccccctataatatttgggagacaaaaaaattatagcaactgctacgtaggtactcaggagggacttgaacctcaaataatgtgggagcaaaccacatgtcagacatttgagctatccctcttgggtgatgagtggaagaaactgtttcgaaaagaaaataaactaggcttatcatcatttttcatatattatttggagaccttttagaaaagcgaggtagctgcaacacaagatttggttgcagttgattacttatcctcgatgtacaagcacacttttcttaccttcaaacagagacacaatactgagtgccaatgcaacagttatacatctgggtagaattgatatagtcaaggtcggttccaacccaagtagacgtccaacaagagctgttgaatacaatgagaatattgttgagaggatgacagacgtgaagatctcagctgcatgcctcttaaccagctgaaaatatattcagtaataatctctgtttagcaacataatagtaaatctgaaggaatatataatgatacaaa

SEQ ID NO: 25936 - DNA, 3514 bp, Cannabis sativa
ttggcacgataccatttgtggtgccggttgtcacattttggcacgaacctattggcccgatcaaaagggcacaacacgtcgtgccaatcaaaaggtgggcttggcactaatttagtcgtgccaataccctttctaatttagtgttttaatttcttttttcaaccaacttaccgaagctgaaattgaagggacctgttgcatctaagaagctaagttcgtctctccaaacttggtaaacaatccaagcaaaagctatagaatagacttgcttatcaaaagagaagaacccacctttcatcaataataataattgtaaaaataaatatataaataatctacaggccgaattagctgttttattataatttaatttttctatttgaaaatatagtgtccctagtctttttaatacagaacatcattatgacagtattattatacttattgagtttcatgcactcgtacgttgtgcgtataaaaaactatgaatagatatgaatgggtaaaaaagctgcaggggcctacgtaaagaagttatgttcgccactaaggtgatattaactaataatttttagataaacatttgggtattttatatgtacatatatccctagtcctagagacaaaccactcactcatcataacctcaggtttactctcttctctccattaccatagtcagatttataaagcctatatagagtagtactagtgagagcaggtacggtatacgatcattatcccaagagactaaatctccttcaaatcacgtacgaaaaaggctcatttgtcacctctttgctctttccttaatttgcctctctttatattatttcttctggataaaaccatgtcaagaatacacccagctgatgagaataaaaaatatttccagaacttgttatcaaatcaagatcgtcataataatcatgttgataattataatgatcatcatcaccaacggcgctcagtgctcaccgtatggaagaagtcaagtatgagtttccaagggactgatggctttactgtgttcaacaaccatggcagattggttttccgagttgataactattccaggaaaaactcttacgttaaaggaggccttgttctcatggatggaactggcaaaccattgcttactctcaaacctcaggtactactatataagtatatataatattgattaagctaagctatatctggatctaataataataataaataattgggttcttttttttttttgtcaggtatttagcatccaataccaatggaatgcatacaaaggatcagaagagagcagtccaacaaaatctagcaaagtattctcaatgagaagcaagtcatcactactttttacaaacatggacaaaaacgcagaagcagaagtattttttgaaagaagagatgatgatcaagatcaagatcaagatcagaaaaatagccaacaaaatcccgatttcagaatcgaagggtgcttttggaggcgcaactgcaagatcaggaacagaaatggggaagtggtagctcacatagccaggaagaaagtaaacgatagagtgttgctgggcgacgacgttttcagccttgtcgttcaaccgggagtcgatgccaagttaattatgtcgtttgtaattatattggatcgtatttgtgggaagccctatgccccagttttatgttcttagattattaatttatcatgtataatattatatgtaattaataattaaagaaaaggagcacagcatgcacccactagccactaaacaatactcaattccaatctcatcatcacttccctccacttacgggaaagatggctagataggggtgggtcgttaatcttttttttctttttttttaatttaatttgagcagattgactacttgcatttgtgatttaaaaaatatacgaaagagtttgtctcaaagtttttatctttttgtttctacttactttcattctacatcactcaattccatcttaacttttcaactcacatatgaatatatttatgttatcctaattttagcttagatgtgacaaattttagacgattgtgttaaacaacatcagctcaaatactatattttaattgataaaatttaatattaaatctgatgtattttagtttaataattactataaaaaaattacataaattcacataaaacattacctaatgataatattgaaatacaaataatacataatcaaaagcattagggagattatgtggcagcttatataagtctttttacttattctttacaactctatttttctaatttatttaatatttgttattaattttttatcatcactattaattagctatatgtttaattctcataaaaaaaaaaaaatcaaaagacataccattaaatagtatttgaggctcttcattatcactctatatgaaactaggtggcctaatctctttctaatcctctactttatctaatttatagttttttctattaagaaaagaaaaattattttggtaacccatcattaacataccaatcaattaataacccaatactattaaatagatagatagtgaataaaacattaaatattaggatgatatatctaaacatattacatgtaaattattagcaaaaccttcaatataattcaattacattatttaattttaaaaatgatgatgttttatattctctcacactgtatatatatagtaagataaaatttaacttgaaatgagaattgtaaatagacaaagaataacagagttttgagaaaataataaagtagagaaagtcgatgagagtggttagagaaaagaggatatgaaattttgttatagagatttatttattattcattttttacatatgaatatagttttttttttacataaacttattaattatcatcatttatatgcatatatgtaggaaatttaactctgatatataggaattaacctctgtaattccagattcaagatcacacttaaacaaacaaaagttaaatcaaaacaaacaaatcaagaacaaaaccagcaacacataaactagaaaaatataatacagatgaatctaaatagctgtcagacacaataacaaagagatttatactggtttcgatcttaagttcaatgtaatttggtcatactccagtttgaaatcattgccaccaatctttattgataatgagaataaaagatatcaatctcaagagctacaagaaaataatcacaggaagtcatccatggtgtaatacctcaacactcattaactcactaacccgagctaacataatcaacaatgttgctcaatataatttcccaatcccagtcctctctctcagatatctctctccatttctcactctaacttctctctctattgtatcgtgtctctctcgtgtgtttgagttgttctcttttccacttatgaaatgagaggagtagttctctttatataggccaagggacccaatatgcaagttgtcctttttgatagttaagttagttaaaga

SEQ ID NO: 25937 - DNA, 1800 bp, Cannabis sativa
gttcagaaagtatcaggatggggaacgtgggaatttacccgattatgactcgaatgaagaaattgagttgtttcatcttgatattttgaattctaaattccctcatggatttaaaaacccgcacgtctcgtagtatgatgggactacgaatccagtcgctcacttgaataattttaatacaataatgcgatccaataatatctcgaataatttgcgctgcatattattcccgacttctttaactggagcagagagtagctagttcgacaaatttactcatcattcaataacatcttgggagcagctatcaaaggaatttaagaaacaatttcaagctgctagagacaggcgacctgaagcatcatccctaactaatataaaacaacaaccaagcgacttacttaaggcttacttgagtcgcattagcatagtcgctgccaaggtcagcttactgctctttaaatagggatcacaacccagggttgacttacagggttgcccagtgagaaacattaatgaattttatgaaagagcgcaagtgtttgtgcacaaagaagaagctagaaacgagatgaaattgttgaagactagctcaggaaataaacccagtacaagtactgtaacagcaagtaccatttcgactaaaacagataatccaagtcgttgaaacaccaagagaaaagatgactcgaaagaaacatctaaaaataaaaagaaacaaaagaagcacgacaaatatgttccaatttacacagtatacattgagttgaatgaaactggtgaaaacatttttcttgcaaatgaacacagggttgctttctgcaaacctgagctaatgagacatgcgagacataagcgagactcaacaaaattttgctgatttcataaagacatagggcatactagtaaagagtgttgacaatttaaagacgagattgagagtctaatctcacatggatattttagacagtatgtgaagcatcatgggaatgagccaaactagcccaatcatcccaataacccaaataaccagagattgcaacctccccctattgagggcgaggatatattggttatcttgggagggctgcacctcgctggagacagtaataatgccaaaaaaagatatgtcaataaaataaagaatgaacaattagtgtttgctccaaaaccactaaaaaagtaaaaacaaaataacctccgattatattctcagaggaagctacaaagcatgtgaggtatctatatgtcgatcctcttgtcattacagtttagctcgccaacaagagagtaaaaagagttttggtggataatgggagctcggtaaatatcctttatagggatacattgaagaaaatagggttacaagatgcgaagttaaaaccttgcatggtaagcttatgtggattcactggagatagtgtcgccagccaaggcatcattaaacttccattaactgtaggagagccaccgttatctacgacactaatgtaagaattttatttgtcgatcttccatcagtttataacatactgatgggtcaccctgcattgattagactaggagcagtcagttcaatcaaacacctatctctaaagttcctaacacaagcaagagtgggtgtggtacgaggggaccaattgttggcttggaaatgttatcacatagaatttcaaaatagaagagccaatcatcaattgatggtgatcaaaatagaagaaggcgagaagaaagaagaggatctagatcctagaatccaagatgagaataaacagctaaaatcaattgaagagctggaag

SEQ ID NO: 25938 - DNA, 5883 bp, Cannabis sativa
  modified_base (3170)..(3174): a, c, t, g, unknown or other
tctctctcaatttctcactctaacttccctttctattgtgttgtgtttctcttttattagtccgctttatataggccaaatgattcaatatgcaagctgtcttttcttgacagttaagttagttaaagactaactaactaaccgaatgtaacttgggagattaaggaataataccacacacattcttaaaataatttatgtatctaattgtgaaattttgtagatacatttaatcttcttttagatatttggacaactaagggatgtttgacttcataacttaaaaattgttttcaactttttaaaatcagaaataacctttaaaaattaataagggcgtttggctaaaattttaaaaaaggtttcttaagaactaagttttaaaaaactacaaaacataaaacattaaaatattattttctattttcaaaaaaaaaaaaattaatatttttgctcacatacccggacatagatcctggaccctagacccagacttagactcggacctcgacccgaacctgaaaccgaacccaaacttgaatcttaaaccaggtctgtggtccagggttgggttcgtatgtgtttaaggtccagggataaggtcgggtctagatcctagtcgaggttaggttcggatcgaggtcgggttcgagcttgggtcagggtccgaggtctggtccataatttggatctgaggtttgggttcagctggttcagcagtctggggtctaggttcgggtccgggtcgggtcaaggtttgggccaggggtcgggtctaggtttggggttcggggactgggtcagggtctgattcttggtctaagtttgggtccttgtttgggtttgggtccggtccagagtttgggtttagggcccgagtttgggttctaggtccgggtctaggttctaagtccaggtttgggttttgggtccggagtccaagttctagttctggggtccagatccgagtccaggtctagttccgagtctgagttcgggatcctagtctgggatccaagcccatgttcgagtatgggatccatgtccgggtatgtgagcaaaaatgttaaaaagaatacgttagacaaaaaaattgaaaataaaaaataacattttgatgtttttctgttttctagtttttttttttaaagttcattattcaaaaaattatttttaaaaaatttagccaaatgcccactattaattttttagaagttgctttctttttttaagtcccctagttttcggtcacttatataggtcattgctcaaagcacataatgtgtatgcgttcacattatttattctttttctcactaaaaacagattacttcatcaaacaatttcgggagttgtcaaaatacacacatcattctaaaatatattttttattttctctctaatccatataagatttgtcatcttctcttaaaaaaaatactctaatagttgacaaatctaaaagttatccactatggtctcacatcacattgaattaataattttttaggtccattgaaaaaatgactttttaagtaaaaaataacttttttctaataaaaaaattagaaaaagaaaaaaaaatattatgtgatcattgtctatatagaacaacactttacatataattagtcttaaaaattgaatcatattgcatatgtgccaagaccactccaatgacaatttttatcggagatactctaaaaggatctctaacactaaatcatacaacaggtggtaccgagcacatgattgctacattaacattggtgtttgaaccgatcacatgatctttattcaagcaagaggaatacctttagttgagcgggctaaagctaatcaaaacttgtcatccaatttataatttgttcatctatgctaactagctaattatttttatcttgacactctttaagtttaatttgtcactggattttttgttttattgtctactgcctgagttatcttggactaaatctgaatcaaagcttcactacagcaaaagagattttttatcccactttttgcacatgaaaaaaaatataaagtgagatagaagatatcatgtaatatttgatcccactttcttattggaaaaagagttttatttggcaaacagataaaaaaaaggtattgtaagggctattttatgcattttttaaacactaccttagcgttttatataaaatctccactttttatcgaagtttttaagtaagaactaggagaaaaagtcacttatttttttattgtcttttaacactgtattgcttgggctttttatttatcaattatatcttttaacttttaagacacatataaaagaaaagttttagttcagggtttcatttattagggttagcctctctctctctttttccaacccttctctctctctatccttctctcggcgctgacggagactgagtgtctccgacctcccaaggctcgaatgggcttcgatcattctctctcgtcttcgtgaagcaacctaggccagcaacccttctcaccggttcttttttttttttttttgcgcgacggataacccaatggccatgacctctgaaacctctaggtatttccatcttgtcctttttgtttttttttttttttgctgaaatatcgatcttgttctttgtgtactttggatatctctactgctctcttttctcaagtggacggaggttcttggtggttcgtcaacctcgatgcttctgggtttgtgtaattttgtgagggacagaacttttctgttcgcgttatttgaggatgtgttttttgttcgctgatctttgtggttttcaagggttgttcttgactttgattgtcttgattatttcgggtttaaaatttggttgcactactttttatattttacgaaaaaattgtaaaattttggaccaataataaaatgtttgtttcatgcgaatcttgctaagtttgtttgggctttatccaataagaaagatttactttgtgtaaaatagatcaataccatttacctaaagaaagtttctttttggttgtatgatttaaaactcgacactagctggcaggggcggacccacattgtagccagagggggcagtcgccccccttgaaaaaaaaatcaggaaaaattgtatatgtatttagttagttacaacatatatttgtattaaaatatnnnnnttataaacataatagtaagcttggtgtaatagttaatgtagattactaatatgttagagggtaaaggttcaaattccactaactacactttattgtttctttttaaatttatttttgccctcctttacttttacacaaaaaaaaaaaaaaaaattaaaccccccccccccccccaaactaaagatacacattgtccccaatgtgagaaaagaaaattctagttgagagagacttacctgagccctatcaaaaggggtttggtggaggtggctggtcataaggatagaagcggggcagcatcgccaagtaattgggctcttcaactctgacattcattcttgtgatcagcgaatttaattgttgcacttgattctcataaaaaatgctcctctgcgtcatataattttgcatgtgcatgttctgctgaataagataattcagttcatcatgcgtgtactgcatggctgggtcgagaggcccagcgatacgttgcggtacattttcttcacgctcttcttgttgttccgcaggaggatttcttcgagcaggctgttgaccatggggatgtggtggtttaaatctaaacaccgtggccatgtcaatactgtgttgtggtgcagcctttgtatcataggagtattgtggtactccatgcgcctcacacaaagtggtgataatgtcagcaagcccgagtccacccccacaagatccttcaaccatagtatcaaaactctgcctaattatatcccccacattcaggttaaaacccttcatgatggcatagacaaatttcagcctgtctatttgagcatcagagtagtgcttattttgtaccaacctagcactcatgaaatattgccatgccttggccaccgggtttaattcacacctatacaactgataaggttccccatcgtattcatgaaacctaagacttgggtaacctaaagtttcaggtatttcatcataattcaatctcttttcttgaataagcttttttagtggttgttcctcccaggtgaaagttggcaagtcatatatggcatggatagctgctgtggaaaccggcactttaacccccctaacttttactttttcatcctctctttctggccaattggcaaagaattctaaagctagagtttggttattcctctcagtaatatcaacaaattttttccaacccctattgattacttgctctctaatgggctcaaatacagaaggaatgccaattctagggtgtctaaggtcatcaatttccatgcccctatcttctatgaatggcctatccttgagttgtagataacgctcttgtgcctcagaactcacaaacctagccctatcaacatttgaacggcccgatgacctaggtgggttagatgaagaagctccccctctttcattcactcttgctcttttaggacccattcttgctcaaaatttctaacacccaaaaattcaagaaaattttgagagcacctccccttaaaattccactttccgggtgaaaacccaatcaaaaatttcacaatgttactcaaacacaactttccacagtaatttatcaaacaatatcccaaaaatcacaccaatttcacaagattctccaaaaatcaaaattatctattacaattgcatagataattataagaaattgtttacctcaatgagaatttcttcattctacctccattgaagaaaaccttgaagttcttgaggtagatgatgatgaatagtgaattttcttgaatttggatgaaggttagggatttgaatgtggtttttaaaaggaaaagagtgattgatgagaaaaagggtgttgtagagtgattggggatgaatgattaaagggtttttgtgggaagaggttgaagaaatttggttatggttgaagaggttgaggaggaggaggttagggttgagaaaggaggttttgatttttgaaaaaatcgcattgcccttttaaactcgtctgggcactcttgccgcgaccaaaggtggtctcgccgcggcgagatgttgtgaaaatttacacctctctgtttttcgacttatcgtcgtggccaaggctgggctcgccgcagcaagatagtcttgaaaaataggcctttctgccattcgatttatggccacgactgaggttgggctcgccgcggccagtaggcaatgcccagagaaaaaaaattctttttttttttcaatacaaacataaaaccaatatcaagtttacaaatttaatgaacataaaccaacaaaaaacaagaaaaaacaataagaaagttcaactaaaaacaccattaagtgttgggttgcctcccaatagcgctgtcttttctgtcatatagccggacgttgactgatttcttcaaagaggcgccagaatcatggcggacttggcttgctcaaaatgacctcccaagtaaagctttaaccgctgcccattaaccttaaaagtgtctgggctttcaccttttagttccacagctccatatgggaatgctttgaccaccgtgaatggccctgaccatcttgactttagcttactcggaaatagtttcaacctggaattaaagagtaagacttgttccccaggttgaaagtcttttctgattaagcctcggtcatgccatttcttagttctctctttatagatcttggcattttcataagcctcgttacgaaactcatccatctcattaagttgta

SEQ ID NO: 25939 - DNA, 1706 bp, Cannabis sativa
gtatatgttatagcacaattatatgaaaattaattctaatgatcacatgaatgattacaggagtcaagcctaccggagatacttaccacaaacagttggatttctccaaatgcgataacacgaagccgtagcagtaatggaaaattatctcccgaggggacaagctcgaacgtaaatcttcgcccagcaagtttaaacaatggaaatatgcaaacattaacttccacaaatcaaatgatgattgagaatcacccaatatcatctcttgtggttcctaacagagaggccgaatctaaccaacctcagcaagatccttttaatatggctcaactcaccaccgaaatcatggtagagaccgcaaattcccagcagacagatgttaacatggacgagagatccatttcggtctcatctgatttgtcatccaccggggaatttctcgagcctgattcggtttctattcctttcataagtggttcctttgttccatttattcgcgggagcaagaagatcaagttgatgcacggagataacactttgcagcttcaatgtgctcgtctgaaagttcgttttggaataagtactaagttcatcgatcttgctggacgacctaagttgaattttgtcgttgatgcaccaccgagtttgtgtacagttcttgattcgtgtaacaacatcgtccaaaagatgactgtggaatctgagagcaactctgaatggagacctgttgtgaatcgaaaattttgcccacccaacaaccctacaatcagattgcagtaagttattttattttctttcaacaatttcaatttcggtttggaaacctaacttaactaacctaatcctaaacttgcagcataccaaccgctgtttgcggtgagattgccatatatgcaaccgaaatctatcaaaaggaaagtagcggctcggttcagaggttggtgtttagtaaattcgatgctgcagagctcaattccttgctcccaccgggaacctttgtcgatgcatttttctcgttagatccatacgattatcagcaaaatgcaggcgttcgattggtcgcaaagaaattgatcatccattcagattgatacttatttatttagcaagattcattgttatgtaaaaattactttgaattgttgcaatgcaagggttgtactactaatatattcatgttattaattggtctttttcttcacttttctatagattatttgattttctctctaatttggagaagaatttgaaagattgttgggaaatgagttgagaaagaattgtgaaactagtatgagagatagaaacacttcaatcacaatagaataagtgttgctataagcacaaaggttacctagaaattaggatgatgaggttgctacttagtcgagaattaggacgagggcgagcataattagggttgcacattttagagacgaggacgagcataattagggaagcacatgagagacgagaattatttcttgtctctggtcgaatattaaacgagacggaaatgggaatgatactcattaccttgttcttgataggaaatatatatagaaataaatacgataataaagattaaaattcttaatgaaacgaaggaaacacctcttgtctcgtctacatacataattgagataattattttttattttttttttcgccgaagtttatagaaagaacgttgttaagtaatgcat

SEQ ID NO: 25940 - DNA, 3538 bp, Cannabis sativa
caacttaacagacacaacagaatggctgttacgcctaactgtcataactgtccttacacgccccctcaaacttagaattggtaggactaccaatgctgagtttgtgtctgaaataagagaagacttggctagaaattggtttggttaggccatcagcaagttgatcaaaggctggaacatgcttgacttgaacttgctaatgtagaattttctctcggacaaaataagggtctagctcgatgtgtttagttcgagcatgcaacactggatttgttgtaagaagaattgtgcttaagttgtcacaccagacaacaggaggttggggaagctgaatatgcagttctataaagagagagtgtaaccaagtgagttcagtaactgtttgggcgaggcttctgaattcagcttcagtgctactccttgatacagtgttctgcttcttgcactgccaggcaataggatttgagccaaaaaatatagcaaacccagatgttaaacacctgtcattagggtcagtggcccagtcagcatcacaaaatgctgttagttcaaggatctttggtttgtgaagatgaagaccataatagattgtgccactaaggtatcttaggattcattttactgcttgtcagtgagactgtaagggatttgccatgaactgacataccttatttacactaaaagaaatctcaggtcgtgtgattacaagatactgtagagctccaactacagatcgatattgctgaggattgtctactgggggacttccatatgcagataatttgaggttgctgaccgtaggtgtgttggaaggttttgcagcatccatatctgccttatgcagcagatcttttatgtacttggcctgagagagatgcaatccagtggaggatgaagttacctcgattccaagaaaataatgaagatcccccaggtcttttagagagaatttggcatttaaggcaacagtgtagtatgagataagcttggggtcactgcctgtgatgataatatcatcaacatagataagaataactgtcatggacaagggtgtatcttataaagagactatggtcagactttgatgaaacaaatcctagtgacagaaggcagtgatgcaacttgtcaaaccaagctcgaggagcttgtttgaggccataaagagctttgtgaagtttgcaaaccaattcaggagattcatgactctcaaaaccaggtggttgaagcatataaacttcttcctgtaaatccccatttaaaaaggcattgttgacatctagttgcttgattttccaacctttggaaagagctagagtgagaacaaccctgatggttacaggcttaacaacagggctaaatgtttctgtaaagtcaaaaccaggttgttggtgaaaacctttagcaacaagtctagctttgagatttgatacactcccatcaggattctctttgattctatagacccacttgcatccaatggcagttcttccaggtggtaacctgattagagtataggttctatttttcttgagagctagaatctcttcagccattgcattattccactgtaagttttgtaaagcctgcttcaaagtggttggaacttgagtagtcaaatagaccttaggcttcttgatgccacttttagctcttgtttgcatagaatgggaattgatatgagctattatagctgtaggagcattattagatgcagcagcagtaggaacaggagctggtgcagagtgagtgtcaggagtaggagcaatagctacagatgattgagaatggctatctggttcaggagaagcagcatgcattgttggaaccaaattccttgagatagctattgtgctggtgccctgaaaattttgatctccatctctctcaaccaaaacattgtcaccagatgcagatgtagttgagaaagaaggaggatcagtagtagcattagtgggaaataatagatcaacattataacgacactgagaaatagggattttgctagagatgccagactcttgtttgtgagattgggaagtggtggaatttaaatgctgatgtggaaatgtggattcatcaaagataacatctctagagatgtatagcctaccagatgggtcaagacacttgtaacctttatggttcaagctatagccaatgaaagtgcaaggagaagattgatactcaagcttgtgctagttgtatggtcgaatattgggaaaacatgtacaaccaaaaactttaagagaagagtaatcaggtgtaatgttaaacaagacttcaattggtgatttgagagacagaacaggtgctagaagcctgctgtataggtagacagctgtcctaaaagcctcatcccaatattttaaaggtaggttggcttgagctaagagagttaggccattttccactatatgcctgtgttttctttcagcaattccattttgttcatgggttgtgggacatggttttctgtgaataataccagcctcttgaagagactgtgtgcatgacctatattcccctccccaatccgattgaaagaccttaattttggttcctaattgaagctctacctcagttttaaaaatgttaaatgccttaatagcatcagatttagttttaagtaagtacaaccatgtgaatcttgagtatgcatcaatgaaatgtatatagtacttataatcattgtgagatgtagtgaaagatggaccccataaatcataatggacaagctgtaaaggtgcactatagcaagagtcagatgactttggaaagggaaatttatggatttttcctaaacaacaagatgaacaaactgaatttggagttttattcacattagaaatgttacattttgagagtacatttttgacaatctgttcagagggatgtcctaaacgattatgccacagctcatactcattagtaggagctttacatttgacacatagactgaaattaacatgctgagattgtgtggtggtggctgtgtttgtatagtgcaggggtgtggaattagaactgctacagggtgttggagaggcagataattgaattcgactcgaataaaaagtatataggccattgtgatgtctcccagtcagcagagttgtattgctcacctggtccttcacaaaatagaaatcagggtaaaaacaaaatagacattattgtcagcttcaaacttagacacactaaggaggtttttggtgatttcaggtacatgaagcgaatgatttaaagctagaggttttgagcatgtatctaagagtataaatgagttacccatttgagaaacaggaaggccagtgccattgccaacatatagctgatctggtccctcacaatctgctggtgtcatcaggttctgaccatttggagtgcagtgtgttgttgctccagagtctggataccagttatcatctgaagcttgactagtttgagcaacattttcttgtgtttgacaggtgtttgtaggtggaaaaactcatgtaaaactcttgtcaaatctgtaaaagcagtcaataacagagtg

SEQ ID NO: 25941 - DNA, 3021 bp, Cannabis sativa
  modified_base (40)..(44): a, c, t, g, unknown or other
  modified_base (2983)..(2995): a, c, t, g, unknown or other
tatattaataagtaaatccgattatattgaaatgagtttnnnnnagggcataaaacccaacaacacccctttccacgccaaccttcaggcaaggggacccaaagatctagctatggggcatgcacgaccatcagacagagagttgcaaacgttgtttatagctatattggcaaggttctgcccattgttaacggggagcaccaggagctcgaggatgaagatttggagcagctgtgatcaagcagtctccatgacttgattgcgctacgttacagatgtgattttactcaaattgttgcactatcaatggctagcaggctaggtattgaactttacaaagctggccagccagagctgtaatattcagacgccgaccggccacggaagcactataaagaggctggtcggtcaggttcttcttctagcactaactcaatttttgttttgatttcaagccctgttgaagtttagcctttcccatggcaagaccaaggggtcctcaagcactctctaggagaagattagggcccaggaggccgagcttctgtagggaaggatgcccttagcaaggcccaggctcttgtggaacaaaagcaggacttgatcagtgatttggagcacttgcttagcaccagaatcaaagaaaacaccactcttgttgctgaggcctccaggatggaggtcgaacacgaaaagaaggacaaagcactataaatttcccttaatggccaacaagctattagagacgagtatgttagcttgtctttggagctcttgtgcaaggttaagctacgcaaccccaatgttgacctcttctacatgggatcttctttccttgaaagaacacttgcccaggggagagaactgtatgacagcaaaatgcaaacagacctggttgatcacactaccatccaacttgaggagttgtcgttgggccttcttgatgaggctatggtcgacccacctatggaggaggtggcaagccaagctgctgaccatgtgatcagccagcgtgcagcggccatggccgacccacttctgcgcaatactgcagctttcggctcgactccactggggcctgcacatgattagatacactttagtagtatcctgcatttatgattttattttcatagacatattagtttcatgctcttgtatggcctattggccttttacttttgaacgttacttatttttgtcctcatggctttcacactcttacttttggcctataggccctctattttttaacattgctattgtttagccctaaagccttttatcatggatatgtgaccccccaggtggtctttaatcttagctatcttcttattgccttgacatataattattcaaatttacttttcattatgccaagctaaagtatgcctgcacttgacttagaggtaggtttagtagcttatagtaaacgttataagttctatccataagttttccgtgctagtttgatgcaatgtacagtgtgggagcctcccaagtgagcacggaaacttatggtctcttggtcacttgcaattcaccatgtttcattgaccttggttgggaattttcttgtggtgctacctggtctatgtatgtggaattgaaaagaataactttaaaatgttaatcttgttagcaagtggtttagacataatatatttgaactgaaatcatttttattcattaattggtcattgttgttgtgcaacttacataattgaatctacaagcttacaaaactaaaaatcctgcttctagaagtcaagtggctacctctgctcgacatgccaagaagaggccatcattaaagaacgatgggaggccatgtcgaaaggttatgggtactggctcttttaaactaactcttataaatgagttaataaaacttctactagagagtagcattcatataaggtggtcactggtagtacttttggaggtgatcaccattctaatatcttggtaggagaaccagctctatgttcttattgtacctgtgcagcttgtaggctctcttacttgttatctctgtaagttggtaggggcctttccagttagatctaaacaatcttgatgtaggatctttggtgtttaggaacactcttcagagcaccaggtctcctatgaagaatttcctttcctaaacttatttgttaaagtgtcttgcaacattttgctggtaggcctgcaactttctccttcttttacttcttcaagggatttctccagcaagatgtttatatcttggtcatagtttgttctcctgtgagatggtggcactaactctacaagtaacatcgcttcatagccacaagctagagcaaatggagtttgtccagtggtcgtcctctcggtgttcctgtgcgaccataggacctttgggagcaattttggccaatttccttttgcctcttcaaggcgcttcttcaaagtgtccttgagggtcctgttcacaactagagatggaaatttataccgtggggatgggtaactatggggatccacccctaaagaggtggggattcccagacttggtggttaatggagcagtggtgggggcaatttcaatagtcgaagcagggattggtcgaggcggggataatactatccgcaccatagccaaccctgatatagatgtatatatatatttatagtttcctttttattcttaatgtatatgttatacccaaaattcgattactatttcaatggagaacacgtgtcatgtaaggggaatatggatcgatgcgtgtatcgataatcacatttaatggaataactcattaaatgcagaagtgacagagaatatttgtaacttgttgactataaggtcttaagcgagataaagatatacaaattgttgcctcgcgtattaacgagaaaccatacgacattggatgtgcaaggctagacatcaacttcgttgcgccagggaagacgtaagcgatgcataatatgttggaaatattttaccagnnnnnnnnnnnnntaccatgtatgtttcattaacatcct

SEQ ID NO: 25942 - DNA, 3603 bp, Cannabis sativa
agtgggagaccacgaccaaatagggccgtgggtgccatcgctttttgtatactctaatgttgagtagatagaaccactactttggggtagagttctgtaagctggttactggtagtatttgtgaaggtactctccattccagtatcttggtaggagaatgagctccaagttcttgttgtaccttcccagcttgtaggctcccttactaggtatctctataacttgataagggccttcctagttaggtccaaacactcctgctgttgagtcttcagtgttcaggaacactcttcggagcactatgtctcctataaagaattttctactcttgatgtgtttgttcatgaagtaccttgccactttttgcttgtaggcctacaactttaggttggcttgttctcttttttcttctacttcgtcaagggactcttccagtagggtgctatttgtttgttggtcataggttattctccagttagacagtggcacaagctctacaagcaacatcaccttgtagccataagctagagcgaatagagttttcacagtggccatcttcttggtagtcctgtgcgaccatataacctctcggagcagttcaggctagttacttttttcttcttcaaggcgcttcttcagggtgtccttgaggattttgttaacaacttttacctgctcatttactagaggatgacccatgacaaagaagctcttatgatgccatgtttgttgcagaaatcagtgcacatgtcattgtcaaactatttgccggtgtctgaaaaaatcttgtggggaaggccaaaccggcatatgatgttcttgaaaacaaagtcaaagaccttcttggtggtgattgtcaccaacttctgtccatttagtgaagtagtctactgcgacgatagcaaaatatacccctccttttcccttttgggaattgaccaattaggtctatccctcacactgcgaagagccaaggagattgcatcatcgtgagctcattgggtggagctcttggtatctttaaaaatctctagcacttgttacattttctgacatagtccatcgagtcttcgatcattgttggcaaaaagtacccctgtcggagcatctttttggataagctttgtcctcggcatggttgccgcagaagcgttcatgcacttttatcataagccgttcaactttggctttggtgacacacctcaggagaggcataaagaaactctgtctgtacgttatctcatctaggattaggtacctatcaacttttcttcttagtttgctagcttcatttttgtcttctggcaaggctttggtttggaggtaagctacgataggtgtcatccatgttggagtgtcaggttcttctcgtccggtatacatcttccataccagtattttgaacttcggcaagggcaagacatttatgcatgccgagaatggtgatccctttgactgatcaagttcaaggtctgaatgctttgggccaactatgccctggatcatgtccctgagttggtccaactgtgcttgcacagaaagatctgttgttatggggatctggttgattggccctccttggggaggctttagattctgaatagttaggggctgagtggccatacccagggagagtgtatggtgaagatcagctagcccctgcataccctggtcgactattcccaagtacggagttggcctaggctgtctaggcttatactcgggtgctgtgcttggctggccagacctgcattgggtagggtctgtctgctcagtactcctccatggctgaccagacctgtaaagggaagggtctggccgcccgagatgcctctttggccagccagacttgcattgggcaaggtttggcttcccgtgactccacggtcgaccaatgtcgactgtgtattgatttggggtagaccacaccaattgttagagtttggtggatctagatgcctgaagtgatcgattttaattctcgaattaccattttgggtggttctacccactctcggtccatgtcgatcgaagatcgacctctgttcaccttgctctccttggggaggaaatgatgtactctggccggccatgggtactcctgctggtggctggccgaccaatgttagcacaatagggggtgctactgagctagagatccctggttggccccccatgctgctggttgccaggatctagctattcttaccgtttgacgtttgaggaaaggtctgtcctccctctggcagtggaaaatctgtcctagttcctgaggaacttggcactagtcttccttggagcggatctctaaggagatcctgggctcttctatcagttctctaattgaactgtcttattagattgctagactcccgattgcagcgatctaattctgcttggtgtgatcgaaggatgtactcctatcattcatccatatcaagaatttgcgtctctattgaacaaaaaatcacaatcagcagcgtgaggttcttcagttaggcctgcatggcctacagcttccctgagtctggccaacttaaggtattttcttaagtctaggtgaggctcaccaatcgctggctcgcccacccctgggtttgtctttctagcgtaaaaccagagttgaggtccattgttctaagggactgtcacccctgggtccttccttcagtgggaggcaccaatggttggtctactcttggaggcgtgggcctgccacttggatccaccgaggtgctcatgtcagtttggccagactggtagctcctgttatggtgacaagattcaccacatctgcaatattcatggggattccaattgtgactggaacttgagtgcatagatctgcgatctgtgggtcttgaggaagacctgaagatgcagatggtgcgacggaagcccttcttgttttcaccatggtgtttgatctgatcacaatatccatgctatcaatgaaaataccaaactgttgacctcaaaaagtgatcaaccgatagcagggtcatatagatctgatgcttcccacatgtttgcataaataagaatgaaaagcaatagacaataaaatttgttatacaggttcgacccctttgtgatagtgggtaatgacttactttccttttagttgtatttatactgagaaaattactattcaaatcgctataggctgaatatactatagtacccttaggatcacaagatatgaatcaatactggccaaactcaagtgttgagaagtactaaggtaggtgtgtgagagagaggaattgaggaagagagagagtttatcagacaattaaagtgtaagatcaggtttctagcttataggtaacttaggttttcagcctaaggctagggcctttatatgggaaacataaaaccctacgtttacaattcaaatcctttagcattcgtataatttgttagatatttataaaagaccaaactgcccttgattctaaatattattcagccattctgttgggcttttagggcctaatttatagcccatagctgttgtccacgtataaaggtgtccagcaaggcctacagttccttggccggccaggcccatgtggaggccaggctggccggccatggtgt

SEQ ID NO: 25943 - DNA, 1154 bp, Cannabis sativa
aatcctaacaattcattgttttccaaatcaggttcatgaaagcttgcagaggattcgggaaagaaagcttgtgaacttcattgagtggggtcctgctagcattcaggtttttcttatctgtaaaattaatttcctatttcactttttgtttttatcttattatctggagtcacgtgatctttggtttttgctgttttctaggttgcattgtcaagaaaatctccatatgttcaaactgcacatagggtacgtgctttctcctttgttcgttataattttttattttctatttattaaagctaaagattcatgacctcgttattgaggatctagatcatatcattactttcattaaattggcaagaaatgatggaaagattagtgaaaggagctatctttgtgttattcagaagtgaaaagattatagggaaacagtacaggaaagaaacaaaattaatattgataatttggtgcggaagttttgggttgacattgatcttccttgttttgctattaaaaaaattgccggcaaactgaaattacagctggaatcgaagaaaagggtgcactaaattatttcttcttgctgtatcttttaggtcagtggtcttatgctggcaagtcatactagtatccggcatcttttcagcaagtgtttaagccagtatgagaagcttagaaagaagcaagcttttcttgacaactacaggaagttcccaatgtttgctgtaagttgccagccacacgcagttataaagagtttcagttcacatatattttgcctgttgtttggcatgccagtatgacagattctgttttactgttaacaggaatgattgctgaaaattttatgttatattcatgcttgtttgattttaagctgtagttagtgagtaagactggtgatgaataaatccttacaatgtaagtattacttacaagttagagacttacttttattgtataatatacatggacaggacaatgacctttcagaattcgatgaatcaagagatataattgagagtttagttgatgaatacaaggcctgtgagtccccagactacattaaatggggaatggaggtgattgctctacctgtgtttgcatgtatttgtagattttcaacatcgaaatagcctgtaaatgaattt

SEQ ID NO: 25944 - DNA, 1965 bp, Cannabis sativa
ttctcgaagcaagtctcgctccaagtgcctagctcgaatttaatcttcccttcctaggatctgacggatggggataatttgctcctaaatgccatacccaatcctgaggaaatcaccgcggcgatctcagagatggggaaagataaggcatcgggaccggatggactccccccaagcttttactcgcatcattggaataccgttagtgaggacgtttttgaaataattacccactttttcactcatttggagctgccaggcttcatcaatgatacctcccttgtattaatcccaaagaatgaagctcctttatcaaccaaagactaccgtccgattgcactctgcaatgtctcctacaaaatcatctcgaaaatcattgcttcgagactacgtgggatactcccaagaattatttccccgaaccaagcgactttcatcagaggcagaagcattgctgagaactcgatgattgcaagagagatagtccattctatgaaaaagaggaaaaataatagaggctttatgatgatcaagcttgacttagagaaagcctatgacaaaatggactgggacttcatcctgctaattctttcgaatatggggtttactaatcccttcctgggatggatccgtgcctgtatttctgtgcaagaaatcaagctcctcctaaatggttccatagcgggtaagatcaagccccgaggccttcgacaaggagatcctctctccccgtctctgtttatacttgcggctgaaacgctttcccgccttcttttggataaggaaaaaagaggccagattaaagggatcaaggtgggtagacacggcccgactatcgatcaccttatgttcgctgatgacatcatgctctttgggcaagcctctacgaaggaagctaaagccttcaaggaatgcttggccacttactgtgagtggtcaggacagtcaattaacctccataaatcttcagtcttcttctcttgtggagtgccccgagggcgaatccaaacaatcaaggaaatcctaagaatgaagcaaatgactgaaaaggtgacctacttaagactgccgctcttcaatacttcaagaagaacgagtaactacaacaacttggtggaccgggttttgttgcgtatcaagggttagaaagccaaactcctttctagcgcgggaagagcatgccttatcaaatcagtcggctcaactctgtctaattatgttgcttcttcagatgttattcccaccaccactgccaacaaaattgataaagcccttagagacttctggtggggtgatacagaagaaaagcgagtgctacattgtgttgcttgggagaccctttgcaaaccaaaaacccatgggagtcttggatttagaactacggaggcaaccaaccaagcttttctcatgaaatgggcttggaaagtgttgacggatgactcaagcctttggaagcatgtcttaggtgctaaatatctcaagaatcacaacttccttgaccttgaccctcaagcttccgactctgtgctttggaaggcaattctcaaagcccggaatcaacttcacaaaggtatgtgccggaaaattggaaacagtgaatcaacatccatttggtttcacccttggattcccttaggcaatctccaacctcaaccgaggcttgatgcaactcagggcgtcagtttagtgtgcaactttatacacaacttcacctggagggaggaccttgtccaccaatggttccagccagaagacgccagaagaattttgaatatcaccaaaccaaaccacccagtggaagactcttggttgtggactcctgaaagtaatggcaaattcactatccgctcagcctaccgaaccataaaaaaccttgatcaaggaatcactagtaatgaaaaatggtggattttatggggaactaagatgcactcgagacttaaaatgctttggtggagaatactc

SEQ ID NO: 25945 - DNA, 2424 bp, Cannabis sativa
  modified_base (432)..(432): a, c, t, g, unknown or other
  modified_base (513)..(526): a, c, t, g, unknown or other
ataacagaatgagaaaaatcttgcactaaaacttgatagtattgacaagaattttttttttttttgaaagagtattgacaagaattttggcttcagcttcaataccaaatcccaaaataataataatgataatataataattaaaaatgagaaatccttctattaaaaagaaaatggagaatctgtttgtttttttttgtccaattttttgatgattcaaacttgcattacacaaactatataaataaggctaattaagatttttgtcccctaaattttgacatgtatcaaattatactcttgaacttttaaggtcgttaaaaatactccctaaactattaagattattggatttaagaatttttttctaattttagtaaaaaatttaacatggatgaaagttcagggatcataatttagtacatgtcaaanttcgagggacgtgatttggtagatatcaaagtctggagagcatggtttcgtacataaacaattactgaaatagtaaaattnnnnnnnnnnnnnnaaaagtccttaaatccaataatttcaatagttcatggggcatttttaacgaccttaaaagttcatggatataatttaatacatgtcaaagttcaagggacaaaaatcctaattagcatataataaatataggttaaatgactcaatcctttactaaatatttgaagtgttctatttacgcgggtaagtctacagtacactcttataaaaaagtatttcaacatcaaaaagagctttttaatccattttttttttataatcgtatacattataattatttaaaattatttataaattttttaaaaaaataggaatagtataaaatgtcaaaaataaaacttaaatatttttttgcacgctcgaattttttatacgcgtagtatgtaattatttaaactttattttcaaatattatttaaaaatttaaatatagtcttaaataaatacaatatacgtaatcataaaacaaaaaaaaaattaaattttttttctaaatgccaaaacaaacaagaaaaatctaccaaactatttccttagaagacagtgatatctaacatcttctaaattataatatcgttggtataatattactattagtacaattaaatatgatataatttaatataataatttttttttgaacattactgactaagatctaactcacagcaatacttacattacattgtactttcttttattattccaaaagaatgagcaagttcatttaaaagtaatcattcatcattttttttattactattattattttgtttatacagtatatagtatatatagttggtattttgtataaaaatggttacaaacaaacaacagtgaaggacatataatacaaatagcatttgtacaaggccgtattgaaagaatgttatgtatggaagattaatattaattttgattctataatagggaacatacataccccttctttctactaaactcccaccaaaatcaaaatcaaatcaaaatcaaatcaaatcgtgtgaaaacaccagtttctcatattcctagtgtcatgtcttcttggcctgcaacaccaccaaaaacttgtgttataaacacccaacaaaacatgctacaattcatgcataacgtaactcgtaaacaagctcgattaatatagtttctttatttagtcacatcatctctcaaactcttctgtttttttttttttttgttaaacgatcagctaataaggtagctcgtgtttttgctaaagcttattttttatattttgattgtaattttcaattagaggatgttcgttctgattgatttgctatcgtgtttgataccttctttagatatttcttgtgaagcttcattgcaccggtgcatgcctttttcgcgtctaaatttccagttatatcattcaatatctgcaaataaagagagaaatatgattaaaacacaacaagttagaaacgcgcaaaaccccgagcttaacaacggattaaccttaacaacatcgtcaagaccccgagcttcttgcagtagcttcgtgctcttatccttcaagacactagcaacaaggaaaaccgagatagggagcggagcttctgaactatttgccttattcttcatattttctctctcgaatttcccacactgacgtactgactttggtttccctctagatccttcaactctttcgctaactccctcgggttcttcatacaaagagtacaagtccggatcgtattccagagcccacatcatctatcaaaatgtatcaaatttatcttttgaaacaaagtaacaaatatattagaaatctataaacaaacataagagttaagtcttacctcccaaagatataatgaatcacagaaagagaactctcgccgaaataaaaccataagcatccgaaacgcaaac

SEQ ID NO: 25946 - DNA, 1717 bp, Cannabis sativa
agaaaaacaatttaatttgcctatcaaacgtgtccaatctgattggggaggggaatataggccatttgctagatttttaattgatcaagggaccattttcagcatccttgtccacatgaacatgaacaaaatggaagagctgaaagaaagcaccggcatataactgaaaccggtttggtgtttcttgctcaagctggtttgtctttatatattggtggtatgcttttcaaagtgccgtgtttacaatcaatagacttccaagtgatgttcttggatttaaaagtccatatgaatgtcttttcggtagtccaccaaattataagatcctaaagccgtttggatgtgcttgttttccgcacttgaggccatacaacattcataaacttgattacatatctgatcaatgtctgtttcttggttattcatctcaccacaaaggttatatttgtgaaaattccaatggaaggatatacatagcccgaaatgtggtatttgatgaaggccattttccagctcacatcagttcctatacacatcaggtacacgcatctccatcatcattatttcctacttcttctttttctaatgataatgcggatgcacctacctttactagttgttctactactgatactgcctcacccaacatccaaacacaacacccccaacctcccatatctacccgaggttctgcacctattatacctgtcccaaatacttcagatcagcctcccataccagaaccacaaccaaccacttcagatattcaccaatcgattgctgtccaaaacacaaacaccccagcaataatgacatcccagcaagacatacaccagccaaatatatccctgtccattgcaccagtcactcaacctgcttctagtcccatttcagtagtgcaacaacctgtttctacaggtccttttacatcagatgccagtaacaccattgcatctgcagctcctgttatcacttccaattctgatgtgcagactccaccaccaatcacttctaccattgtatctcgaatacatcatatgaaaaccaggtctcaaagtggtatttacaaaccaaaggcttacttggctactagacatcctttaaaggaatctctccttccaactgagccgaaatcacttcaacaagctcttaaagatcccaaatggtttcagtctatgcaaagagagaatacagccttgataagatctaacacttggactcttgttccatatcatcctgatatgcatgttattgacaacaagtgggtctacagaattaagcttaatgttgatgggtctctcaatacatataagtcaagattagtagcaaaaggatatcttcaaacacctggcattgattatgaagaaacctttagcccagtggtcaaacctattactgttaggacaattctctctcttgctgtcacctccaattggccagtcaaacagttggatgttagcaatgccttcttgaatggtgatttgcatgagacagtttatatgaggcaaccaaagggttttgaggatcctgacagaccaactcatgtgtgtcatcttcacaaagccatctatgatttgaaacaagctcctagagcttggaatgaaaaattgaggaatacactacttaagtggggatttcatgcatctaggtcagaaacctctctttttgtctatggtaaagactccaaataaataagatattttttcttgattccaaa

SEQ ID NO: 25947 - DNA, 1860 bp, Cannabis sativa
tcttcttgtgccaaaagatcatctaaaaagtcctctgattttttaagttcatccatgataggtgcggttcttgctgtggcattgtttaatctagaaacatgttgttgtatatgtgtgatttgtttcttgtaatgaccaaatttagaatagtgccactactgtaatgaagaagcacaagccttcaatttgtccaaaaagctgtcgatgatagtgccagactttgcattctgcaattgttgctgtctcttcgtgttgtagccatacttgctcaaatttgaacctattttgtccgctgctgctggttgacattatctttcaagttaatctcaactaatagagctctatgatcagagttatagtagtctaaatgttgagtagtgataggttcaaatattgagttccaatgatcattgacgaagcaccaatctaacatctctttgatagtgtccaccgaatgtcttccttttatccaagtgaaagggtcaccctgaaaaggctgctcattcaagtggcaaatgtcaagggcatgtctaaagtttcccatttgtgattcattgcgcaaagcaccacctgatttatttgtattggataggatttcactgaaatctcctataaccaatcaaggagaaagagttgcaacatctttgagtctttccaaaagggtccaggtgttggatcgttgatgaacattgggggactccataaagggcagaaaagtgacatcttgtgtaatgtgcaaagctaatataccaatcaaatacatttgcattaaaatttaaaagagttacatctacatcgtctttccaaatcaacattaaacccctcttaaacctactataggaacttcaagtccattattgaaatttaaagcttgacgaaaacaggaaataacattaggacctaacttagtttccattaaaaaaagtacatgtggggattgctctttaacaagcaaacggagatgacggaatgcactagaattccccaatccacgtgcattccaactgacaattttcatggttgattgcggggctgaacctcagcctccgcagcattatcgaagaaaccaactgaatccatagcagtcgaaacttcctagtttggatttccttcaactgacaaggttgaagcaaacatggttggattagtgcccctgcatcttttaatagtgtttctaagtgatcttcttttgggttgccttttttggtttctgttaggagcacaattttccttcctttgtgtctccattctggtggaaacaacaacggatggcacaacaaaggtgttggtcactgatacattcagtgcacaatttattttttccataatattcttagggaaaggtgggtaggtagcaattatgttggaagaatttccaagacccgatataggcatataattgttagataaatcactgtggttatctgtttccagatttggagaaacactagtgacagcagcaggtagtgaagttgcagcatgattctggtatgctacacttcctggtgtaaaagttgcaggtgtaaatttgacatctcaaatttttggagtttgactaacattaggatggattcccacctttgattgttgtttcagcattccctggttcgagtatgaaccagaattagaggttggttgagtaaatgagttcaagtttgaaatgctggaaacatgactctactatgtgtaagttgctaatgtaaaaccaccagggtaattctcgacttctttgcctttaagagtccggttatcatttattgtatgtcttgggggcacttccatttcttcacaattaatattgtgctcatctgtatccaaaataggaggaatatccacatgtggcaattgttgcaacatctc

SEQ ID NO: 25948 - DNA, 3303 bp, Cannabis sativa
  modified_base (419)..(424): a, c, t, g, unknown or other
  modified_base (1920)..(1922): a, c, t, g, unknown or other
ttaatatataaagatatatgtaatgtccacacttcaagctttcattggggcccttacacccacgtaataatgactcttatatacgagtacttcatagattgatgacagactctacaaaccaacacgagtatttctagtgtgttttgtcctcactcgcacgcttcttgagaaaactttccaagaggtcacccatcctgaaattactccaggttaagcacgcttaacagtagagttctttcatgatgggctaccgaaaacaagatgcaccttggtgatataggtagtaccaatcaatccatttaagccatcttcaactatgtagtcccttacctacacagttttagaatcatcatacttgaccttccccaggtgatgcgggattgcacaatttacctagtatttccccttacggatcacgnnnnnnctgactgtcacaatcacccccctaacaggatccgacatcctcgtcgaccacacttccggttgggtcaagactctaatatcatttgtaacgtctccgcttcaagcctccattgggcccttacacactctatcctttgatacttaaaaaaagtgcactgatgcatttttattgttttagtatccaagaaattttttgaggaaattactttgtatacctactttactttgtatacctaatttttaccttcgtttctatattatttaagatatactcacttttatagatgatgtctccattataccccttaggctaatgtaaattatgtactagacttaagtagagggtgaaggtatattagacaactcactcacaaaagttggtacattttaacaaaatataaattgaaggtatttttgattaatggatacaaaaaagaggtaattattaacttatctcaaatttttttgtcatggtcatgtacattgtaattatttaaaatattttatgaaattttgaaaaattcaaaaaaaatttaacattctgaaaatgagattttaacaatctgttacatgtttgattcttttattttataagtgtgtgaaatagattatttgaatattatttttttatattataagttattttaaatttctttaaattttgttaaatatcttaaataattataatgtataatattataaaaaaaattgattaaaaaattttatgaaagtaaaaataaatagatgatgcatgagttttttaatgtggtgcattataatgatgatgattgtgattatgttccaatcaaaatttgtagctttgaatttaggcatgtatttgcataatatgtaaagattaccattttagccgcaataaattaatcattttggctataattttgaccaacaaaaagtactgtacaatatatacaaatccaagtactccaagcaaacttgtgagttgataatattacatatatatttattatgtataaaatatagttatataatgaaatttttagtttatgattgttttttttaatttatatgttaacttagttatgtaataaaatttttaatttaaaagtatttttttgattttctaagttaaatttgatagaatatactaatttttttttttagaaaatcagttcctttgtatttcaattttcaaatctgttttacaatctatcctcatttgtatgaatagaatactattactattatttattattaattttatattattattatatatatttaaaaataaaaattatgtagatattttacataaataaatttatatttaaatttaaaaaacttaaaatattgtagatatatttaattttattagtctaattttgaattaaaataaaaaaaaatatatagacattttatataaaaaaattttaattttaatttaaaatacttaaaatattgtagatacttttaactatatttttaattttattatacatataaaatatatatatatannnatatatatataatcacattcaaaattttaaattaatagcacattgtagccgcaataggttagaaaatcctcaaagattaaaatctcaaatcttatttcatttttttttaaaaaaatataggctaattaggatcttttcttcctaaataacatgtacaaaattatgccccctgaacttttttggccgttacaaattgctcatgaactattgagattgttagatttaaggacttttggctgttacaaattatgcccagtcaaatcaataaatgaatttaacgacaaggcatttatatatgttagaaaggaagaagtttggtctgaattaaaagtatgaaagatggctcagagaataaacctaactcaatcaaagaaaaaacgaacattggaaacacgagcaaaagtcatgagccacatgggaagaggaaagatgaatccaaggaataatccaaagattaaaaaaaaagcagaaaatatatgagaagtacgttccaatttatactatgtatgccgagctgaacgaaacacgagaaaatattttcctctcaaatgagaacaaggttttctttcgcaaaccagaacctatgaagaatgggaggaataaacaagatcataataaatattctcaccttcacaaaattattagtcacacagctgaagagtgtcgacaactcaaagatgattgaaagtctcatctcaagaggatacttcaagaagtatgtgagaaacagggggattgaacaaaatcagctcaacaaccaaaatccaaatcaaaatatttagccaccaccatctaatatttttgtaatttcatgaggcccccatctcgcaggaacaagtaacactgcccaaaagcgatacatcaatcaagtaaagaaccaatcctcagccttagcatttaaattgctaaagcgtgccaaaagcgagataccacccattacgttcactaaagatgatgtgacgcacacgaattttctacatatggatccactcgtaataactgttcaactcgcaaacaaaaggataaagcgagttttagttgacaatgggagttcagctaacattctattcaaagaaacacttagaaaaataggattagagaaagtgaaactgatgcagggtcaatttatgtggattcactggagatagtgttgcaagtctaggaacaattgatctccatctgacaatgggagacttgccattgtcagctacccaaatacaagaattcttggtagttgacatttctccagtctataacatgataatgggttgctttgcattaactgggctgggggcagtctgtaacatccccgcttcaagcctccattgggcccttacccccacagactaagggctcttatacacgagttcgtcactctggc

SEQ ID NO: 25949 - DNA, 9039 bp, Cannabis sativa
aaaattataaaaaattattttaaaatttataatattttttattttgtaaatatattattttttgtttttataattttatttaattttaaaatgaacattttaataataatagtaagtgtattaatataaatgtatcacgtgtacaagagtatagagataagttattcatggtctgaaccacctatcaagacaaacccaacgccagttacaattggcatccaacaaacgagatacttaaaccttagaattcacaaccattagattgaaggttgcttctatgtttccccaactgttaacccaaaaacttttcctgatgatatagacatcaatgtttgacacgtggcaagaaagataaccatctcaaagttgagtagtcttgagtcatagtagtcgacctgacaggggtccctagccctgcggctaggttgactccaagaactctgaaatggtttttcggattccgataagtcatttccaactcactatatttcagtattctgtatcaatttcatgccccaggaattgaaaatacacgaatcaacacctcaaaaattaacttgggcacctagggtttcacccagcgcccaagttgacaaccctaactagggtttcagtttttgggaccatcttagtgcaaatgggtcaaactttgcatttggacatgaactagacataccacaaacatatttgaggtattagaatcagattcagagaactttcacctttgagcacccgaacacctgatgcccaggttgacaatctgtcaatctaggccacttccaagcatcagatcaaaaatccaactcatgcatcctcttcgtctttatcaaacattgggaaacaagttctttctggaagaaacaaccctccttaggtgccaaaataagggaccagcgcccagcttgacacctagttctggcccagtgcctaggttgacaaaatgtcaacctgggccaattccaaggagtttttccaaaaaaatttctcggcatattcttcattttcaataaaaattaagattcaactattttcaaggaccaaacgaaacttctaggtggcctgaactggacccagcacccaagttgacatattgtcaacgtaggccatttccaatcagtttctcaaaaaagtgttttgggatttttttccatcatcagaaataacgaagatactagcaaactcaggaagaaaatcacaattccaagggcatcaaaattggtgtgttggtttcgattactcaaatgcaaattcggctccaagcattctctccaaaatggtcaaaaattgggtaggagacttgtcttcaagttcaagaacctgtgccaaaacaaaatcccgaaagcttcgaaataagcacccaacacccaggttaacaaatggcctggtgcgctgagttttgcttatccaattctaattatgtctcgaccgtttgtttattttttcacaataactaagtgtcatgaagtcagaagattcaaattcataacttcatattttcactttttcgacaaggtgatttactcagaattaggggagcttcgagtcttgcgtttccgcagaacaataatatctctgagaactggtgaccagcttcgccagaacatagaaatagactaagtgatgtcaaaatatcacttacgcatcaaaaaatacatcattggtgcgttcttacactcacccagtgtccaggctgacatcacatgccaacctcgacactaggcccaaaacaacttttagtaaaatgaccataagtctctcaatattgatctgattgacgtgattcaacttgtgttttgaaactatgtcaatgttctatgaagtcatgtctcacacttcaatcgtaattctgaagttattgactccaaatttcaccccaagggagttacaaattcaaactacaacttacccgaagcggatcccacaaacacgactcaagtttcgagaatcgacgatcaacattcagagtcaatttttaccattagatcatcatctacggtcaaaaatagcataaatatattttttttcatatcttttggattattttattcccatttaataggacctccttcacctataaaaggagagctccactagctcattttttaagtttagaatagtagtcataaggttagaacatctctctctaatttatctctatagaaattagtgcatccaaacttagccatttttctgcagtccatctcatgaaaaataaaacttgaagtagacgtagcttcattactatcgcgacatagagagtaaactactataaactgatgtgtctctctacttatacttaactcataatttattctcgccaatctagcgagcgggtctggcccagagatatgtgtctagatttctgagtcagcaccaaccatcccactgaagccaaggagcataacacagctcaacgcttcgacccaagcctatcgaatagccactctcttctctaacaaagtcacgaatttcaaaacttcccttgttcacataggagcaatacgagtaagagcacttaaaagtttctattgttttaatatttgtcatggaaaactttgctccaaggtgcattaaaccccgaggccaaggtctaacccgacttagccaaaagagctttgttaaaatcgacaccttctaaaaccaaagttgccacacttttttgtcttacacgaagagtcccaacaagtcaacgccatgaatctatccttactttcataacccgtctactagaaatgccttgtggctttattaatgacattccaataatcttgggcatgaggaaatttgaattactgtaaaccagaatggtttgcacaacaccacaaatcaaagtttctctcctggcttgggaaagtaacttagaactccaaccctgaaatctctgcgcgaatttagccacaacaaagtaaaagtcttccactttgttattggaaagaaataagggatttcccaagaattttcccctcctaatcaagctattataacctaaaattcccttaaccaaagttgatagtctattggaaggacaatatgagctccaaaagcacctctctaagtctattggcgaacaacttaccactttgtaaaccacattgcaatgactaatgtgtctgaaattgtttcaccttttagcattaaacttcttagggataagcactagaaaggttttgttaactcccttagtgaactcccctattcgaaaaaattccttaacaaaacaagatacatcaccaccaacgatgtcctaattatgcttgtagagctcagttggcataacatcaagacctagttggaggcaatgccaatgagtttcaagttcatcttgttcgagacagctgacaattatagttcctccaagtttggtggctcgaacagtttaatggattcgaacaaatgagtgaacctcgaattggaatattccccctattttcgcccatcatgcagccaaaaaaggtcgttttcagaaatgacccaaatatggtttttcttccttctcaccaacatagaagtgtggaaaaattgagagttttcatcaccatgattcaaaagctccctacacttttggcccatatgaagcttgtctctaattaatctattgaatttccaactgtaaaggcacctccagctcaagattgagatctgcagaagttccaaattccaccaaaaaacaattatgaagcttcaatttttccgagcataatctgaaaacctctttattccattttggttagtaaattggtttttttgtaatactgcctagctcattataaataaatacataaataatataaactcagtctactattctcactccaaagttcaaatctctctttgtcaaaatccaataaaattacactatccattaaagacattgataaaatttctcatttgccagttcttcacctaactaaacaaacccccatttgcttctttttttcctaatggaaggtaaaaaaaaacatcagctgttcaataagaaaacttgcacacaaagaaactcaggacacgtgatatataatatattacaaacaatcaaatgttgttgttgttgttcctaattacataataataatataatttaagagagaacaagctttcactaaaagacagcaacatcacacaaaagaagaagaaataaaaaaatgtcagatacacactaaatttagacattaagcaaatgaggttgaccttgaagcttgagacaaagcatcttcaaactgatcatcatcattcttctcagcattcaagcttggtggaatgaatgatttgaaaatctgttccaagttgggaatttccttcggttcacgaactacaatttctagagcagtgtcagcgaaagatcggtagaacttcgtgtggcaaaagaaggcaaagagaagggaaatgatgggaagcacgactaggaatggcgtgtagtagaatttcttcaatgtgaagtaaccgagcatggtaacttggtacaataccagcgcggcgattattcgcacagcaatgtgtggccacattctaccatagctttcgtatgatggaacataaactttaagggcctgcaagcataacaagatgtagcaagtaaataaacaaactttaaggtaaaaatggtgcaatgtcgggtgagtgcagcagcaccaggattacctgattacgaaggatgagccatccaagaccaaaataggctaccccgaatggaataattactggagcaatgacagaatagcaaagaacaatggtggcaatgagcaagtcaccaggaattcgagtcccatatttaagatctcccggaaaccatgcttcttttacctctgcttctgtcttacacgaatattttctcttgatatggaagataataagaggaactattcgggtaagttcaagcccataaccgacgaaaaacctgagatcaaaagtaaaataaaattcagttatatcagaaacattcaaaccaacatgacaatgggaaaaagaaataaagatagtcttcttacttaagagccacaaaggtgaggaaaaaggctgcacttcccgggatgctactagctagaacaccgacaatggagtttggatcattctgaatgtctttcaatgttctgtataaagttccagcaagtgtaaatccaataaacacattcaacacagtgaagtaaaaatacttccccgaagcagctcttattgcgtggctcatagagggaattccctcggccttagatagaaacagaagtaacttaggcaacaaagccaagaacacaatgagtgcaatctgtgggaggtaagcttccagcacagtccttattgcactctgtttcaatattggcttcaaaaacggcataagtttcatcaagttctttaacgtcgtgaatgcagagataatcccaattggaatcatgtagaataatatagccagagccacaagaatgtacacaccatattgccgtacttgcctctcatagaatgttttcttaagattagtccaaattatttgacgaggctcgggagcttcaattactgtccatttatcaaccagttgagcatgaagactctgagcagcagaagctgcagctattctgcttgtaaaaaaaacaattgctgcacctaactgcttgtccctcagagtagtcttttgttcagcttccagtttcggtactagttcactaattttctcggtgtagaactcaatgctgtctactttctttccaagaataccaagacaaccagttttgtgagtcggtctaacttcagacttgcctgttctttttccctctgcatacactgcttcagcacgtagaagcttcttcttgtaaccttctaactctttaaaaagtttgtcaacctgtaacgattaaactaaacagtaagtaaaaccgagtaatggaagaaaaaaccagcttatctgaacaaactaacacgagtacaatacctctttattgtctgtgacaatcattgacctgtaaaatgtttcgggatagatcatcttaaagtatgaatcgacctgttcttttctagactgtccttcaacagaaggtatgtctctaacgagaattgcatactgttcaggcttcaattcaggtgacattgatgcattagttctcaaattggaaatgtgattataagccctccataaaaggtaataagtaacaaaagaaacacagtagactgcaaacagaaatgcccacaatcttggactcttttcctgtaaacaaataaaaacaaaatcagttaaaacatcgaatatcgaattcaagcttaagcaaaggtgaaagaacttacagtgacatttcccattgtcaatttgtccagaatagtgaagttattagctcctaactgctccaaacgattatcggttgcagcaactggtagaagagatggtagtagaactaggccacatataatcaaaattcccaaaactgccaaaccaattaggaaaattagaatctttagtttatcagcattgtaagcataaagcatgtttaaagtgaatctagttcaatggacatcaatgatgaaacactttttttttattccatcaagttaaacatgtctaaaggacatgtttttttttttttggttaggataccaaatcaaagaaacattcatgtacatgaagtacaactataaaagttcagaaaaaagtacaagtttgaaacagtagagacactaaaattgaggatttttttttttttttttctgtttttttgttttttacaaacaacaatactaactagcctattaacaatactaatgtttggggtttaaaaaaatgtaattaattcacaataagataatcctcagatgttggaacagttgacaccaaagaaactagagtaagataataaaattaaattgtaataggtcgctattcccttagactaaaactattgacaaaaagtaggtgaaaaaggtagaaaaaagttaaaacaaaaactgtcattaaattataaactaaacaaaatcaacaaaaaatcaaacccaaaacccctatatccctaaaaaataaaaataaaaaatctacagaagctgaaatcaaactaaataattactatttattcctctaacccaatcaatttctgcagataaatacacttttccttaaataatctaaaattctaaatatgactattttttaaaatcaataaagtaaacccaaaaaaaaaatccaaacctattaaattctaacaaatataaaattactacaaaacaaaacgacaaaagaaagtgggagaggagagaagaaacaaaccagtgctgaggaagacgaagtagacagcagtgtcaacccctgacatggctataacattctcttctgaagaagacatagcttctcggatccaggcaaaagggctacaagaggcggatctgttctcattcggatccatccctttcaagatccgattcggatagtaaacgacggcgtttccaggcttacttgagagccatgagtaaatcagaaccaaaatcacaaatatcacaaaagacgtccctaaagacgtcaaaaaggaactcaaatccatctgggtatctctctacaacgctaaaaattcagtctttattatatctctaaacgaagccaaactcaaaaaccatgaaaagggtatgaacaaaaacgaagctttaaaccaaagaaagaaactttttaaagtgggaaacgaaatgagagccgttaaggggtcatttaagaaaatgaaagtaaccgttgtgagaagattaaagagaaaaacaaaagagtgagtattgaagaagaagaagaagaaaggagaagaagagtgtgttttgagagcttaaatggtgttatgtatgtatggaacggttagttgggttgtagctgttataatcaacagaaaaaaaatataaatctaaaaagggaaaaggaagtgcttttgtaataaaataaatagataaataaataaataaaatcagagaaaaatatcttcgtggttataccgtgtttgtgttgtgttctctctttttttctaatctttgtaataaccactttttttttaagatgaacgtggtggggttggttttgtgtttttgttaattgtttgaatttttttttttttagagtattgttatttggtattattttagtattttttagatgagtaattttttaattaatattgatatatagaagaatgttaacgttttagcccttttttttaaaaaaaaaaaaaaaaattattgtatttttttaataaataataatggtattttgtttttttttggctttagaatgcaaaagagaggaaccagaatgtgtggcagagctagggcaacgtaaagagtagattaaaagagatggtggagatttttttgtggaaaaaatataatattataaaaatatcccctataaattataaaattatatatttacacacgtttgagtttttgaatatatcattttgtgctacatttttttatatatcttaatgcttcacatttgccattttagaccactaaaataaatatctttttttttaattgaaaataaataaaacaatataattaattgtagaaagaaagaaagaaaaatatgaaggcttagtgatattaatgttatttgttttctttgtcttttgtggaatattgagacaaagttggtaggttatatgagtaaaattgtgttgcacgcacatgcatggttttttttttcttaattactattagtgacattaattcctacatattattaggtttaataatttggtggaatctgaacaagacttgcacccttgtttagggaaaaagtaaaacatgagaaaagaaaagaacaatgaaaatggaaatagaaagaagggtataagaattttggaggaatatgtgtttacttatccattgatttaataattggttagtgtaggaaggttcattgtttttgaagcaatactataatttttgcttcaatgtatatatatcatggagattcaaacaagggtcaaaactatttagttatgtataagaattttatatataataaatctatattttaataattaatgtaattattatttgacattttttttttttgagaaatttcactgatat

SEQ ID NO: 25950 - DNA, 1301 bp, Cannabis sativa
gtggcccaattaacatggtgttacatctctaactagcagacttagcaaaggcgtagttacaagatatgcagccacatctcaacaaaattagacaaccctaccctgtcttttggttcctccacacctacaagaattgccggtagataaagtatgataaatggatattacagttttatcttgtaggatcaaacttcataactcatctagaaccaaaagtatatagctagcaacagttcaaatgtatgaaatttgaagatgtaaaggatacaatcagataaatgaaaaggttatataagatatcaaacacatgatgccaccatgtgaattggactaatgtatggtttggatttaggtctagcaaaaaataacatcaaaactcattaagacacctccatccaaaagcacacattgctaattaagcacacatagataattcaacaaatatgtatttgaatttgaacatgcatatataagctagttcataaacaaaaaatattttactgtcaacatatcccaccaaaattttagaattccgagaatacctttttgctacccaaaatatactactacataatatgcactcacaaaatactagaaagccagttgatagtatcacttgccccttagattccaaaaactaaaaatccacaaataaaaactgcctaatcaattatttgacttataatacagcaaatcttcaagccaacaaaataaaggctcacaattcacatttctgtattaataacctttcagtacacaagcaaatagtaataatgggtgtaatatacttgatgcattgcatagaagactagtgcttaagaaacctcactttttctttgacagattcttctctttcagatatatattgttgcctcctggaagtatctggagtagcttcaatctcatttccatactgttgtttccattcaaattgtgatgtaaatacaattaacaagagcaaacaaacaagggcccaaggtcttgacatcctcaatgtcgattctgaacttggcctgtgtcacagttaccaaaacacccacattcaaaatttaccaaacaacctcccattcactttcttagagacaaattctcccattcaatctcatttgatgttctagaaaactaaagcagaatatttagcagatcatcactgagagcaataaagtactaaaccactaataccccccttttagaaactacttttaagtataataaaatccttaaattaaaatcttcaatactcaaaaaaactacttttctataaccctttaagaaaccctccactttctggattttcctaa

SEQ ID NO: 25951 - DNA, 1871 bp, Cannabis sativa
tagtattattattgatgattatatgagtattatgttaaatgcgaaatatactagttttgtaattctagctcggtagcgatagaaaatacaacagaggattattttaatcacatgggtaatacaaatttttttatgttagtaggttataatgtgttaagttcaaggtttggttttgggcggggtaatggtgttggaccattttatttctaagccacttattgaattgaattgttgtgcaagggtagatgaatcattttaattattgaggtaggtgtttaattttgtgaagggcaggcccttagctaatttgacaaaataaggatagtagtattaattttatattagttgaaaaatggaggaatagcctagaacaatctctcttttcctttctcttcattcgaccctactcaaaactgagagaaaccaggggcaagcttcaatttttttgtgttttagcttggatttgaggtgtagcaagcaaaggtaactctcgataaaccctactcttttaattgtgagtgtataggtttagggttgaggtttaggggattttggttttgtttagataggtttcggataggattgtgttctgtaagttttaattgatgatttatgtttaattggattgttgttgatggttaattttgaggttgaacaagtttgagtttatcgaagtcaaacttgactcaacaatggcatgttgagttttgatatgtttctattgttgttcttaagtggaaattattttagaatatgtaaacaggtatcctggaaggtatgtttggatttgggaaagttttggccaagctggggaattttcgggatttgctagtgcaaaccggtcgaccgattttacaagacttgtgaagccggtcaaccagtttataggtaggattcccgaaaatgcatttttctagtttgtaccatttttcagatgctagtttggtgttttctctattagtgcattattaggttgaatatcatcaagattacccttggttataagtttagagggtttcgaaaaagtttactcgagttatttactcaattatgtaatgtgacttaggaccttcgtttagctcgagaatttttcattcaagtcgaccaacatgcttgaatctggaagtagggtaagattagcataaattatatatatgttaatgaatgcatgtcattagttatttacactactaacaccgaaaaagatgtagttttaagggtgttagtacagtgtagggttttaagggaggttacggtgttaccaacacgagtaccaaagggtacgtagtgcttggagtataacacttaataattcccgaaagtacagtaatgcccctaccaacatgagtacggagttggtactctagtgcatgtagtacagtggttgaccctacccacacgagtacatagtcggtacttgataactctacggtatagagttattttttatgcttttaaactaaaagtattgtgagaagagtagtaaaaatgtgtttgttgctgaaatttagtgagttttagtttcattttctatttaataagctaacttttaagtcttgtaaaaattgatatcattaggtgtgtctttctaattaattgtgcttgtttgatgttaaaaaaggaagaattaaattgataggaaaaagaaaaggaagaaggaagaagtgggaacaaaggctaaaattggggtagaatgctgaagcaatgctgaaacaaattcaacattctggcaatgacgtggaaacacgagatttagttgtccacataagcaggagtgtatttgtcactaaaaatgagaccaactggaagctttgaaaaggggggactaaacctagtgggccaaagtacaaaaaggattgggcttctaattt

SEQ ID NO: 25952 - DNA, 2218 bp, Cannabis sativa
ttttattaaatataaataaaaaatcacactcatgaatttctcataaaccaagaatttagttatataggcacactttatatagaatagatataaatataaaaatatagggttatttttaattctcgaaatttgattgtaggcatccaaacttttttttttttttttttgaaatggaaacttaattgattatataactagaaatgaatactaagattatttttttaaagaacacacaaaaataaaatttaaatcaatgctctctctctccaaaaaaaaaaaaaaatatattcaatgttgtttacaccaaaagcagacataatgacatggacattaatatttgacatgcagtaagaaagatgacaactcagagttgagtagtcctaagccatagcaagtcgacctaggttgactttgggaactccgggatggaagttcggacttcgtaacttgttccaacctgtgcacctagggtttcacccagcgccaaaggttgacattcccaactagggttttggttttcgggaccgtcttagtgcaaatgagtcaaaacttgcattggaatatcaactagacataccacagacatatttgaggcatctaaatcagaatcagagcaagttcttttttgagcacccgggccccgagcaccccagcgcctaagttgacaatttgtcaatctgggcactttccaagtatcagattgacgatccaacttttgcatcgccttcatcttcatcaaaaatagggaaataagtcctttcggggaagaaaaacacttcttgggtgccaaagtaaggcccagtcctttcaatgaagttttatgagaaatcttctaagcatcttcttcgttttcaaaaaagattgagattcaactatttctagagaccaaataaattttttgaaaggccataattaggacccaacgcccaggttgacatgttgtcaacatgggctgtttccaatcaagttcacgaaaaagtgttccaagcatttttttctgtcattagaaataataaagattcaagaaaactcagggagaaaatcataaacccgagcccctggaaacagggcccagcacctaggttaacctggtgctaggcccaacgtctagtgcccaggttgacaattaacttgggacgctaccttcaattgatcaaatgccaaatctgattcgaccaatgaatttgaaatggtcaaaaatggggtaggagacctcgtccttaagttcaaaagtcttggaagtatcaaaacaagatcctacgagctcgggaataagtacttagcgcccaggttgacaaatggcttggtgcgctgggttctacttatccgattttgattatgttttgatcatccgtctagtttttcacaataactaagatccatgaagtcagagaagtcaaattcacagcttcacatttctcatttccaacatcggaaactcactcgaaaatgaagagttttgagtctctcatttctacagaacagcaacatctctaagaactggtgaccagcttcgtcagaacacagaaacagactaactggtgttaaaatatcacttaggcatcttaaagtacatcccttgaacgtttttggacttattcagcggccaggttgctgtcatatgtcaacctgggcgctggatgtcaacatgggtgctggatgtcaacatgggcgctggatgtcaacatgggtactgggtcctaaactacgcttagtaaaatagctataactcactcaatattaatctgattgacgcaattcaacttgcgtttcaaagataattcaatgctctatcaagtcatgtctcacacttcaattgtaataataaaactatcattgtcaaatttcactccaagagagttacaaaaataagcttcgggatacctgcaacgggacccgccgagctctgaaaaatagccatcaccaccaagagctaatttttatcgttagatcatcatctacggtcaaaaacatctaatttatattttttttcttatttttgtaggtctctttcacctatcaaagaaaaattcttttagctcatttttcacattcagaaaactacctagaaggtcagagtatctctctataaactagagctcaaacacttatcatttttttgtaattcttgtaagaaataaaaactcgaagtagatgaaactctattactatcgcaacatgagaagtaaactactataatttttagagcaatttgcgg

SEQ ID NO: 25953 - DNA, 2939 bp, Cannabis sativa
aaaaaaaaaaaaaaagctttatagggttcccttttccccttttcaactgtttgatgttgctatgattactttatttcatttctagttgttgtcaggtgtgcaatgagatcaactctgttctctcttctttgtatttttcactatacagttataattattatttttttgaagcacactatacagattaatacaaatatcaatgtatatgtatattcagcacatcatcatacatacttcaaaatattatgggacaatatcttcctttggacaaccactgcacagaattaacaatttaaaaagcatccccacttaaattaataaatatgagtagatgggcatgtaacacattatcaactgcagaaataaacaaaacatcactatgaaacatagtagtagtaattttctaacaatataaacaacaaaccaactcccggaacatgcattcaaaaataattgaacaatatctattatcctccttataacagccacagcacagcataaacattgtaaaatcacagtcccaacttaaatgtataaacatgactagatgtaagcatgtacacaatatcaactgtagaaattaacaaaacttcattatgaaagcatagtaatattccaaagtcctagataataggtaaatatgatattttcaatgcatgcaatttacaccaaccttcaagcttaaagaacttgttggattagagccacaaacaaacagcatgcaaaccttcatggttactagtttaatttatcaaaattaaaagaatagaagcttgtatagcacctgttgcatcaataatacagtcacttcggtacaataaacatgtagatctagtcatttttttaccttcaaatttctcacttgatgggggcagccagcaggtataaagacagcatctccaagtctttgaacaaatgaccatggttcaattcctattaaatagcatacaagcaagtaaaccaggtgagaagaatgaatacaactattccacacacatttgaatgaactaaccatattcctccttcagtttccttttgtgctccatagtcagatacatagtctggtcatgtatggggtgaataacctatggcaccaaaacaagcaatatatattgaaaaaataagaagcacaccaaaaagtatttacaaaacctcaagtaaatgaagggcctacaaatatgcaaatagaaacaaacaataaattagcactaaagctcttattgtgctttccaactttgacgatttagaatatgaaagaattgactccgcacctaagccaaactcatttgacatggttaaagaattctgtaagattttcaggctgtccatttatcctttgagtcatgacagccactacagactacaacgatgcctataatgcaacactagcaatccagctcagtcctcttatataaataagatgtcttaagggcattggtcattggagcaaatcaagaaatgtttggtattgactaaggatccttagttatttcagaacataccaatacagttcaataaaataaaaacaaataacgaaagtattacataaaaatatggtatacacaatacagttcaatatatttacataccaattccttagttatagcaataaaaacaaataaattattaagcatgctcatactcttccatttacatactataacatggcagagtgggaatgagtaatgaccatggtatttataattttgataggaataacgatctaacttaaacaaattcattaagtcttgatgaatggtaaggtaaacaagtcatataatccatttgtacatatacaaagacaccgccagaagagtaatttgtatttcttaataattaaaactctagaaatacaaacaaccaacaaagattacagtaaatcttttgaaccatcaagcaagatgaaaaactttcaatctcacaatttagtaaccatttactgtgaaattaccttttctaatggagaacaatgagtgtgcctgaattctctgaagtgcttttttagatattcctgcagcttgggtacatcctctctcctgaaaatgtcccaaagcgcaccaccctcagccattttcaagttttccaacttatttccagaatttagtaagtgctcaatactatcatcacttttatcttcagtttttctatcattaactttgttatccggaatttgaccatttccaaaaagttctcttcggtcttgttcattgtgcttccttttcaggtgttctataatagtaagttgttcgggtgttaagctcacatcggcagtgtgcatcagaacattcacctaaaattttaccacgcaaaataaataatattcatatttagaaaaaatacaggagaaaatactactgatgatgtcccagataatcacacaacctaaggcaaaaattgcacaacaagtggtgcacaagtgcagagaggtgtgacagacattatagtcaatgcactttgtaaactatatatacgacatctcaattcaaagaactatattctataaacatctcgtagagaaaaattaaatattgtccaggaatgccaatgtcttctcagtgaaaatttagagctaatacatgatcagatttaacattttaggccaactgcatgcattaaaaatatattaaaacaaacctggagatataatagcctgccaacttaatatattataatccaaagccctcttggagtatttatattatacaaatttcacagtcgttcaagaaactatgagctgcaaacaaaccttgaaatatcttttgatcactaatgattaaatcatattgcaaggacaaggtatagaagattcataaaactacttcggtacaactcaagagagaggggtgagcaaaaaatccaaaaaaccgaccaaaccgaatacaccgaccgtccgaacacctaaaaaaccaaaaaccgaaaaaaccgcctttggttaaaac

SEQ ID NO: 25954 - DNA, 2048 bp, Cannabis sativa
tatttacatatgctttatccattgcttatttcaaagtttctttgttttaatatagtctctgtaatcaaagccttatttttcctgctttatgttcacttgaatactcatgtaagctctttagaatttaattgtgttttctgctaatttctaaaagtttgagtcataattttgagcatagaatgtagatattgttgaataaatgattactgacaattgggtgtttgatgtaaaagttatgttagtatttaaaaataaagagatttgagtttgttacaaagcaagagtttttttattggtttctataatagtgatttcacaagggtttctgttgtgacattggtcagaaggtaactaatatatattcctaagtgttttgttaattgtttattggtttctataatagtgatttcacaagggtttctgttgtctatatatctcatcctttcaatcatccgcggtgaaggtaatccattttgtaaaagatgcagaaaatggtgttgcagaattgaaaaaccatttgcttgatatgccactaaaaattaatacaatcagctaagagaccaaaaaagaaaatgggcttgcatagaatatatttgtacagtaacagctgagcagagaaccattcgaaaatatctgaaggacagagcaatacttaccccaaagtgcagcacttccaagcagaggaggaataggtatatcctcttcggatttctttatgctcctgatagtacaagagagaaatccatcagtagtgcaaatgcttcttagttctaatcataaaataagaaatccaagtatttatgtaatagcacaattctgttcttcatttctaaatgatttctgagttctaagttccaataattacatttgcagaagaaaatgcatgtaaactaatagaatcagatatggaattgatagacaccaaataagcaatatgccacgtaagcattgagaagaatttgacatattgttctaggcagttacagagattattagaattattgggaaggggaaagagttgtgaaaatgggtcattgaggggggaaaatgggtcattgagttgagcatttgctcttgggagagttggctgtctcttgaatatcagccattgtgtagagttggcggtctctcgaataccagccattttcatggtattgttctcggtctttcattaataaagaatctgaatagtttcatctctttctttatcatttttgctggtttgttcctatattctctgtatatctatttggttcatatcaggaatacatgacaagaacataccttttagcattcatgatcatgtttgcaatgccttggccaataagaccacatccaaatccaaccgatccatacaacactccctggatccaaaaggtgccaataagaatattaaaaacaattttagacagctttccaattcaggaaaatactaagacaaagcgaaaacaacaatataatataattactattaaagatgttgatgaattagtaaaacaagataccttataaaagtatgtggcaactcgttgcttcgctgtaaatgtacatcctggtctttcggcttcaaagacactacataagagaagataattttttcgaaaataaattagttaaggataaaaagacttccgcatttgaagaatactgaagtccctacaaggtaacaccagatccatcatatatagaaaaggtacttaagagaactattgtgaaaaaactttttctcgaactgatccttctcatttatataaatattacatgtattttggtaatgatttgagtcatttgttcagcccaacaaaggtgcttaaaatgatgcacaagagactaaaaaagaagaaaacattaaagaataaagggaacatctatagagtgagaacagtagaaaaaaaaattatccaagtgagcttcacttaacaagagtgaatattagagtgactacttgaataagaacaaagggttcttgagttgccacataatagctttagctcaatacttctaatgtggtgtatcttaatcattaaaaatttgataaaacataatag

SEQ ID NO: 25955 - DNA, 3458 bp, Cannabis sativa
aacaatcgaaaaaatttgtctctatactacattttattactagtaatgtgaatataacttggcagtcgaatcggataggtatgaaatagcgaaagctgcatggattgatgccccaatgggaagcacatcctcatctacaataaaatatgggctatgtggtaagtaaatagatccaattttgtcatttttaatacctaacaacaagaaagaaccagccactttttccaagtagaaagcaaaatcttcacttcccataaaggtttgggagagaattgtgttgtgttgtcccacaatttcacttgaaattctcttcacatgttcataaattgtcttatcatttacagttggtggaatactaatttgtccctcttcatcgaaatcaatctccacagagcatcgatgtacagctgcttgacccttgatcacctattcatccaaaaaaaaacactatattagataatagatattatataatttttactattatttactaaacaaacattattactttctaaaaagtacacctaatttattttataaaatactatattattaagaaaaaatttcaattatattttaaatttttaccactatatatatatacaaaaaattgtaaatttttttggtacaaaacaaaccccaattagattttatggccaaaagacccgtttttacactatatactgaaatttttaattttttacttttttactgtaaggtagaatttttttaaaaaatactgtgtaaattttgtactgtgtactgtgctaagttttcacggttgttctacggatattttttaattgtttcactgttattttaattgttctgttttgttcttttacggttgttttataaaaaaatagtctttttgtaaaaaattctgtgacagtaaaattataaatttttacccaaaatttaatatttttgtaaaaatcgctgtaataatataattattagccctttctatatatgtattataagtatgttacctcttcaattctttccctcaaagcattgaagttttttttgctgaaagctctaaatgtaccagcaattgtagctgagtcagggataacattaaaggttgtcccagcttgaatcatagccacagataccacctacacaatttcaattaattactcttccataaacaacattataatcattcaaataattaaacattgtaagtacattacctacctgtgaatctaaagggtctgtctctctagagactatgctttgcaaactaattactgaagttgaagctgccaaaattggatcaatagattgttgtggaatcgcggcgtgaccgcctttaccgcttattttcgctttgaagctaccgcaaccggctagaaactctttgggccttgccgcagcaaagcccgtggggaagacagttgatatgtgtatgccaaagatggcctctactttatctaatgccccttcttttatcatctccttggcacccacaccgcgttcttctgcgggttggaatagaagaattactgtcccctgtaatgcaaccgaccgcaaaacatatagtaactgatgagttcctagtctttgaagaggagacacaagaatgttttcattttttcgctaactaaaaaagagatcccgtgatacagatcttttctccactcattcggtcattttgacaatcttgggtactaggggtagcaatttgagttagatataataacatggctcgaaatccgcacgaaatcaacggatttggatcatttttagattaacatgtttaacacgaaaatgacaagataatgacatttgtaaggatatacactcttaaaattattatatttattgtatgtaaactatatttttttttgttaaataaaatataaacatgttaaattactcataatcgtgtcataatatgacccacgaacacaaattgttactcctaccaaataccacgtgctaattataagagtcttatatctcagtctgtcttatttggattgtcaataactactacttcaagagttcttatctcacagataacatcatctacgacaagctagcattcaaaagggtcaaacataatccctttcgagagaggctatagtgggtttagagtccttgacttaaacaaagaaggatgcccagtaaaatcaattcctaccactacaccacgcaacgcgagactagaaaaagaatgtttgagaatattaaatggaattcacctgtaaaacatcttcaagctgtttaagtatctttgcagcaccaaggagcatggtcacatgagcatcatggccacaagcatgcattttcccatcatttttgcttttgtgcttccattcaaccaattcctaccaaaattataaaatcaaaaaccacattccaaaatcaacaccacacagaacactctgttccaaaatcattacattctaaattgagcctttagaaaaagagccaaacatcaagtttgttccacatattttgatccattatttggttactaaatgaatgaatgaacaaaacatacctgaataggcaaggcatccatgtccgcccttagagcaacaaagggcggagaaccggacccaatagtcgcaaccacaccggttcgagccacgggccatcggtacggtatgccaagtaagtcaagctcatgcctaattagctcactagtttgaaactcttcataagcaagttctgggttctcatgaattcttctccttatgttgctcatccatttaaccgttttcgggtccttagccaaccccacaatcttgtccctcaaaacattatcatagcttggttttgaggaataattcaagcttttttcactacaacaagtgtggagaatcaaagaccagcttaaatatatggtaactgaagttaggaacatggctttagaaaactccatatggcacaattggtagtagaacaacttgtttctcttataagtaagagcgtttcggtagaccttctatctgtttcggtatctgttttctataaatttataagttactaaaaggggtgtagtattaaaatgtgtgaaatattttgaagtgatttaagtgaagaaagtcaagaacatgatcatccacaagaaaaaagaataatgacatgtgattttttaaaagattaaaaagacatgatgtgaattattggaaagagtagtataatgaagccaaggaaaagtgatatgtatgaatgtgatgagtggtggagaattaaagctataatggctagctagttgccaagagtgactagggagagacatactctagtctagagtttgatggaggagtgggagtgggacctttgtgcactaagagatattgtcaaagatgatgaggaagaaaaaaataataaaagaccacgtgatgaattggattgagtggacgagtagaatactgcacgtgaagccaagtcaagggacaaacatttctgcactttgcagtactcatccaccgtctaaa

SEQ ID NO: 25956 - DNA, 2702 bp, Cannabis sativa
  modified_base (817)..(817): a, c, t, g, unknown or other
  modified_base (1816)..(1822): a, c, t, g, unknown or other
cttatttataataggcccaaattgagacttgattttttataacaaattagaggttattcttgaatagggtattcttaaatagatgttctactgtatatcaaaacatatcttaattttcccatacttttgtaaatagcccatacaaatattcatgtagggagataaactacacttgggcttgatccctgaaaaggtatgtaggcagctctacggagtgctgcctcctatcataactattttttatatagaataatgtgccattcaagctatttgaccatacaaagtccatttgataatttcatataacaacccaccgaacaaataaaaattcaagataatattctactacaacagatgtgtatcgcatgtaatgaaccacatagtttaaaccatattccaaaatactgagtctaaatccaactcagctaacctacatttagagtaagggaatatgggataccagacccatgcaagttagccaactagacaaaatttcatattacaatattaaaaacataaaacattcgacatataattaacttaagacagatgtggggcacaaagttagtcattcgccagaaaatcattcgtagtcatccctttaaacgagtgagccagatggttagtttgagcttcttcctcagccctcacctgtagcaattcttcatatatagcaatgtacttgggtatgtcccaagactcgtccttgttgtctgaatactccatcgccattttttatgacattggatctcagcctctagtccaatgttgatcaattgacgttccaacatatccacacgagcttgggcagtagcangatcagccaaggcagacttcaaacgattagaatcttgctcattagctttgagttgagtttgtaactctcctttgacacaatcaagctctttcttacagcccttcagctccttaatctctccgtgcaaatcatcacgctcagacctcataaccttcatttgcttcttcatgttcttgatcttatcaaagcgtacataaacccttgcataccctgtcatacaatatagagtaccataatgatctgacacaataatactgtaagtttattcatacataatcataacatagaaactcatgcatacctaaaaagagtgagagatggacaactccatagaagttattttcccgatgttctcaaatcgagctcaattctctaggaataatagcttactggcctcaccaaggtgtaggccaaactcagaatgcacagccactgaagatgggaaagtgagatcaaccgtattactcagccagtcggtcgagtcaactagagatggtcttttgttattcttcttctaagctctcgtagaaggacaagaatgagcaatagtagtaacaacctctttctcagtaatactgtaagtttatccatacataatcataacatagaaattcatgcatacctgaaaggagcgagagatggacaactccatagaagctatttccccgatgttctcaaatcgaactcaatcctctaggaataatagcttactagcctcaccaaggcgtaggccaaactcagaatgcgcagccactaaagatgggaaagtgagatcaaccgtattactcagccagtcggtcgagttatccagagatggtcttttgctattcttcttctaagctctcacggaaggacaagaaggagcaacagtagtaacaacctctttctcagtactagaagttgtccctgtcttctatctacgtgagcgtaaacggtccatagcaccgtcaccagccagaggaagagtgaaagaagattgtgttggaatatattttaccnnnnnnnagatttactaataagtatgttgattaacactctaaatatgaattctctaaaacaatagaattaaacacatataaagtttaagaaaccttacattggtggcatcagaataatatgtctcctcccactcagatttctaacccttgttccattctatcacaaagtattatcaagatctgagcttaattttccttcaagtgttagattcttcacagtcttacacactgtgattgagtactctacatgctatgggtgggcatgtactctttcactataggctcaaaaaatatgaagaacagaagagagggattcgaaattagcaaggaaggaggctctcaaagtttctagttatctgacagaatgtaaactatgttatatgagttggatgagaatgagagcatcatattccttttatactatttcatctagggttaggatttgaattatatgaaatataaaaagataaactaatagcaaaatagatcatatagtggtcggccatagagatgggccccactagttataattttgccatttttttttaactatttatcttttatttcattaatgccatattttttaattttaatcctataaatatcaaaattatttattttataattataattaattatcaaaaaaaaatggcagtattaattattgattaattaaaactaattaaatgagtctacaagcagtattatcccaattagtgtgggcctatataattaaactttcaataagtagctctagaatttaccaagtaaattctcaaacttatttattccttcttgtgtcactatagattcggaattacactcttaattatatagaacactctatatgttctacgatatagatacgctatgaattattcattgtt

SEQ ID NO: 25957 - DNA, 4398 bp, Cannabis sativa
  modified_base (61)..(61): a, c, t, g, unknown or other
acgtaaaaatccttatctcgctttcttacagctcaatattataatcatattttaatagttnccgaaaatctcggtcaacagtatatatatcgattgcgtgcacttacgtatatatataatttttacaacaagtttttggtgtcgttgctgaggattgaaattaaaagttgtgtattatcaattattttgcaatttatttctggtttgaggttctaacgttgcttgagtgggttgtatttttctttctcaggtttactctagtacatgaacgagtaccaagaattcattaatcttgatttatttcctattgatcctgaaattgagcacacattcagagaaagaagaagagcacaacaaagagcataaggggaaatagaaatgatggataaccaagaagatgggcagcgagttcaaagggagttagcccctaacaatggtcagaatgcagtgatcatggcagatgatagagatcaaatcatccaacaccaacaatatgaagcccctcttttcaatgagcttaatttgggcattgtgaggccaaaaatccaggcaccacagtttgaattgaagctagttatgttccagatgcttcaaactgtgggatggtttagtggcgcacccaccgaagatcttcaccttcatcttcgtctatttatggaagtgagtgattctttcaaatggcctggagttacgaaagatgccttaaggttgaagttgttcccctgtactttaagagatcaagctcaagcttggttgaactccttaccttttgcatcagttacaacttggcaagaattggcagagtagtttttgatgaagtattttcctcccactaagaatgctaagcttcggaaggagataacttcctttcaacaatttgaagatgatcctttgtatgaggcatgggaaaggttcaaggaattgttgcgaaaatatcctcaccatggcattcttcatcacatccaaataaaaatattttacaacggtctcaatgctcatactcgaatggtggttaatgcttccacaaatggggctttacttgctaagtcctataatgagacctatgacattattgagagaatcgccaacaataattaccattggcctactactagagcacctttagggaagaaagttgccagtgttattgaggttgatgtcattactgctttggctgcccaagtagtttctacgtcaaatacgctgaagactatgagcatgggtcaacataatgtttttgttggttttatagtattaaatcaagtacgcagcggaagagtttcgtattatttgattatcattgtactatagctcctagtatttctaaatatgtgtacattaaaataaaacaataaaattaataagtttaaagtatacccagggttggccctgagttaatttgggccctaggaaaaataatttttttgggccctttttgtaataataaatggcattttttaaaattatttaaaaatatgtatatttattaaaagttttttgtttcatttgggcccttaacccgccttagcttagggctgaccctgagtatacctctcgaagcctaatagggtatcccgaaacttctcgtatgttgtatcctttaatctagttgatgatgattttgcaattttgactcacatcattgtcttccaaatcgatacaccacacacaagaaataatgtgggctattaggataaagtgtataaccttattcttgttgagatctcaacacatgagcaagaacaatagagagaaaaattgatttctgtttctctctatagattttgaaattagtagtgtgaaaagtatcattctgatttcttaaatcaggctcctatttataaaaattaaatcattttaattaaattattatttaattgtttaaataaatatttataatcgaatttggttactgatatttatgagagaatctctcaatcacttgacagaatatttcaacaaccttgaaatatctttaaccacttttcaaattatatatttacctaactgaattaattaaattattaattaacctaagagacaaatatcatagggtcaggaccaatgctaggtgcctaccttgtctatttaggacaaggttggtgtcttttgtcctgacaacttttaccttacaaatcttgtctcgataaattttgtcttaacaatttttatctttttccctatttcactaatttggaaaaattatttatttattaaaaaaataaataattaatattttgtcaattcaacatagattttctttcaaacatctttatacaactctttatccttacccttgattgtattttaaaatagcaattcgggaaccatggacctataattctaagctccaataaactaaattatttattgagtctcatcaaccaaataatctattgtttattagttccatgattactccactataaatatagaattgcactcttagtaattatagaattatatttactgagtttaactgtagtgttcattgatataatcaattccagtgattagccttccatgtgttggttcataattagttttggtcaaaatacctatttacctttccaattacttatttacctttagttccaataatttactagtggaagtataattcaagattccatctgaattacgcacaacatttcagttctagaattaatacttaaagggaaccaacattcgattcgttaggaaagtcaagattccatatttgtacatcatgttcctagtcatccatattattagatttccaaaacagaagttttaagaatcatattctctaagaaactttaacgagtgaatcaaataaactaataacatgaacaggaattcatgatgactcaagatttaggccgatctactattgatcatcgttatgatatgaattagatctttatgataagcgacatgttaataaagacaactttattcatatcggtcattatcatatataatctctattatatacagtaccttcactttgatgtctcactacatccgtaattcgaaccaagattacttgcaccgtagaacgggtatcaatgaaccgtactagcaaccattgattaaagattctataacttaaatatgttgctgactgttttattcatagctaagtggtcttagttctatgtataattacaagccacaatctcatatatgaataatgaattttctgatatttaatgtaaattattcaataataaatattaacaatttaacatttaaacatatatcaaatgtttaactctttatttaataatcaaaaatgtctttacaagcttttcaaggcataaaccctatcattttcctcatatatgggtcagctcgaggaggtttcgtgtgtttattgtagtgagagccatacctttgaaaattgtccattcaatcatgcatctgtgtgttacattggaagtcagaatggatacaaccaaacctacatgaaacaaccaaacttggcatacaaaagttaaggggttggtcctagcaattcgcctatgccttttagacctaactttccacctggtttttctcaacaagcctttcaacaaataccctaacaaggcagccaaaccaactctcttgatagtatgatgcgagattttatggccaagacagaaattttcatgacaagaactaagaattatatggcaaaaaatgacattgcaatccaaagtcaagcaacttccatgagaactctggagaatcaagttgggcaactagctaatgagcttcgaaataagtcacaaggtactttgcctagtgataccaaaaacccaagaagagatatcgaggagaattgcaaagtggtaaccttgagaaatagtaaaaatttggagtcaaataaagcagagacaaagggcagcaaagagcccacttcaatctaaaaagtggaggaaacgaaaaaaaaccaataattgtaactgttaaaattcctccagtagttacagcatcagatcagcattttgctgcagaaaagcctttgcacaagccacctctaccatttcctgaaagattcaaaaagcactaagaagatggtcaattccaaagatttcttgatgtactaaatcaactccacatcaacatatcattagtggaagctttggagcaaatgccaacctatataaagtttttgaaggacattttgacaaagaaaatgaggcttggagagtttgaaactgctgctttaacggagggttgtagcgctatgttgcaaaataaaattccacctaaaatgaaagatccatgtagcttcacaattccaatttccattggaggtcgagatgttagaagagttttttgtgatttgggagctagtattaatttaatgcccatgtctattttcaagaagttgggaattggagaagcaaggacaaccaccgtcacttt

SEQ ID NO: 25958 - DNA, 6666 bp, Cannabis sativa
accttgcattttttaaaattatacaaataatacactaaactgattttttgtcaaaatatcaaaataaaacttgaaaaacttgataataatcataataatccgataatccgatctaaagatgttatagatgttatggtaaaactgattttattttctgtatctgttcgtgttaaaaattgtcttaaaattagttatattaaaaaataaaattgttgaaaaattgaattcatagtcttatttgtacaattttgaaaaatacaggatctattttgtcatttaacaaaacagaaagtccaattaataatttttacaaaacatagaatccaaaatagtatttaccacaaaaaaaaaaaaaactactaattggataattttgcaaaagtctttgtatatacagtcaagtgtaataaatgaaactacacctgttaaatatttataagttatttaggatttttatctttcgaattattacaactattaaatcgtgtcctctaaatttttttgctcattaaaaattttcccgaactacttgcaatgctgaaatataaggtttttgtaaaattttatctttgcattttgttagctatctgggataaaacttaacaaaatttcaatgcttcagtattatgaataatttaagagaaattttttaacgggcaataaatttttaggggtatgatttaatagttgttagttcggtgtgaaaattttaaatagccatatttatatataggagtactttttggatttgtttgttataagcttccattatctaaattttcagagtatcttctttctcatgtaggtctatgcatgttgtatagtaaacgttttttatatggcatatattcctcctaactttcatatttgttccaatctttatgtaatttaatcacttttaagaagaaaaaaaaaataaaggactcaattgtaaaaacaaaaaatcagggtctggactatccaaagcagaaaacattaaagtatttaagctaaaacctttttttaagctaacctggtctcactaataagtatgtaatgcagaatgtgtcaaaaaaaatataatgcagaaaagatgctcacgttctaattagtgacacacctaaaggcttaagttcctaatgtaataaaaatcctaattaataagtatccaagttccaaaaccaactcatataatcaaaaatagacgtcataattggttttactcctttaaatttacattgctccaaaagcataattgattctaaaatataaattataatacaactaataatcaagccagtccttgatactaatgcaattatgcatcagtagcccaaaaccattggcagaagctattacaaacaggtgtattctatgtatatatagtttgaatttgatactgaatccaagaggtcaggacaccatatgcaagtggccaaggtgctcccactgataggacagcccaacttccatgacttgttctttggagtcttgtcagtggacatggtggaataatgggccaattgaatacttgaggggttgtcttgtgatcttaaaaggacccccacaaaactaaacaagctcattataatttttcaacaaaaatacatccagaacaaacaacttcaggtcccaaccttcttttacacttgatcccccctcttaaacccctatctaaattgttactttcagaactcttttgttgtatagtactttatgtaaaaatagaatatagaaaagagatagcaaaaggtggctggtgagaacaacagtttttgagaaaataaacactaacatttctcagtctcaacaaaaggaaatcaactggttgagaaagtttattctcaacaaagctttcagctcaagcaagaatgaaaaggttgggaataggaatgtatatgaacatgatccagggagactcacttattctaattccatggaaatatggtaaacaagaggagtaatactaaacaacaaacataacaaaataaatgacagccgttttcagtttcacagaaattaagttgtctaactctaccccccttaaatgttgttaggacaagtaagataccgatgatgagacaaaatatgttcccggcagaggtttcacgcagtcccttggcgacataatcaggtgttatgacaaagagaatgaaacgggaaactgaaacatataaagatatgcgaaagaagaaaaaacaaatcttcagaacatagataaaaagaaaatgaaatatgcaaaacttaatacttctaccctagtgaaaaggttgggggtttgttttataatgttgaggagatatatatgaacctggaatgtcttctggaaagaagaggtgagctgcaacagcaagaaaggaaacccagtaaccaaatcctcctctgcaaaaattcagaatggttagtcttgaaatgtgcagatatatgaattagttaatgtaaataggaaaatgaattggggtatggaagaacctaacaaaattgaagagcccatttggcaaacttgtcaagagataaaacactataagagtagtttgcaaagatgatctgcacaccctagttcgatttaagatcaacaataatctgcaacataaatttgatacacacaaaacacattagtaagaacagataccatcttcccaaatctaaatctaacaatttgttgatcttgttcctaatgcttcactgaaaattgaatccagagaaaaagactaaatctttactgagaaatctccatgtaaagtgatgacatgtaagctaaaccaaaaaacaagcactgtatatgcatgcagcagtgtaaaagatatttcatttcatctacattagtgaaacaaaaacctgaaataatgcagagtttttgagccaaaacaaacaaacagactcataacaatcaaaatttcaaggcaagaccttaagaaatcaccaaaatgtatgtccacaataatttcatctctgttccatttacttttactataaaatcaagagaaaataaacagaataaacttcactaaatatcttccttattccataccttcttctatcattcccatgccaaaagaaagataaattgaaatttcatgatctgggtattgcttaaaacgccataaatgtacatatgaagaaaaaactgcagtaaaaaaagaaaaggtaggattaaagattgactcacaaggcgcaaagggttccaccccattgaaaagtggttcgactatggctaaagctgaatcctttttcagaatcagataaataagagaccaaatctgtgaaccccatttccatatttcccagtctcttctcccttttcaccaaattctgtacactcaatccattaacaagtcttcttccactactagtactaactcagatcacactagtacccatattattttagttaaataattccttccttgacttcatggacttccttttcttatttctttatttatttctatcggatattcgaaacaagaaacaataaaacctcgaagatttgtgaacgtcggattgtacacgtggctagatagaccatcgattccccaaccagtttctgacgtggcgccgttctagtgcttcaagtccaacgtggattaatttaatatcgtactgaacaaatctatttattgggcttcattgtaaaatgttgtctgtggaccgtgtcgttatctgcctcggtccacaaagtttgatgttatttttctttaacaattttttcttcttattatctcaattctcaaacacactttccattttgttatttttcaaaagtaaattttattttacgtatttaaaaaaatgaataaaagacaattatgtatttaaaatagattaattagaaacgaaaatgtttcgatttaaaaattaaaattttagtgtggtcatatcatgctctagtgttttcacactcctatttaattattatataaattacgtgaatattatgtgtaatgtatgtatacatataatatatttggatatttttttagttatgtatgtggttttgattattgaatattagaataaaattatcatagatatatatttattaaaggcttgtttggtaatttttttgttttttatttttttaaaattttacttaacaaaatcttgtaatttgttcacagtttttgattaattaatcaaaaaattgattatataattgttaccgaacaatatttaaattaataatattattttagtaaaaagatgttttaaagctcaaaaaaatatatagtagtatattcttaagaaaaaaaataaatacaaataggtaaaatgtataataaggaataattttgcattgatatatatttggctaaatatgatttttttttttccaaatttttatatgtactaaattatgttctttaaatttttttggccgttaaaaatttctcttaaactattgagatcattagatttttagatttttgtctaatttcatttaattttactatttcagttattgtttatatactaaatcatgcccctctcgaactttaacatgtactaaatcatgtctcctgaactttcattcatattagactttttttttactaaaattggacaaaaatccttaaattcaacaatctcaatagtttagcggaaatttttaacgaccttaaaaggtcaaggggcatgatttgacatatgtcaaatttcgaaaagaaaaaatacctaaatatttttttaatgttgataatggacatatctataactataatacattatcatataattagtccaatatgtacacaaatattaatagcagttgaaagataaaagctaatcaagtagctagctagcatgcagcttcgtcaacatatattaatacaaatgtttgtttaatttttctttataagtcattattatatatatatatatatattaattaaagacattgcttaagccttaagctagcgcgttagaacagaaacatgccaatatttctattttattcactttttaaattttggaattcttgtggtttttcatatagttgattgtttgagtatctagaattatttggtatcttataaatacttatcattacttcaattataacttaatatgtcaaatatattttaatttaataaagtttttacaggaaattaattaaggccaaaattcaaagctcaagcaaatactttattaatattatcttcacgagaaaaaggcgtaaaagtgcatttctttttgggtaaattaaataagaaaggatattagtggtgcttagaattttcctatatgttaatattgttattggtccaactatatatcgagtcccatatagtttaatataataacttttagtgagtatcgctaaccaatcgcaacacgacatgtctaaaaaatacaaggtactgatacctaataacaattaatgttcataattaagcaaatgtatttcatcatatagctatttatatcaaatagcccctctttacaatccttacaaaccagacatttcaaaataattggtggaaccattgtctatatatcctattttctttatctcttaaagagtgaattttaatacttacaagttacgaggcctgtttaacaaatttaaaaaactctttgcagttacaacatcactatcccataatgctttgtttcggcttctccaaatcatatacacaaaaacatacattaaaaataagtatgtaaatatgcattaattttcttacaacctattttacataattaaaaatatcatatacatctatacataatatatatataatttggatgtgcaaatatttacgtcatataatatacatattattagcggtttattttatatttattttcttgaagaaatatattagtggttcttatgcatatataaatattaattgtagagattcttcacaccaaaataacaacaacatataatatatatatataagtagtacagtatatatatatatatcatcacaaaattacagatattgatcaatattcatatattcatcaaaggataatatataattataattaattaattaattaattatgaggtcatcatttggtgaaactcattaaaatcaaggacaccatttccatcagtatcaaagactcgaatcatagccgcacaatcatcaaatgtcttggaatgatcgcctaaacgagccaacatcctctgcaagctctttggggtaatacaacctttttccaactcaaacatctcaaaagcattcttcaaatcatcattaatatttataatactattattactactatgatcaatatcatcatctctcttgatcatctttaagaagtcttgatagtcaatcaaatcatcaccgtccgtatcaaaatctttgatcacagcctttgcttcttcaatagacatgtactcacctattgatccaaaatacgatctcagctctagggcagatatttttccatctccattgctatcaaaatgaccaaaaactagtctcaactcttcttctttctttttcttcttatcatcatatgatctaattatgttatgatcacgtgcagggcacgtgagaggtgaacatacagcatttggcgaagctgctgacgtggaagatgatgatattgacaaagatgatgatgaacggctacgattgatcaagcttagtttattgagacccttgttggaaaaccatcttttggatttcgaaaccaactgtttggcacttgtagtcatagttt

SEQ ID NO: 25959 - DNA, 2927 bp, Cannabis sativa
  modified_base (2698)..(2698): a, c, t, g, unknown or other
gttcacatgaaagacttaagacttttgttgggccaacatcttggattccactgcttgggccaattccataactttctcaagccaacttgggccaaaaacttttactttgtgccctatatctggattgagcccattagtaaaagtagaatctattattttctctgagattccatctaacaatgaggcaaggagttcaaatttcttacgatattcacggactaatccttcctttttgagagcaagaaactcacaatacatgaaccgtagtggttagaatctctgaatcagttgaatcttgagatcctcccaagtcataaatgacctacgatgatgctctcattggaaccgatcaaagcttccccatctaaactaattacaacagtttttagacatttttcatcttttagccttaacaaccaaccatttgggtttttgcaatcaaacgaagagagtttgattcgatgaggtttgatgtcccaacgaggggctgtttgggtatgtcaaatcccattgtggttgctgtgtgaatccccaacatgcatgggcagtcccccaaacaatactagtcgcctagtcattaatatgcgtgcactattatctgttgccattatttttccagtcgccaatgtctttttctttcttctccccttggcgcttttcgtcactcttcttggcttcgtaataaatcatcaaactgttgcccgggtttcatattcctagttccaatgaagacaatttttttaattcttctatcacaatacccaaatcttcttggaccacatccactaagccttcaattgcttccattctactcgccattcgagtcatacccctatctcaatcgttgctcagataccaaatgatacaccacaataagaagatacaaaaatagaagaaaatagagtaatctttattgataattctagaaaattcgagagtcccaatttctcttccaagagccaaagctcattacacatcagaataagcaacccttaactttcaatctcctacaatatattcttcaatacattccatataaaaaagatatgaaattataatttaactaatttcaaaacaagtcatataaatccatatacatcctcccttatcctactgcctacacttagcataggtgcatctaatttgaggtctatcaataagaaaccgaccaaaacataacaatagacacaacaacaacttgcacctatttatttaaaacttgaaaataaaaaatttcagttccactatataataatgtatgaataactactactgtatgattcttaccgttacttgttacttgttttttttttttttttgttgttgtttgaaatagttttcattgagtttgtttacaaataaatgaaggtaattttatgtatatgtttttatttttctagctacattttattttaaaagtttctagtaaccaactttactgtttaatatggcttatttactttcgtttgtaattcttaatctttaaagggtactttataattgtgatgtttaagtattatttatttataatttattaagaaaattaaatgatattgaaaacagcaagtgttatgatttgctactttgaattccctatttaaaaataaagcattgctactaggtactgagattattatgaaatgatattttataaatagttaacaatttttttataattattattataataaaataaatgagatctgatattaaagtacactaataaaatactaagcatcatgggtgcagtgccaattatcatttctcttgaaaataatataactagaaacaacattgaagatttaattccaaagtcctatatttaatatctaccacttaaaaaataatacaaataaatgatactaacaaaaaaattctacgtttgatattatagatttattggagcctacccatatattttgctcagagaagatgacagttttcctttttgaaggttttttcttttcttattttttaaaatgtattttttgtttgaatagattttaaaattatcagttttgcaataatgagttgagtcatgatttttttccttttttaattatataaggaaattagagatctttgtttgtttaattttttttttctcagaaaaacttagcctaaatctaaaaaaaaagatgtgattaaatcaacaatactataggttcaataagagaagaataaccaaactaccacaccatcatttataccaaaagttaaggaagctctgttaaggagttaccaaccccgttaactaaaccagaacaatggttacaaaatattttaataaaatttatatttatacataaatataaaagaaagcacaaaagtagtctaggtggcctcctagattttttttattgtatttttaaaattttgtgatatattcctaatttgtttagaaaaaaactcctacacataccaacattaagttccacgtaattttgaaacacttatggcatgtttaataaacttgtaattagaattagaataatcaatggaagaaataaattaatttcaaaatttaaaataattattactaaattattcgaaaagaaaactagaattataatattttatttatataactagaaaatgtaactggaatgctttaatttgacaaaattacattgttagaacaagcaattattttttgtttatgaatttttgaaggacatatttgtcttttttatttttnattaataaaattaaaattaaataaaataagttaagaaagagaagaaaggtaatccatataaaaattaggggaaatttttgttctttattttctccgtaatttgtgtaccccactacttttttcatttctaaaatttagtaaacaattatatgtaaatcaataccatacaattgattcttattctctttaagtaaacatgccattagggaatgagaatgtcaaactaaat

SEQ ID NO: 25960 - DNA, 1122 bp, Cannabis sativa
ctagaagagacagtattcatgactcagccgcctgggtttgaagaccctattcaccctcattatgtgtgtaaattacacaaagctatctatgggttgaagcaagctccccgagcttggaatgataagctcaaggatactttattcaccaggggctttcactcctctaaatctgatctgtctctgttcatacatggccaaggaagctctctaatcattttgttggtgtatgttgatgacatactagtgactggccccaatccgaagctcatctgtgagttaatctcttctttaaacactgaattttctctaaaggatctgggaagtcttcattactttcttggggttgaggttctaaggaatcacactggtttttacctttctcagtctaaatatatctcggatcttctcaccaaactcaatttagaaggagtgaaaccgagtccaagtcccacttcatctgctcatcagttgtctcttcaaattggtgaacccttttcagatcataccttgtatagaagcaccttgggagcattacaatacctcacactcactaggcccgatgttgcctttatagtcaacaaactgagtcaatttatccatgcccctacctcggttcattgggatgcttgtaaacgtttattcaggtacttgaagggtacaattcatgaaggattacatcttcgaccgagtctgcacatgagtttacaagcatactctgacgcggattgggcgagttgccctgatgacagaaagtccacggggggctatgcagtatttctaggaggcaatctcatctcttggtcggccaaaaagcaagctgtggtggccaggagcagcactgaaagtgagttccgctcattagctaatacagctgctgagattcgttggctcacttctttactctctgaactcaacatgtcacagcccactccaccaataatatgggttgacaatcagggggctgcctctcttgcagccaaccctgtttttcacgctcggtctaagcacattgaaatcgatcttcactttgttcgagatcagatcattgccaaagaactcgaagtccgatatgtgccgtctctagaccaaactgctgatattcttacaaaacctttaagcaaa

SEQ ID NO: 25961 - DNA, 2647 bp, Cannabis sativa
aaaaaaaaaaaaaaaaagcatgtaatatattagtggatgaaatctaaaatattatgtatttatgctgtaaatattgctctatgtgaataagatttgacacactcatagtgacgagagtaatagaaatataacttaattaaggtcggaaaaaaaaacatgtggcatataagtgtatgaaaccgaaaatataagtgtagttatgctacaaatatccttaatatatataattaggggtgttcataaaatagagaatccaatctatgttgtattatccaatctaatctaattcgcaaagtaaagatatatgcacttatacagattgaattggattgtaaaatctaaaattcgctattgtacaagttagatgttgattgacatgtaaaaatcatcaaccaaatccaatccacacatatttatataaatttttaaaaaattatatatataactactattttatataagaatatataataatttaaaaatttaacaaatataatacaaatatatttcaaacttaaccgatattaaatatatatttcaatattatatgtaatttatttatttttacatacaaaattaaacatttatttgatactcaattattttgttcctttgaatttatttttttatttattttaatttgttgttagagacataaaataataataatttattttattctgttgttaaagttatgtgatttttttttttttttgataaatattaaataacttaatattgaaaagtatttaccgagattttcaaaaaccgataaactataataaagcttaaacaaataaattatagacaaagaataaccagagtctttacgtggttggggcgttacagagtcttaattcacgagtcaatattattacgataaagctagaaaaattttatgaatttacacaagtgttttgtcaagtgtttgaaccctaagatttacccgtgcaatcaaggaatgtgattctaactctttgtatggggagattttcttgtatttatagttttaggtttctaatatgtacacatttcccattgatggggtaaatacaaataatacattgacttcaagctcatttggtgaagcccgacttatgaggcattgagcttctgctgacgtggatgccatattatgttgatatttatcaaattgtatcctacttttgtagataataaagacacataaatacttgattggcaattgctttattttcttattcggaagatatgaattttggacatgatcctggaaataaagtcctaatattgtgggattcggcataaattattgtgatacgaagatggatatctagacacccattaatcactcatctgaaagatatgcctgatgccatccagagattcactgtgtcggagatgaatcttatttagacgagtcatctgtccaacatccgagagacttgacttcactaatggatccagtccattatcttagttaggcctgggattgggcctagagcaactgagctgaaaccgtcttgaaattacatgtgtcctccatccggaaatacaaataacagaatgtaactaattcaaaataattgatccaatctacacttttacgaattagatttgagttattgtgcatattagattagatccagaatatgaaattcgcacttagtgcaaatcagttgcacaatgagcaaaaaagtgataattagattagatgaacactcctatatattagtacaagcttacttatttaagttaggtgttgttgatgcaagtggacgaaatttgtcttatatttttaaaaattttacataatacacttaaaattagatcttttcttttttattacatttttacagatttcattttctacaagtttttcacttatttttttttagggaaaaacgttattttcgcattacttccccgtagtagcaacataaacataatatagttttgaaaaataacacttcctatttttcttaaaaaaaattaataaaatataaaaagtactgtagatctataaaaaaatatatttttttttattattgttagatattcatgaaataattcccaaaaaattgttcaaagtctttaattttgttaattgttgagacttcacagataaaacttacctttttataagaatgttttcttctagtgctaaattttcatatatttcataaagttttgttactaatttatttctattcatgtaatttataaacattatttcaactacaaattttaaaattttaatatctagctttatagagcatcttcgcggataatcgataaaatgaggtttattgtatggaaaagatctctcttcctttcctatgaccttttcaaaccactaaagtggtcctaaaaaaattgccatatatatatttatatatttttgaaagaatacatattattatttattattgattcaaatataaaatataactcatctaatacaaaatattttttaataatatattaaaaagtattataaatttaacacataataaatgtttgagctaaatttaaaaaaatatttaatgcgaattcacatcactataaatgtactatttttttttatttattttatgttatttttattatttttctagtatatttagatataatattaaaattatgaattatgtattttttttttttt

SEQ ID NO: 25962 - DNA, 1934 bp, Cannabis sativa
gtggaatcgagctatcatctaaggagcagctcaatggggatgtagcctgggttttttaggtgaacctcaggaaaaatttggtgttttctattcccctagtttactcttttattgtattgtttgtgtgtttggtcttcagatcgatctagatctagttttgttcatctgtttgatttgtgtttctagagtgatttggataatagcttcgagtttcttcgaagaagaatttctttgctagggtttatggtagctcaaatcaaagaccaacaaattggtcgagaaggtttctttgaatagggtattgttttagaggatacaaagtcgttttgactcgttgactcttaaaaatcaaaagaaataaaaggttggtcttgactttggtaaaactgatattataaattgttggtgtagggaaaaattggtatttcaaatccctacaccaactaattgtaaagtgatacttccaaaaatgctaggcaccactaatactcaataacaatagtactcatttatatactaaatagttttctccacaaagttagtttttgtgtcttaaattttacataagaatttaacaaatattatattttgcataatattatcccaatacataaaacaaatataatataaaaatgaaaatatcatgatggttagtaaattatatatttaaatcataattaatgataatattgtaatcgaaaatgtgtatattaaaacttatattaacaattaataataaaattgtaattatttatttttttaaaaaaaaaaaaatcatgtggcatagatatctttctcattttttcagtagcttagctaatctcagagactacatgccagttataagagctttatacttcaattttctcttaattaagtcatcgatatgtaccttgagggttctcatcccattaagtatgatcttgccacaacaagttaatctcttaaaaggctaaacataattcttctcataagtagttgtagtgggattcgaacttttgaccaagcaagaaaatatatcaatgaaggcattcctaccagtgcactatacaatacgtcgttaaaactttgcatttgttgttatataaaatttagcacaaacttcaacatatgctaaatttgatacatcatttaacacatcattaaaaaataaatttcttaaaaagtactataatataacattatatcactatttaagaagtgttttattagaaatgtttagaaatctttgtgactaattgcaattgcaaaaagtaaagatgacttttacttttaattttcttgggaaatatatatttattgtttttttttatatatatatatatatatatttgtaattattttaaattatggggctctaattaagttgagtgtgtgagagattaacaattaaagacaatgatagatgttttgttaggtgtgtatatgtcattttgatatatctatataagaagtcatttctagaatgttctatatttatccaaaaaaaaaaaatgtatttcgaactcaagattaagttgaaagttatgtttaagcacttcctttcaaaaaaaaaaataataaataaacaaaaaaaattactaatcactaatgtgaattatatatattatatagagaaaaaaattaaagaggatagtttagtcatttgactagataaaaataaaaatgtaccaaaatttatgaagattatgaacttattatgatcaaaattaatggtggttcttctaataaaaactagaaacaaattgagaaaggaacatgccaaaattttattgtatatttaagagagttaaaaggatggtacaatatttcttaaaaattgtacttaattttgatcagaagttatttttattttttttttataattatctacgttataattatttaaaaatttttgtaaaattttgaaatattaagttactgttatatatagt

SEQ ID NO: 25963 - DNA, 6132 bp, Cannabis sativa
aaaacaagtttttcaaaagtgttgttacgtattgtgcagtaattatctttattattattttggatttgaatgtgtttttattttgagtttttgtttaaatgtgattttgtaggagcactccttctcaaaagtactcacctttggattggttgagctattttgatgaagaagaggatataagtattccggaatctgatgatgtgagtttggatttctgagttctgatccatcagaggttttttctttttttctttttttttttttaaaattttgttctaatgggtttatcattttaggtatttcatgtgtataaggcaggaaaagaaggtccagttgttctttgtctacatggaggtggttatactgggtatgtttgataataattgttgtcactctcactattaatgtttgctgttattagtgttataaatatgtaggaaaattctacagttaggggtgcactatcgatgcacttatatctatttggatatttttggagaattttgtagttcaattcttttttagtccattgtaattatttaagacatcctataaaattttgaaggcgaaaacatagttcaaaaaatttattgtatgcgtgatttcttttttgtttgaatatttctttttatattgtaaattatttcgaatttcttgaaattgtacaggatgtcttaaattactataacttacaaaccaaaaattagactatttttttttctttttctaaatgctgaatagataggggtatattgtatatatatttatgtattgcaaaatattgttttcatctgatcatgaagacgacaaaaaaaaaaattgcctcactaaaatacgtttatattgcttgttttttctattcccttaactaattttgtgtaactgttatgtatgttggatgtcataatgtttcaagtgctcttttgactgtgttgaattacatataaaaaaatattttgccaggctttccttttcattgtcagcaagtcttatgaaagagaaagctcgggtagtggcaatggacctgcgaggacatggaaaatcaattgcagaaaatgaactcgacctttccatcgaggtaaaactttgttcctaagttgctttccaatttttaccccattagctatttgatctccaaaatgtgtcattagttcaattcataaaaagcattgattagaagttgtgtattgcagacaatgtgcaatgatgttgtggctgttgtaaaagcaatgtatggcgattcccctccagccatcgtgcttgtcggccacaggttattataattagctctccaaccaacccatctcacaaacaaaacagctctcatatttcttataattcttctagatgtctcagctattattgtttagattttggatgacatacatgcacaaaattatgaagcaatattcaacatctattagcttgctttttcctttttcttccaaacactaatttccctcaattatcacaccttattgttttgagtttatgtttctggcacacagcatgggaggctcagttgctgtacatgtagccgcaagtaaagctatctctaccttggctggattgattgttattgatgttgtagaggtttaattacataactttttcttgtatttcattctggtcactgttttcttattatgtaatcaacaactgagtctgatagtaacaatgacttcagggaacagctttggcatcattgattcatatgcagaaaatcctatctagccgggtgcaacatttttcaagcattgaaaaagcggtctgtactgtctcttaccatctcaaatgatatttatatatgtcacttttggttttttctaaattgacctgaagcgctagtttgtattataagtgaaactggaaatgagatcagccatgataaaattaacaagaaagaaactcaataatttagatgcgtttctcttaggaaatcatggtggttggttgattcatatggtttttactgaattagttcgtcgtatatggaatcttataaagaaaacaaaacaacgtttctgctcttggacatattttacactttaatgcctattgtggaacacatttgctggccctggattctattaaataggtgaactagtaaatgagttggttaatcctgcaacatctgaatgtccttatttgcaggacgtaatgattctgctatatgcctataagcctttaaaccttttctcgaacatcttttagcctttgacacattaaaaataatatttaagataaattttcatttaatgttgatcttatatgatctttcttgttttgcacatcggcaagattgatttgcttcctttaatatctttatcaaaattctgaatgatgtcgtactttagttttgatctaatatacttcttcaattcttttcattgtttgtgatgcgtgatctatgtagtacttttcctttattacgataaatcttcgctcttcaaagattaaaatcatgcctaccaaataaggatagaaatgctagtctcaagttgattttgcagttcttgagtatcattttgtttatttatttattattcaatttataattttttgcctgctggcagtgaaatgcctttttttttaatcctcaagaacatcacaagtctaatctttgtagattgaatggagtgtcaaagggggctctttgagaaacattgagtctgctcgcgtgtcaatcccccccactttaaagtatgatgactctaagaaatggtatggaccccaggctagaactcttctcttttatttccttaccatgtataatgaatgatatgtaaccgtctgcctctctcgaaccatttattgtcttttcgttttttggtttatgttttttttattcttctatggtcataaatccctttcattttgtgggcagttatgtacacagagcgcaactggtagaaacagaaaaatattggagaggctggtatgtcattgagattttgcattatttcagcattccattcattactgacagatagttttgtattgtaacttgaatttaaacaatgatacacatacctttacatatatttaacacgggagtggggggctttcatggttgcttagagtgttcctatctttcttttcttttttcatatcgaggacattattaatcacaaataattgatcatttaaagaaactgagatcttgtttcacaggtatgaaggcctttcagaaaaattcctgtcatctcctgttccaaagttgttgcttttagccggcacagatcgactagacaggtatcttttatttccattgagtttgttaagagttgttttcttgtttccttgcatattagcatggtttggtatgaagtcagattccatattttatacactccagctattaaaatagaaaataaagttgagaatggaacttggtttgactgtggatagcatccacacaaaaattgagcagagacagcagaggagttgagtttttatcctcctttcacacattttctaggaagtgtgatttaaggctgtgatgtaatcagtacttgaaagtggagttaattgtgtgatagaaagagcaaggatgaagataggataggttgagactttctaacaaggttgaaagtttcggtgtcgaactctattgttgggttttcacagggtgatgagactcgtactgcccctactccctagggtcccttaaaaggtgtttggctacccaaaagtatcaaactcttatctctgtaagggaagtcgcattgagaatgtagcaatgtttagatatattttccagaaactctagaatcctttccatttccaataaaagtttcgaaacagccaaatataatctttccctcgttaaataaataataaataactagactgaataatcagttattagaatgagagcatgttatatcattgttcttggaattggatgtaattaggtaacgagtttcttatgttccttttccatttattatttgtcagtccttccaaacatcatttctaatttactattaaaatttattggtatgcaaatcatttcaattgtatgctatcatcgaccttatttatttatttatttaactgttaaaacagagctcttacaattggtcaaatgcaaggaaaatttcaaatggtggttgttaaacatactgggcatgctatacaggtatatatatatatatatatatatcaattatgttgacagtttggcaaatagtttgagttttgtgtacttcatcattctttatttcttttgaaaataacaataaaaatttaataaaccatatttgacttgtcaaaatttcacaggaagatgtacctgacgaatttgctaatttagtacttaattttatttctcgtaaccggattggcccgcgtggagttgaggtcagtgtctctatattttgttctcattttaaatggattgttgccttattttcacaataaattataagtaaatcactaggcaactcccagattaggacaactatcactattcacttaaaattcaaataaccaaaactttgacaatctgttataagataatactcttttgttttatgttttgtactgttctcattctcattctcattcatctatggttacactcatttttgttcttgctttgtgaaacatttcacatcttgaaacaaagtaaagatcataacataactaagactatattcttagtgaagttgagatagtgagctgctttacttatgagagattgtttttgagcaagtgggtgacattttttcgttttaattttcaaaaaaattgcagataccaggacttcgtaggccatttcaatctcaacctttgaagtagaaagcaaaaagagaagataataacaatactatcatttggtagtattttccattttggcccttagtttaatatgtaatcaagattgttatacatgtacatgacatcaaagtgttttgtttttacatattgtatattttgaatttagaaactttactctcaacactccaactttgcattaggtcacataagcaacaaaaaaagaaaaaaaaacattttgaattgaaataaatatgttcaaatatttattttaaagaaaagaaatgaatacccaaaaaaaaaaaaaacagtatgtttccatattttttaggcatgggaagggaaatttggaacaaagaggtatggtcaggctatttatgattttaagttatttcaattttcctatcatatggttttatgatctaaattatgggagtcacttgaattagttatggattggatgatgtggctgcaatgcaaattgtgatgcatgatgcacatttttctcacgaggatgggttcctgtggagaacggagtggaagcggggcacttttgttgtcccgtcgcgttagtaatttttatgattttttatgaagaactgttggcaaggcaacaacagatcaaggaagaattatttttacaaaatcgcatcttcgaaatcagcaacttgaagagggttggtatcagcttgaagtaagatttaaatttctcaaatttaactgtaaattaaaaaaaaaaattgtcaaaatatgtttaaagcaatgaattcaaatataatattaaaaaggttatacgaaaatacctctccaaccgtcaaaggtaacactatagacagatcttcgaaattagggtttctttttttgcatgaccaattgagaatgcaaaagattgaactcgaggagagattgctaagagcatttctaactgcaatttcaatgggagttgctataagtgatgctgtcgaaaaagtaggtctatgtaacccaaaatttttgacttttcaataagtaataaaagtgttgttgcttatactgagtagtgatgcccacatctttttattatttttttcttttgtttatacttcgttagtatataagttttatattaaaaaaaataaaaataagttttaccaacattgggagcgttggaaatgcccaaatatgacaccatttatagttgtcaaaattatacacattatcttaaaatattacattttttattttctctctcattcacataatatttgaaaccctttcttataaaaacaatactttaataattaacaattccagaagttacatcccgcataaatattaaattaattaacgtctttagtaacaagtaatatt

SEQ ID NO: 25964 - DNA, 2915 bp, Cannabis sativa
agaggcattagtaaccttaggaatcaaacacaaaaatgtgtgatttaagttaggacaaatcgattgatcttcaaaaaaaccttgcaccatcttgcagacttcagccccaacaatccgccaatatttacgatagaagatgccagagaaaccatctagtcttggcgatttaagaggatgcatagcaaaaaccacacttctaatttcttcaacggtcgggcacctgctaatactagcattttcctcagccgaaacaccttctgtaaagagggaatcaaaataagcaccaatgacgggattctaagattcatacacttgcataaaattttcatacaccctaattgatttggtgtgtgtattgatgacattactataggaaattacataaagtggatcttatagttatttttaatgctaaactattatttaacgtagatagtaatgacttatatcatgcaaactatgaatttatgattagaatatacctatagagtatgacacagtggaattgactcctctcgttcaatgatctaatctttgtatcctttttattgtaaggtattatcaattactgaacatgaattttcttcaaaacccagacatgagcaccaaaaatattaacagtattcctcaatgatctaggtgttgtaataactaagagggttattttcaacattagatgacataatatatatagagcattagagtgtggccgctcgggtagaaaagagaaagaagatattttcttttcttacaagaaatttaaaaagccattaatgttgtaaaatgctcttccttctcatcctttatataggcaaccattaagcctattatacttacccattttaattaattataagtaagaagataatattagataaattagcctccatagcccaaacccaataaggcttgggctatgaattttgctctccaacttatttaagtccaacaaacttaaagggataagttgataaatatctcttttttgtatccattaatcaaatatacactcatattgtttttttttaattaaaatatacccactttttatagtagattgcctaatataccctcactctctacttaagtctaacatataatttacataacctaaagggtctaatggggacatcatccataaaagtgggtatacctaaaaaaatataaaaatagaggtaaaaattaaaacaaattaaataatttcatattttgttcactcaaaatcttgttaacataaataagacttaataattaatgatatgtattgagtacttaataataattatatactttactataaattctaatatgagatatatagaattttacgtgattttgtagttgaaatctacatactccacaagtcttttttatttataaatttcttggatacaaattatactttggcagaattttctctaaggtataaaattgatcattttatgtgtattgtgattacagatatttataggagtatgatagcaattattttaatcctatctagacaacagttatgaaatatggatattcctcacgttccatttatcttttaaaagatgagaaataaacatgtaattactttaattttaaataagtcactaaatgatgttgctcactaggatttttaatgtgtaatggacgaagtgatctatagcgatatttttctactcgagagacacactgatggggaaatgtatgataggcataattttctcgtaaactacctttgtttagatcaaaaaccttctaaggtgaccactaggctccctgcgatataccttggtctacattataaacctttcaaggtgatcaccaggagcatgtatttcgtaagtcttggcgctcctcggtattcttatctttatcaagtttaagtttaaacatatgatttcttcttctcgctaactgtggtatcatacgagatgacattctcgtgattgcatctatatcactctattacaataaaaaaaaattgcatagatattcgagatcaatctcctatcaaattgacacgtggatccaatcctcaaggaatggatgagctgttaattaatgactctctgagagttaacctcgcttgaaccaaactcgtgggatgatgcggccttgacaaggtctagtcgcatactatgccttccataaaataagataagtaggacaaagagggatttatacaagtcacacatataccgagacatatgcgatgactaagtagccttctcctacgactaagtaaagattgtttctttacttcatgattggttcaaatgacaaagcgtgttcaataactcgatagggactctcgtgtctcttgttgtcgacacacatgagatgtgcgtatatgcgactcagatagaatgcaaatatcctagtatgaggctcattagccctttttaagaatatagaacgcacctaaaacctgcgagcttaggcaagaatatgaattggaaactcgcaccctataggtcgcatacgttgctgcacttattagaacagattaaactgttcttcatttattcttttacgtttattctaatttaatattgttatttattataaaatggttctataaccgatcagttatgtataactaaaaggacacttactttctatataaaggagtgatccaagatgaataaactaagcagaaatcatttgtaaaagtagactaagcatattgtgatctgactgaaccactatacttcccatgtggtcattttattttccagttgttcaattgtcttggcagtttcttttgaatacttgctattctaagtaaagtactcactgtttctctttatttatttactgcttgcatacaatttggtgttgtccaaattccttcgaaaaaaatttggcgccatctgtgggaagttcatttatcgattttggaggaaaatcatcatggctgccaa

SEQ ID NO: 25965 - DNA, 3241 bp, Cannabis sativa
aaatttaaagacttatttttttaaaaaaaaaaaaaagatgaagctcgatttggtcggtttaaaccaaccaaatcatagattaaaattggcagtcggtcggtcggtcgattagagattacatttatataatagttggccggtcggttttcgaattataatcatgaaaactgaaaattaaattttgaaattttcttttgggtaaaaaatcgatcaaaccaaaaatacaaaatttcaatctttcattcacttaactcacaattgccacaattgattcaccaagttctccatatgagtcttaccaatatcataatttcagaatttaattgccgatgttgatgagaattttttcattgaatcataacaagtcattttttgtgcgattttgttttcgcttgaccctctaacgccccctgagcctaatgctaacaagtataatgacacgtacagcaacactgctacaccacctttcacaccactacctatttctggccgcaaatggtctgtgcctgcttgaatcgtcataagcatcaaaacctgcacatatttatatttaaccccaaagtatcatcactactaagttttatcaaattgtgcctcttaaattttagatagagaagcacgggttaatctttattctcaccccattccccattgagacaaaaaattaaagattgaaatatggtaattttgttttcgcttcttgacggcccaacaattacagcttcctgttactcatattgaaaccgatgctctgaaagttactacagttctaaactctacatttatgaatttatctagttttagtaatttaataatagatgttcgttgttttttatccttttcttcggagttattgtttctcatgtaaagagaaatgcaaactatattgcgcatggtctaacaaaatttgccttagaagtggatgaagatatttgtttgttgaatctattagccataccagaaaacaaagaagaaagaagaaaagagagaaaggcagagaaagacagagaaagagagattgaagattgaaaagagaatctcattgatgaatgaatcaatacaagcttatatagacaatacagtagttgtagatgatcacaacaataattggttacaacagaaagaaagagaaataaacaagctgactgtaacagaaaaacagttagtaacaactaactgaaataactgtcatggttaactagtttgtcttgacagcccccctcaaacttagaattgaaagatcctcaattcgaagtttgtctctaaaagaatagaacctcttgcttgagatggctttagtaagaccatcaacaacttgatcaattgcaggaacatgtttaacttgaaccaccttgctttgaatcttttctctgacaaaatataagtccagctctatatgtttggttcttgcatgaagaactgggttagctgtaagaaggatggtacttaaattgtgacaccagatggtaggaactcgtggcaatgacactttcagctccaagaacagactgttcatccaggttagtttagcaacaacacatgccaagcttctatactctgcctctgtacttgatttagataccgtgggttgtttcttgcactgccagctaacaaagtttggaccaagaaagattgcaaaccccgaggtagaccttctgtcatctggatccgcagcccaatctgcatcacagaaggctacaagttccagtgatgaagatgtaggccttctaagatgcaaaccatgtttaatcgtgccacttacatacctcagaagtcttttgacagctacccaatgggactgcaaaggttgatgcatgaattggcattgtgaacatcaagttgctgaactttccaaccacgagctaaggctaaagtaagaacaaccctgatggttatgggtttcaccactggactaaacgtctcagtaaaatcaaatccgggttgttggtgaaaccctttagttactagccttgctttatgtctattgactgatccatcagcatttagtttttctttgtaaaaccacttacaaccaatagctattcttccttctggtagtttgacaagtttccaggtgtggttcctgattagagcaagtatctcatcagccatagctttattccagtgtagactctgtagtgcttcagttaatgtctgaggttcttttgaagctgtataaacctttggtttagtgattccagatttcccccgagtctgcattgggtgagaattaataattctcgagctactggaagcacctggttctgcaataggtactgcaacagactgtgtagtctcaactggaatagagtgcacagatgcaacagctgcattgtcaaaattctgagcaacatctatatcaaccaacacattagatgaagtctgcatattgttagaaactgaaacagtaggaaaatgtgaagagtcaatagaagcaggttggtcagacacacttggagacactgaatttggtaaaggaaatgaggcagaaggagagttgagtgagtctgtaggagtgacaacagatgcatcattgtgagaaatagatggtataatgccagaggtgaaaaattcaggagaataattgattgatgtagcagtagcagtagttgtttgattaaagggaaaagaattttcatcaaagataacatccctagatatatacattctaccacttgaatctagacatttataccctttgtgatttaggctataacctaagaaagtacaaggtgcagatctatactccattttatgtttgttataaggtcttatgttgggaaaacaagcacacccaaaagttctaagagattggtaatcaggtttttggttaaagagaacttctaaaggtgtcttgttatttagaataggagtaggtagcctattatggatatagacagcagctctaaaagcttcatcccaaaacttaagaggcatagatgcttgagcaagcaaggttaagccattttccacaacatgcctgtgttttctctcagctaatccgttctgttcatgtgttgttggacaagggtgtctgtgtaacactccaaggttatttaagaatggtgtaaagcttctatactcccctccccaatcagtttgtaaaacctttaatttggtgcctaactgtaattcactttcagctttaaaactttgaaatactttaaaggcatcagatttatttttcaaaaggtataaccaagtgaatctcgagtacacatccatgaaatgaatgtagtac

SEQ ID NO: 25966 - DNA, 887 bp, Cannabis sativa
attcacaagtgccttttggaagaatttgtttgagttaattggtacttcacttcatatgagctcttcttatcatcctcaaacggatggccaaagtgaagtcacaaatcgatacttggagcaatatttacgggctttttcagcggacaatccaaagcagtgggcaaactttttattatgggcggaatatcattataatactagccaccactcagtcatcgggatgacaccatttcaagccgtttatggacgaattccgccaacaattccagcctacactcgtggggccactacaatacaagcagttgaagatgatttgcttactcgagatgacattctacagcacttgaagactcatttgcagcaagccaggaatacaatgcagcagcaagctgataaaaagcagagagacattgagtttcaattaggcgatttggtcctcgttaagttgcagccatacagacagaccacggtggctaagcgattgaatgccaagctgtgtcgacgcttctttggaccatttgccgtctcggccaggataggacaagttgcctataagctggctcttcctccaggcagccgcattcatcccacgtttcatgtatcgttgttaaaaccatatcatggaaacactctagcagcatgttatcctttacccgagctcacggtggccaacaaaccggtaatgttgcctagtgcgatcttggcgacaagaatcattcaaagtcgcaccggtccgctcaaacaagttttagtccaatggactatgagtcctctagaagacgctacatgggagaatttcgattcgttttgcaatatttatgggctgcacaaccttgaggataaggttatttttgaggaggggagtattgttagagaagtggactcgg

SEQ ID NO: 25967 - DNA, 2191 bp, Cannabis sativa
  modified_base (1370)..(1374): a, c, t, g, unknown or other
atctcaatagttcgagaggaatttgtaacgacccaaaaagttcaggggggtcaaagttcggagggaaaaattactaattagccttaattttattgaacactctttatttggtggcatttgaaattctcatctcattcatgttcagtccaaattagtgaaaagtcagaccgttcaactgattggtgtttttgcttgaatgcgttgaagttcttcaacaaaaagtagcaagcaaaagagttatatttgagccacaatcaaactcaactggttggtatgattgtagcatttagactttggattctattatgttatagttgactattatataatgtaactgtaggaaagttacttgtttaccctacaccaacaaaaatacattatcagtttcttaaggtcaatcttgacctttcctttgtctaaatgatttaagactttaaacggcagcaattagtcaatacgactactcagcttgtgtcgtttgtatctaagactaagagatcttccaagaaaagtctcaaagccctaaatcaccaaacacaacacacacaacactgagatcagagaaactcgaaaccctagcagagcaagtttaaccctaagatgtttacccacacacacagagattagtaaaatgagaaacaaaatgagaaaatgagagaaaataccagaaattatttcagagttcaccccaaaaataagggctacatctctgtagctcatgtcagaaatttggcttgagatccattatcaacaatggtgattacagcttgtggagcttcctgtcacaagtttcgatcaggtaagactcaatctctttacttttatagtttttttttcttctcttttcaaccactagatttaactttgttttctttctttgtgcatgtactctcttctccttcgaatctcctcaccacaagagtttcactctttttatggaccttttctctctggatcttggagctgaaggttcaaccagagttattacttctctttttttctgttcgtatttttcttctgacttgtagctatgatagggtaatgcaagtagttgatcaagcaggaagttagttacaaaacagttataattaatttttggttttttgtagaggcaaaaccacctaagttgaatcttgttttcagttatttatgttgtatgcttatgtggatattttgtataagaattggtcataagtgaaatttattcaacactaaccttgcttaattatagttaatttatagccttcttaaaatgaatatttcatttcagaaaaataaaataaaataaccttgactttcttggtatataattattgatactgtttgtaataattttatactttttctcataattagcagttatttgtgcnnnnntaatttttttttttttttgagagaattatttgagtagttttgttggtgaaagtggaatggaacatactgtagtaggccagctttctataaataaataaatatataatttattgaaaaaataattccaacacaaaatttttagcttaattatttgcagtgaaaaagacaagataaggcagctaactaaagggtcccaaagtaatgaataccggaaagaatccgaccatggtggccaaactcaaaaacaagtaatatgcaaatctattaggcaatcaagatgggtttcatttattaattgaaggaatatatctcacttcctatccaatactcctttaatataatatgttgtttactttaatttcttgctaaaatcgaccaagttagtacccatcaatttaaatcacactaaaaccaaaaaaaaaaaagagtaacgaagcgcataatatacaaaattagaatatccgaaggaagagccaaggaaaacgtccgaatcaaatcgaccgaataataccaaacgagatcatattgtattgtttttttgaataataataaataatgttttgatatatagcctataaaaatatatatacataatttcaatattttcttaagtgtttaaaaaatacaagtaaatatcattttatttaaaataatcgaattaaattttagcgaaatattagtttggctaattgattttcaacttgaataatatatatttttaaaatataattgaaaactaatgttatatattttcaaatatttctatcatatagagagaaaagatatattgttttcaaaattttataagagatttagt

SEQ ID NO: 25968 - DNA, 2468 bp, Cannabis sativa
cgccgatccatctcctgctcggcgaggggttccaggtgcactaagctttgatccgagcatgggacgaactttactctgggattttgttaaggcattcttggttgaattttcaagaactaacataggttgatttccaaaggtagccttttggttttgagaagctgtagatggtatagacaatgatgcaggatctttagtgaacacagcaaaggaagacagatttgtaactaacgcggcttgcacccaataggctgctagttttcgtttttctgatgtgaccttttgtgcttcttctgaagggctttcttcagtatctggggatacaccagcagcttgtatggttttagacaatgaatcaacaattgaccgtgcattgctcaaactagaatggagagtcagaaactgctccactgcaggctgtgggttatcttccttagctgagctaattaactcagagtatatgctgcagtaaccgaaaaaacaaatgtcagaactcacatggcaagcaaaagcttggtccaaagattagttattgtttcttttaccacctcttctctgttaattttcaagacacaaaatatcctttttctctataaacctgtaacggaaactacagaaaaatctaactcctaggacttgactaaggtatccttgaactgtcaaaccagtttaagctgatccctatttactacagcaggaaaacatgaaacaaggtcacttgaccactatccaaaacatgtcttccattgttaacaagctaacataaaacataaacttacacttcctcaattaaaagtcaacacttgtaaatttttgttctctttgctccagcacaataatgaagtttttttagggtgtttatagagacttgaggataaaagaaagcattgatcaacttatgataatgacggaaatcacgattacggtttctagcttgaacaaagcacaattttaaagtatagctaagtcctaatatgagaagaaaaagggagtcttctatgcaagtaaacatctataactttttctatagacatcagtctagttcagctgttcctttcaaaacaccgtcaaacaaaaaatgcaccatctaactacacaatcttatatcctccaaacgtggccactaattagtgttgattgtttggccctggcaatgcaaagtcccgaacagatatgtgacttttatgctctaataactagtataaagtgaccatttctcatgcttcagttacactacaacccctctataaatgtgccctaaaatttctgatcacaatatgcatagtctaagtagctcaggttttgataactaagaaattcaattagaaagtcaagctacagatcagcaagttctcataaagcaatgaacattgacattgattataattcaggaaaactacaatgtcagggttaaactgctacaatcttcaaggctcaagcaaaaattacagtaatgtttaaacaatccctttaaaaccatcaaatccctgataagaaaccatcagcaaaaagcaaaatatcaacccgtctaggtttcgaaatttcccaatcctatactaggtgttttgcctccatgataggaagatccagtgaagtcaccaccatctaatcaatcactaatgtgtaatgactcccagttggggaaaaaaggataatattgcatatcacacaggagaacattctgtggcaaaaaaggaattgataaattataaataaaactttaagaaatctctacggaataaacgacattatgattttcaggtgggtaagagacttaacagcaagggagatatatacctaagaaaattcgaataaaaactagcatgttcatacatgatatattggacaataaggcaaataattagaccagaacagaaattgtatgtcaagtaaaattgtaggcatggcttactctatattgaaagctctcaaaagaagtaagccagatgtggcatccagactccttatacttatagtattaaataaaggtacaactttacttgacaaacaagtatacgggcataaggggtttcatgagtgttacaaactctatttgatgtagacagttagactagaattatcaaactttaatcatttctagtgtcagaaaacttactcagcaccaagaacagtaaggtgtcaacaacctagataagcataaactaacaattctatagtcagacaaataacctaacatgtaggcaaaggtgtcaacaaaccaaatttcaagtcaatatatcattttttagttcttagaggaaaaaaataataaaaatagcataacagggacatggcccatcttataatcatttagatttagttatacctcaggcatcgaagtaggctctctgcagcagaagcttcttgcatagcctctactgctgctgtctgtgcagcatccctttgcttcataacttcctgtaagagcacaagtgtagtcatggaataagagacaagattacataacg

SEQ ID NO: 25969 - DNA, 1693 bp, Cannabis sativa
  modified_base (377)..(379): a, c, t, g, unknown or other
tgcccaacacctcaccttttataggtgatacctagcctagccatgccatattttttaaaaattattttttaagttatttagaaatcaatacttagttacaccaataataatataacaccaaataaaatgttagagaccagtaatactttttaataattctcaatttttttattattttcacttaactatgataaaactagtaatgactaattaaagcccccaagtaggtacagatgatttatgatttcaataagtataaaacaataagttaacagctttaattagtagcccggagcaaatatttacaggccatacattaaagtattacatttacatatgacacaaaacatcgaatctgtgtgtgtatatatatatannnatatatatatatatgtaattatttgatatgggaaggctgtttcatcctcttatacaatattcatacatgcaaagataattactatgattatatataatagatgtacgatactatattctagtcttcctctttttccaattcttttttttctttcttagatgaaacaagaaggaaaaaggatgacgatattacgtttcctctttattgcatatgttagtggtatgctagccttcaaaacagttcgcgctcaatcaggtacacaaaagttagatattttaacatataatgcttcaaaatcacctactaactaaccaacattaatttatttatgtatctatcatgcaatacataaacatcgaagaataatacaaatctagctaccaccccacatcattctttttcaacttctcatttgaatgaatttttatatgttatgatttattacttcacaggctttatcagtatagattgtggaatcacagaaaatatgacttacaccgacaaaacaaccgaattaaattacgtttcagaatcaggtttcatcgaaaacaacataggtgaaagacatactatatcacttgaataccatttcaatactcttgaccaacaattttcaactttaagaagttttcctcaaggagacaaaaattgctacactctaaggcctggagatggaaaagggaacaaatatttgataagggcaaggttcttgtacggaaattatgatggaagaatgacactgccagtcttcgatctctaccttggagctaacaaatggagttctgtaaaatttgataatgcaaacatatcattgacgaaggagatcatacacattccaagttcggattatatatttgtgtgtgtagtaaatacaggccatggcacaccttttatctcggctttggagcttaggcctttgaagaactctacttatacttctgctactgctgctgttttatatcgacgattggatgtagggtccacaagtaatatatcagtaaggtaactattatataattattggtatatatactttactttttgtattactaaaccatttaaaatttgtcatcggaaatagtaataatgtacgtaaaccaacgaaacttttgaccgtgctcattaattattgtatcagcgacattatagattttaactttcaccttggaagggaatttataaaaattatttcataaatacctaaaattgattagaagtttacatttgtgtattttttttttttttgagaaaagcgtttatattatagaaacaaatcagttagacctctcggtcgttacacaaaatattgttagg

SEQ ID NO: 25970 - DNA, 2382 bp, Cannabis sativa
acgatccttttctagttttgatatctctgttcagtttgttaaacgatctgggaaccaagcggctaactggttagctcgttcttctagttcatgtcctgatcgtatttccagtagggagtctgtctggaagctattttgttagctgatttgctttaatgaaaattacaatctttgtttcaaaaaaaaaaaaaattctttttattaattttgagaataccatatttctttttaaataagggtttatattttttttttagagaaattacactatatatcttattttttaacttgatgtctttaatttttattcttatttttttaaaaaaaaaaaatctattatgtttacatttttcaatcattctactaattttactcatatcacttcacgataattttcattttttttttctagttatatttttatttcaactttctcacaaacctacacatccatctataaagattacaaattcattatgtttgaaattatgccttaattatgtgagtgtatggagataattaaagtataatatttatataaaaaaatatttatgaattaaattttatttaaaaataaatttgattaatgtataaaaaaatgagtatttttcaactcctctctttcttactttaagcaaaatttcaatctgtacaagattgaatttatatgtaaattcaaatttaaaattagaatacaatttccaattaatattatatatatacaaattttatatttcataaggagtctcaaatcgaggctacaatcacttcattatattttgatgatgaaagagacgactaaaaagagttggacacaaagcttaaaataataaaatatgtaaataaagtataatattattatggatccaccattggatttactaacataaacctatatatactatcaatttaagtgcatgtgctataaattataatcaagaataatatctattacactttctttttaatgatgtgcttcttgatttgttggtgatttcaaaaaaaaaaaaattgatgtgctagtaagtgatcatattgataatacatgcgttgacctttttgttgtcctttgcaaaccaaaatttatgaaaattaaaatgtttaactacaaaggagactatttttatggatgtgcaatgttaagtaattctacatatttaatttaataattattataaaaaaagtatattgttattaggcattagtaatgcttaatagtggtctctaacattttctcaacatatcgtgtatagaatctgatacttaattgggctaataacaatattgacacatagaagaatgatggacaccattggtgccctttagcatttatctataatgtatttaaatttaaaagccaccaaccaaactatatattaagaaaaacatgttaccttaacaagtcatattaaaaataacaataatatgcaattttatttcctaaaaaaaaaaggaaacaaaattattgtgtcaaatctataaattgcagttacacatgtcatgtctcctcttgagatccagctccagccctacaattatttaagtaggaaaatgactaaaataaataagattataattggaatctaattaatgaattaacaaaaataaatatttggaagtggaagacaatcaaaatctataacttcaattgtggacatactttggactatcatcaatacaaccctcaaaataatacagtgactcttgtataaatactctcttcatcctttaaatttaaaatgatacaatataaatgttggagaaatactaaatgtgcaatttcatattgagttttacttattttactttaataataattataaaatatcgtagagcgctaccttatgataatgttagacacttggtgcctaaattaaatggaatatctgataaattaaatgttcacattagatcgttttattgataaatcatcaaattccaaataaacagtattaattaattaactaacaaaacaaaacatgataaaagaaaactccaattgaatcagctcccgaatctatgtatatatactctcataatcagtttatttgctttaaaaacaaaaaccagttcaccttaaacttcatcattcaacttcatccaaatgtccatataggtctctccagtgagacgatgcttcctccggtgtccggagagtccaaatatgaggtttgtctttctcacgagtttctaaaatctcctgcattcacagaattcagattgtttagttagttactcttaacaattgtacaaagattataataagattaaatgctgacataaaggtctagagtatcatcataacagttgggacaaattatccagaaaccaaaacaaagaatagagaaatgaattgtttaagaaaatcttgcgaaaggggca

SEQ ID NO: 25971 - DNA, 5601 bp, Cannabis sativa
  modified_base (26)..(27): a, c, t, g, unknown or other
ttcataagtattttgggtagcgtgcnnaattatttagggcgttacattaacgtccgtgttcaacagtgcttggtgtctaacgaaggcttttggttcgtggttgacagaggtaaaagggattttattttttttaggtttattttgtttgtttaaaaaatatatatgtatatgtatatattttaattgatgattgttcagaaatttcatgcttttatatgaacttagttttaatttttggttagaactatgaatagtggttgtgatttataagtaaacgtatatctctttttttctttgtaggttgacagaggtagtgggtggcttaggggttcacaaaggccatggatggagtcgtcgtggctcaaagaacgccggtgatgtttaggtgtttaggacgtggatttcttttttcgatttctttagtgctagttgaaaatgttaagtgaatatttttctattttgtttctgtattcaaaaaaaatttctactcattgttaaaaaataaaattgtaggctataaaaattcttttaatggaaaagaaaaattattatttatgattaatgaaaattaattatttggttaattaattgaatatatgttttttttttaaagaaaaaaccctgatatagtggccttttttgtgggtcactatatctacaaaataaattaaaaacaaaaagaaaaaaaagatatagtgatgcctctagcatgttgttgctacttttattgtcggacaatgcctgactttaaaagcttacaatgacgtgcggtgagagattctaaaaggatttagtgacccacactgaagggtcactaaatactgtctttccaatcacccacaatagtgacacgtagtgaagggtcactgaataggtttagagtctcccatgtgggtcactaaagctcgtttttctagtagtgatggagcatgttaaggaggatagttctgattgtgatggaacagtccttgttcccaggaagcagtctgaaattgcaaatggaggggcccacaaaaaggtgagggtggagaccaaggaaaaagtggaacagttggccgctgcgaggaggcaagctaatgagtctcaatcccggaagggatttgatgtctgcgagggtgaaatgcaagtcagggggagcactcaaacaaccaaggataatcaagatctacttctaccacccccaacatccaaaaacattccagccacctccactcagctctctagagagaagacgactttgcctcctcctcctttttttaattttctagttaggcccacgtcaatgctggaggaggtaagagcacatatggaggccatcgatcaattttacttgaagaggcatgttagtgagtatgatgagacgggagaattggccagcaacatttctaccagatgtaatgttgagtttgctgattacgacaagtgggatgaacctgttccaaacattattaatagagcagagatgacagagagacttcatcctagagttgggatagatttggctccattcctatctgatttgttggaccaaagagctactgccaattgtaagcttagggttgataggtttgcaatgatggcaagtggggaccccatctacatggtagatactatgaggacccaagccaacactgtaagttaacttttatttaaattttctaaggcaaaaaatgtgcccatttgatttgtctggttcattcacaattccttttacaaattaacctgatggtggagagacaatgttgtccgagctctagctgaagctaattccaaaatggagtccatcatcaaggaacgagtaaatgattctcttgacaaggatatgtctcacgagaagaaggggaccaagactgagagagatcatggagacaaatataaggaggaatatactcaacctttctcttggattagttacttggaggcagatttgaagcaagctaagctgaacctcaaagagtctgaacaaaagcacacccttctatcttaagaatataacaagcaaactcgaatcatggatgacaaaattgtttctgaagccactctaaagagaaaagtgaaacttcagatttgcatcacaaggcagaggaggctaagaaggaggctctcaaaaaggttgacgagactatagctgaattgggctctaccaaacaaactctggctcaagcttgtgaggaatcccagaaaaagactttgaagctggagggctgaattcataaaatggctcaagagaagcagaaccaagatgctaggacatcaaaagcattaaagcaggcttttgtattctctacacaccatctagaagctcaacaactccgtgatggattttttggatattgaagacataaaataactgatggaccaagttctccaactagctgaagtagaagaagccaagaaggtagtgagggcagcgaaggtgattgatcttggaactttccccctaaaaggtgagaacttggaagaccaacctcttctagccgttgagactccttcaatgacatataagatcagaatttgtggattagaagatttctacgaatgtctaaataaagaagagttatgtcacgctatattctttttcttttgatcgagtttttaacttggtagactttttgacaattattttttttaatgaaacaatattatggacatccaaaaaaaatattatgaaatattatatatatggatgtccaaatcatatatttccactttctcattttattcttctatttatctttctcttttctctcttctcttcattttttttatttattctatattattttataacaatattaatattaataaatatttttgtccttttcaacgggacctacgattcaaggctgttctgctctgtctttgctcaatcattacccagaaacccatttactacgatggcgagcctctggcgggccgcaatgggacaatgggaaaatcagcctgaagactacggcggcgtcgagttctggtccgacccggagcggactggctggctaacaaagcaaggcgagtacatcaagacctggcgacgccgctggttcgtgctcaagcaagggaagctcttctggttcaaggaatctaccatcacccgcgcctccaagccacgtggcatcatcccagtggcctcctgtctcaccgtcaaaggagccgaagacgttctcaacaagcaaaacgccttcgagctctctaccaggactgacaccatgtacttcatcgccgattctgagaaggagaaggaggactggatcaattccatcggacgatctatagttcagcactcgcgatcagtcactgattctgaagtcgttgattacgataacaagaaatgaatctccatttccgtaaaaggaaatagttgaaaatctgcaccgacgaagcaataggtgagtgagtcgaagctctgatcgtttctgattgtctacgtgcgtgacttggatggattatgtgtgcatctttctttttgtatatttatctacagatcatgttgtatgttgatttatgtaagaaattattttccctttgttaattatagttttcaatgtgaaaattttgccttcttgatttctcttttggttgtttgttgttagggtttgagttaatacttgtttaaatatgataattaaggctgaattgtgtgtattttgattgtagaggagaaagagcataaatgttatcaaattggaataagatttggggtgaatggagcttggttatggccaatgcttttagaaatagtttttattgattttgatagatcatattcttcctccatggaagattgaaaataatagattttagtttaagagtggagttttattgaaattgaaggaagtttggaatattgttggagtaaatatactcaaatcatgttgtttagtatggttggtttcaatctctatttataatggcttagattcttgggagtttgtattgtcatgaaaatccattgatttcagaatccaaagaggagtaagcaatcaagagtttggttgcttcagatggagtttgagacctaaagcttctagatttccagagaataaaccaaatcatattgatgttttttcaattaaggttgctcccaaaggaatcaatcaccctcttttgtggcttttctttgttcaatcggaagactttccctttgactaaatcaaagaaatcaattataaactaagaaggctgcagcttttttagccaagaaaccttctatgaagaaagaatgtgttgtttccagaaattgatagaatcttttgtcagtgcacttgaaagggcgctcttgttttgatcaaaagatagaaatgattaggtgcatgtccaaacactttctatatttatttatttgattatttcctaaggtcctttagtactaataaaatgaatcatgaccctataagaattggtactaatatgaatccaatgaaaaaggttagaggtcaaaacattcagtcttcttttgacacagtgcgctcatgtttaatcacagaagcttatatggctccaaatgaaagcaagacagtagtagtatttgctaaaatcatggttgattttgttctccttctttcgtgcggaacatctgtttgaggtgatcaacgacacctatgtgatctgcaggcgatttcgacctcaacaattgaaagcaggcaccatatgtatgcaatttcttgagtttctaaattaggccttactttgaaaatgactatgagactatcagtttatgccttcctcttgtcattttctcatctcaaagtgctaatcactacaaaaagtgacactaataaattttaaatattggatttcagctaactaattagagattgctatatcagtgtactattgatcaccttatgccaaaataacagtacttttattttatgcaaaatatagaaactaacaaagctgtacttggaggtttgctcaggttgtgttttttttttgtttttttttttatatatatatgcaatcaaagtatattttcgtcctaatatttattaggataaattatttttttctcaaattatgactagttgagttttgttctattttgaaacaaatagtatggttaagagcagtgccggcacaaggggtgggcaccttgaaccaaaagccccattttttttttaattaaaatttataatattagtttaaaaataatgttaattttgaagaaaaacgcataaaattgttcatgtaatttaaaaaataaaacttctcaatgactactataacattatagatttaaaatgtcagtgagttcttgtcccaaaaaaaaaagttggtaagttcattaatgtcaatacatatattaaatttcattcaaaatgtgcttattagacaaataaaagattaaaaaaaatatggagtatgtttatcacttgtgctagtagttcaattctatatttttcttttgaatttgtagtagtaatttattttttttggtcaacaagaaaaatctttcattaatcaaccaataactttataacgaatctaaacaaccaacaacatccactgtaggaattttacttggtgaattccaagtttaacctacaccactcaagaacacagttaaaacgacaaggacaaaattgtcctttcaatcaatta

SEQ ID NO: 25972 - DNA, 5740 bp, Cannabis sativa
  modified_base (28)..(55): a, c, t, g, unknown or other
aaaatttaaaaaaaagaaaaaaaaaaannnnnnnnnnnnnnnnnnnnnnnnnnnntaaaaataaaaaaactcctttattatatttatattttagtattataagtctttgctccactttatataaggttgtttctaaagttttggccaatagattgaagattgtcttgcatgatatcatttccccgaatcaaagtgatttcatccaaagtagagtcattttttataacatttttattggcaatgagcttgttaatgccatcaaccatagaaaatctggcaaagttggttgggatgcaattaagttagacatggaaaaggcttttgaccgtgtggaacgatgttttgttgaggctattatgcatcgttttaattttcctgcaaaatttatttctcttgttcttagttgtatttccactcttcatttagattacttagcaatggtgttttatctgatttctttatgtctagtaggggtattaggcaaggggatcccctttacaattatattttttgcttgtctctaaaggattgtttgcagccattagatatcaggagtcgattcacaattgtcaaggtatttctatctgtcgtttggcccctactatttgtcatcacctctttgttgatgatagtttactctttttaacaacgtctgctcattcatgcttagccattaaacatgctcttgagctttactacaaagccacaggtaacctagtcaatttttccgagtcttcagtcctcttttctcccaacaccaatcctgctgattctgagttcttctataccagcttgggtcttgaagataaaccttttgttagtaaatatcttggtgtctctcaatattttggtagatctagaaagtctcattttaactatatcattcaaaaggtgagttccagaatgagtagttggaatagtcgtctattttctaaagaagggaaagaggttctccttaaagcagttgtctaagctattccctcttatgttatgtcgtgttttagaatctcagtttctatttataagaaaattgagagtctcaaggctcatgtttggtggggatctatgggaaacaaggggaaaattcattggaaagcttgggataatctttgtcaatcaaagttctcgggtggactggggttttgctctttcattcaccataatcaggctttacttgctaagcaggcttggcatatgcttactatgcctgattctcttgttgctcggttgtttaaagctaaatatttttgccaaaattcttttcttttagcctttaaaggtcattgtgcttcctttacttggcaaagcttgctttgggatcaggatcttctcaagagaggtcttgtttggaaaataggaaatggcaagtctatctccactctgcactcttattggattcttggctagagattcatttcttgtaaaggtaatgttcaacccttggatcccactgtctcatattttattgatatcaatgggtgttggaacaaggatcatttattgaaatttttcgatgatgatcttgtctctgctattcttgttgttcctatcgttgattcttctcttgaggataatcttatttgggagcatcactcctttagctccttaactgttcgttcggcctaccatttagccaaattagctattttttttactgcctcttctaacagtcattccatggtttgttggtggaaagtcctctagaatcttaaaatgcttcagaaaattaaacacttcattcagaaggcttttcaccatgctcttccagctgctcttaacctttttcattggaaaatcttgcctactcctcaatgctccttctgctctagttgcactgaaactgtgtctcatgctttaatagagtgctccagagcttttttttaatggagcgaatctagatttgcgaccttttatttaaatagcatctgtcatgatgttcgagagtttatccttagagggtttgaaaagctgacaaaggatgatcttagaatctttttaggcataatgtgggaaatttggaatagacaaaataacattctatttaataagcacaggactgttatttctttgttgatttttaggtttcgactttactacaagactttgatgatgctcaagatcatgctgcaaatcatctcatggaggtctccctttcttgcaccaatgtagtaggaggtgatttgacccaggttgacaattatgctctcacaccagattgttacaaattaagtgttgatgttgccttggataatagcagaaataaaataggggttggggcagcagtaaggaatcatagaggagaggttgtagtggctttgtcttccccgttggatgggaacttgtctcctcttttggctgaagcgaaagcattggcttgggctctcaaccggtgttcgactgttaagtttcctttgagtgtcattgaaagtgattgtaaagtgctaatcaataaaataaagcatagatggaaagataagtctgctctttcagacttaataagtcaaatagagtcatttctctctaattttcctatagtaactgttcatcatgttcttagacaatttaatgttgttgctcataatttggctagaacaactttaggacttgagagagaggttacttagaataataatgttccaaatttaaatatattgtagcctgtactcatttctcttattattgttacaatatattctgtttcaatatatatatatatatgataagactatgataagagttagtataaatatcccaccaaaaacattttaaaccactgattttacatcagttggtgatataagagtagggtgtagttttgttggatatgtctgttggtatgcaataaaaatttcatatattattataataatatttaatcatataattaaaataatatgatttaatcatattagtggcattacgtctttcccttccaatggaaaaaccaggtctcaccttctattttttcggtctcaatatgtattttcaaccaccaccaagttgagtaatttgcagcataaatacttaagtttaacttttagttgcacttaaatacctaagttaattttttggcggtaaaaataccttctgttaacattttagaattttcgtaggtacctcactgtttaaagccacataatatgccacatgtcaccttataactgaaccacatcattttaaaaaaatcacaatgaacaattcattaaaaaaaattgccaactcacttaaatattggcacgtcagctgtcatatatatcataaattaaagaaaaaaagcatttaaattaaaacaaaaaaaaaagactaaattaaaacaaaaagaattaaaaacaataataaccaatcgtgctaataacaaaaagaattaaagactatcctttttttgctttatgaaggatagtgattggactttcgttaagttcaaatatgaaagaattccacatttttgctttatttgtggcatcataggccatactgataggttttgttcaaaaccttttcttacccctcttgcccagattgttaagccatatggagtttggatgaaagccacaccgaaaagaatgaactttcctgatggatcaaaatggctgcgtaatccttctgcaaatcattccccgacctctgctagtagtgacatttcggtgacagagttgggtcaacgttttcccatctcagcaaacaatcagggcacaatttctggagtaattggagtagcgatttcggggaaggaagatttgataagcaagaataaaggcattgatggaggatcaaatgttgactcagaagcagagggagttatgttttcaaatcataacagctgttatgatattgatcaatcttatagcgggaaagaaattcaaaatgaaggagttattgtccttgatcaaaagaggagacgtgtgggctctaatcctcttattgggcctgattctaatgtggctgatatgttggtggataacattgggcttaagtctaatgggaatgaggcagatcaaggcttgcctgtttcactaacagaagcaagtttgggctttcaaagccacgttgaaagtgtcaataaggcttcctcgtttgtatagaaagaacaagaaaagaaaggtgtttcaaaaaacttgaatcaggcgggccaatttgtgggggctcgcctatcattatgagttgtttaagttggaattgtcatgggcttgggaacccattgactttacaattccttaaagagatgatttctcaaaagcagcccaagtttgtttttctttgtgagactttgtgtgctaaggatcgtattgaaagggtgcaatagagtattaagtttgaaggtgctttctctgttgatgttcaaggaagaagtgggggactagctatgttatggaaagttaaagatgaagctgaagtcattggtttttctacaaaccatatagatatccttactaaagttccgggtatgatggaatggagattaactggtatatatggtgaaccgaaacgcagtcttcgtgcacagacttgggatttacttcgttcattgaagcaagaatcttctctcccgtggtgtctgttgggcgactttaataatgtgatttctcaagctgataaaagaggtggaagaccttacccgtcctggctcgtagaaggctttcaaaaggctatcgaagattgcaatttaattgatatggatctatgcgggtatcagtttacatgggagagaggccgaggtacggattagtgggtggaggttagattggaccgtgggttagcatccatgtcttggttcaatgtttttaattctgcaaaattgtacaacctcgattattcttcatcagatcatagtgctttgtttatggaccaaattactcatgtctcaacaccaggtaaaagagcttttcgatttgagaatgcttggttgttggaacctttatgctttcaattagttaaagatagttgggaagctaaaaatggttgttctgttcaagaaaaagtttcttattgtggagaagttttggccaaatagggggatactattactggggactttaaaggtagaattgctcaatcgaaagctaccttaaaaagacttaagaagcttagagatgctcattcctgctctttatttgctgaagaaaaaaagaatttggctaatatttttcatcagaaagaggtgtattggcgtcaacgatcgaaacaactctgacttaaagatggtgatcgaaacagcaagtacttccatgcttcggccacaacacgtagaaataacaataccatccaaaagttgaaagatgagcaaggtaattggaccgattggaacaatggtttgcaccaggttatattcaactattactcaaacatttttcaagcttctatggtgaattggcaagaggttgttgattgtatttctccatccattactgaagctcataattccacccttatggaaccggttactgtcgaggaagtgaaggcagcccttttcgacatgcagccggacaaagcaccaggacccgatggtatgtcacctgcattttatcaaaaattctggtttgtagttgggggggatgtggttactgtggttcaaaactttttcaactccaattctatacctgtgggattaagtgatactaaccttgttcttattccaaagaagaaaaatcctactgttatgggagatctaagacccatcgctctttgcaatgtcatgtacaagataatttcaaaggtcttggctaatagagtaaaagttttg

SEQ ID NO: 25973 - DNA, 5550 bp, Cannabis sativa
acatatatacatatatataaaaccttcttaatcgggttgatcgggttagttcaagttgattggacaggttggtattattttcaacccacctaatataaatattgggcggtttatattttcgtcgggttatttagtttggattaattgtcaggttatgtcggtttagtttgggcaaattattcaatttaggcagtttataaaaacttatgtacaaccctactctactatgcatctgcttgtattacacaatcaattatgcatttactcgtattacacactcagttatgcatctgctcgtattacacactccgttatgcatctgattataatatacacttcaccatgcatttgctcatatacaacataaactgaccaggtcaaaaaccacttctatatattttagatataaaacagttatttattcttattcaaatgttcaattgtacgtgaaacgtggacatttattagggtttaggccttgaaaagcctgaaaaaatatttcaatttataaataagagttgaacattttcatatattcaatgcttgaatgttaaattattaatttaatattaaatcattatatataagtatcaaaaaatttcttattcatatatgaggttgtgacttgtattatataaagaattaagatcacttgccacaaatataatagttagcaacatattaaagttatataatctttaatcaaaggttgttggtgcgatttgttgatttctattattcggtacaagcaatctcaattcaaattgttgatgtagtacgatatctaagtgaaggtgatgtatataatagagattatatatgacatggaccgacatgttattaagctgtctttatgaaatatattatttacaataaagacctaattcatatcttaaagatgagcaatattagattggcctgaatcatgagtaatcatgaactctgttcatgttattagtttaattgattcactcgttaaagttttttagagaagatgattcttacaacttctgtttagggaatttaataatactgatggctggaaacataatctacaattatggaatcctgacttttctaacgggtcgaatgctagttcctttcaagtgttaattctaaaactgaaaagttatgcacaaatttagattggatctaaattatactttcactagtgaatcaacagtactaaatgataaagaagtaattagaaaggtaaaatgataatttgaccaaaactaattacgaaacgacacaaggaagactaatcaatagaattgattatattaatggacactgcagtaaaactcagtaaatataattctacaattactaagagttcaattctatatttatactggagtaatcatagaattaataaacatgattatttggttgatgagattcaataaataatctaatttattggagcttaaaattataggtccatggttctcagatcgccactttgaaatactgtcaatggtagggataaaagttttacattgatgttcagattggtaatttaatttctaatttttcaaagagttgtaaaattaaaataacctaaaattttatcccgttcatcaccattgtttatttattacttttaaataaatgttcagaagaaggagcttagatttataatttaatttcttgcaagacccacgtttaaatagggtattaattggcgtgtagttttttagttttacaagcagaagctctagctcttttggtgtgctactagatgacgttataactttattgtctaaatttctaaggacagttttattccgtgttgcttgctttctttaggagttcatagtttgacaaagcatgtctttccatcttgaatgaacatgaaatagatcacatctatcaatgacaatcaatcaaggatcttccaataaaaattaaatagagacaccccatttattcaaactaaaatataaaagaaaacatgtcaatccatattcaaaattctcgatattaactatcgatgagttagaaaatatcgtgtcaaaagggcacgagaccaacctcgaatccacatgtgcatccaaagccaaaagtgatcttgatatcttagttgcgcaaaacgaccccaaaccattccaccagattcgataaatgggatttggagatccaaagggaccactgaattgagtgggagagactagcgaccaccgaaccactaaatgacacagattgaatctcgttgaaagcgaggaagaagctaccaaaacagattacacaaaccacccattgaagataaagaggaaccacgaccagaccagccaaacatcactaatcaatcttctcactcgaacaacagcaaaccctctcgatcgaaccccaaccaaacctagataatgggccagtagagtctgaccacgaggacaaaaaattagaaggagaaggcccccttcagcggtgcaagattaactcgtgcttacatctaatccttcttgatttgggtataagttatcattcaataatggtgacgatgtagatgtaaattattcctaatcttcaggcggaattagtgtgttatttacctattcaccatatttattgttgtactcattatttatcattatcatttttacattcatctgtagttaatttttatttttagagacttcgcatgtttaagcaagtttgtacaaaagtcactttacaagacaaaatagtaaagtaccaatttaaacaaagtcactacttgttccataaaaaaaacaaactcaccgcctaatcttgacaccttttcctcggctatcaaatgagccaaatcattacttcctattggaataaatgacaataaaataatgctagatcaacattaaattgcactcaatttcaaggaattacatcaccttttttttgtcactgcatcacttttactttatggtttaggattaattatatactattataatgattataatgctagagatacacttaaaatgtacatgccttacattttttttactaaacatagaaagagaacataatgagttaaaagtgtgacatcacacatgagaaatcaaaagaagcagatccaaacctatcaattacaagcaatctaattgccaaacaccaatgaatcacaaaatgcaaatatttggctttcactgcaaactttgaagaattcatccatgtattttgttggattttttattttcaagtacaaattgaatttgatttaactaaaaatgagtaatataagcatttttttcatcaataaaaatatcccataaataaaataatagaataattcaagaccggtcgataattaccgggaagagttgagtttagcgccaaattaagctgtatcttctcaacctgaaaaacaagtcctatgttggaatctcctgaaactaaaccaatgaaaagtctccacgtgtcagccagccgaaattggaatcggaaccaaaaaagaaaaaatataaaagaaaaaaacagaaattgttgtagaatagaatagaaagagagaacgatgcgtttctgcggtattgttccactgcttcgttgtcattcataaatttattcatcaaaatttcacaaaacaaaacgaccaggtttagagagagagagagagagagagagaaatggagaataatccagaggaggaggaggaggagcagttggaagaagaggaccaggtggctcccatggccggagaggaggaagaaggtgcggtggtgggttcgagcttgaccatggagagggttgctgcagctaagaagtttatcgagaatcactacaggtctcagatgaaacacattcaggatcgtaaagaaaggtaaatcatcaatcacttgttttctcttccattttctttaccaacataatatttatcatttgagccacaatagaatagtacgtcttttatattatatgtatatgttgtgtatgtaactcgaaattgtttgcatgttcttgggataagaagttgggagtttgagaacttgctcggtgtaattacagaaatggtttcgtctttgatgagaatgtgattatgtttatgggtttgagatcaatattttcacatttatctttctctttaaagtttaaaccataaccattgataatgggaatttgttattgcatttgggttttggattttgagtaaatggatctgttcttgaacaaaatcgaacttgtggtcatattattatttgatgaattaaggattaatatccccttaaatgtgataatggggaaaaaactgaaaaacttatgatggcaaacacttaggcctaaacacttacggttctttaaaaaatgactccggatagttctatggttcgttacacacatacaaagcctcaacagtcacataagaactgcaattgtgaaccaattgagaatattaaaggatactacttacattgtcttgtatataatacaactatcattatttgttagtttatcaatgtctttatcttgaaaatagtttaacaatttgtattggatcttgatatgtttcaccatgagatgttcttcgttattttccaggcgctcagtactagaaaagaagttagcttcagaacatgtatcagaagaggaacaaatgaatatgatgaaggacttggagcgcaaagaaactgactttatacgacttaaaagacacaagatttgtgttgatgattttgatcttctaaccattattgggagaggggcctttggagaggttagaaatatgcatgtatctgtacattaaatgcacaaaatccccattttcaatcaatattgatataattggttgaattggtggatgcaaaagagctctagtaaactgtaagacttgcatcagaaaggaaatgataattagtattaataatacgaaatgcttaaagacaaatgggacatctttaatatagaacaaatatgctggttatctgtttcatatgccttattgccttggttgtgactactgttgcaaagaatgtgttaacctttcttttctcttatgaaacatttttatcttgatattttacaggtcagattgtgcagggagaagaaatctggaaacatctatgctatgaaaaagttgaaaaaatctgaaatgcttagcaggggacaggtaagactaagatcttatacctagctgctttacatcgtttattaaaaactcaaatttatgatttgatttacatgttcatatgtttttgcatcattaaaccaactttgtcaaattaatgttacatgttctttgctacatcaacaaatagcttttttgtattatcttgcaatttatttacctgtaaagattctgaaaattttctaataatgtctgttccatgttgatgccatgctgtactgtttacaaagtgatatttacactgattgtgtcaaagtacaaaaagctttttgtcctccgttttatgggcaaaataattctattcatgtcaatgcggtagatgatcttatgggggtacttcatgattattatggcactgttgattgaaggaggtgataatttacagaataccgtctcaattcatcctatttcattagatttgagatgtgatatggttccgaaggatg

SEQ ID NO: 25974 - DNA, 1194 bp, Cannabis sativa
aaatgtaatgctgcttgctgggttttcagtcttttgttttttgttaattaagaaaatagtttaaaatgctagtttttcattggggttagtaaacaaatgaccacttacactaaacaatgttaaagtcattttttagaggaagaatacattacacagatgagtagtatactcaattttaaattatttttggtacgaccaaaggaccacatgtgcaccttttaaggaaatccacaaacaaaaatatgttatcttgcatagatttcttcaaattcacatgtgcagcagatgaaatcgagaatttgaacgatcaagttgtcctaagactaattaagttggcaagaaaactttatggaaacaaatctgttacaacaattcattaattcactgaagaagttatggctgaggctgttgtttcatttgtggttgaaaggcttggagatttggtactcaatgaagctaagttcttgggtggtgtaagaggccaagtcatggatgcacagaccaagctgcaatggatgtttgctttcttgaaagacgccgatgctcatgtaagagatggcgattcaagagtgcgcctttgggttgtccaagttagaaatatttcttatgatttggaggatgttattgaaacttatgtcctcaaagtagcttccttgaggaacggtagaggtgttataagtgtgctgaaaaggtattagagattgagaagatctcatctagcattgctactttgacgtcgaatttacaaacatatggcataagggagttaagggtcaatgagttaggtgaaacttcatcaaacaacaaccaacggagaagagaattgaggcgagcttattctcatgttgtggagaatcatgtcattggattcgaagaagacatcaaagtgttggtatcccttttgactacaaacgacaagcatagggtgatctctatatgtggtatgggtggtttggggaagactactcttgcaagaaaagtttatcatcatcctcaagtcaggactcactttgattgttttgcttgggctgtgatatctcaacaatgtgtagtgagagatgtatgggaagaaatcttgattagtctgacttctcctacacaagccaaacgatcagaaatcaaaagcatgggcgatagtgaaatagctaaagagctttacaatcttcagaaacagaggaaatgtttggtgctcct

SEQ ID NO: 25975 - DNA, 1907 bp, Cannabis sativa
  modified_base (42)..(53): a, c, t, g, unknown or other
agtaaaaaagtaaaaaataccgtgtggcagtatttttgtaannnnnnnnnnnnagttagtataccatataaatttccttaaaaaaatttgatatttagaaaattttattagtcaaatttgagttcctagtatatataattttaaataagaaagtagaagatgaatattattgaaaattataaaatattaaatttttattttggtaacacagttagtaaattaatattaaatcctatttttatatagtactatgcttagaataaacattaatataataatataggataaatatgatgtaaaagcaaataataatgtaaggtacgtaccatgagatgtgatgatcccatcacgtataaagtttggtatgttgattgtgtagacgaaaattgcagcggcggaaggacagaaaacagcggctttaacacccaatttagctgcaacttcaactggccaactcataaaataatcagaaaccacacaactaatcatcctctcatcattattattgtttatagtttttatgagtttttcaagctctgtaggcaaaatactgtctccccaaactaatttacatatcacttttaggtcacttctgtcagccatggggtccagcccatctgggattgacaccatctcaatttgtgatgatccaacaccactactagttttatcatcgtcatcagccatgcttcttaatatcttgttgtgaatgaattcaatgttaacgaaagttactctgaacccatgcttggctagtttttgagaaagtaacattaggggtttcacatggccttgggctggacatggtaccaccattacatgaccttgttttttcctctccattagctgcaatattattaataaattatattacttcacagttcctatatatatattttatttaaagtctacctttcacttcaaatttatatataattaattgtagaccatttttgttgagaaatgctagggcaccagtggtgtctagcaccctcctatgtgtcaatatcgctattggtctaactaagtatcgagtcccatataatttaatataatagcttttagggaagtattgctagccaatcgcaacgcgacatgtcgcaaaggtgctaagcactactagtacctaatagcaatgttcatttttattaggtgtacggaatatgacagaaaagggaccataagtaattaatataattaatataatttgttgggacatatatcaattacttttcaacaaccataactccgtgagaagtaagtgttaataaaattagctcttaattttaaatattgatattattaaatatttttttaatggctaactatgttgctaaaaattataataaaaattcatatataatatctaaataatacttattagattttaaactaaagtatataattaatttaattattatactttgtataattactataccttaccgttaacacctactaaaaatacctactgttaaaaaaaaaattcctacctaaggtattagaaatttaaattattatgttttgaaaaataatatctgcatacataaattatacataaaattcataaatttgaaatatacttatatggtaagatatttttaataaataaaatgatcatcttaaaggaatagatggttgattaaaattacttatcatataactatatgtgtattaagtttgggtatcatttatgtctgtacatataattactagagtgcaagttgtatgaaatattaacaactgggtccatagacaacctccaacagcattttaaatagtgaatcggcacaacacaaaggctcatcaccatcatcatggacctcactcggcataaatattggttacttatctttggattttttgtgtttttacgcaaaacaatcaatcctgaacaaagcatattc

SEQ ID NO: 25976 - DNA, 943 bp, Cannabis sativa
tgtgctttttagttttatgtgtcatgaaataaatgaataaggattgtgtatcttttgaagtttttctttgcataatgttttgccccttgcactaaaatgaatgggatgaggaaacatgttagcatcattaaagcaaaacagaagaaatagcataattaatatgaggaatagtctctggaagctttattgaataagtaaaaggagaccaaggtctcttacatatattattgtatagcatcacaaataatatatattaagagatataaattatgttagaccacaaaatgagttcaaacacaacattgatgactaaaatgatcagatcatatggagattaagataatcagcttcctatcttgaaagaaactgataaacagaatataacataggaaaaacgagagagaaaaggaagaagaaaatgaatgaacaatggaatgaaaagctactcaactaatctcattgagacagaatcttatttatagacatttcattacagagtaccctatctcttttacactttgatgcatgttcttgtgtttgtgtgatattgatctactaatatctagggttgattgttgggaatatctcgatctagtttgatattgagaaaggggaatttgattcctagggttctttcgaagaaagaaaaagagaaagagatgaatcaagatcgcataaaactaatcaaaatttgagaaatcaactaatctaatttatattaaatatgttaactacttttgttgactcaataagaggtttatttttttataaataacaaaattagttgatgtgtcaaactttgattggtttaacacaatatgggacactaatttttaacaggaaatcttgattcaaaagggatctggttttggatctcgaaggttctaggattgtttctgatcagctagggttgactcaccttggttcttttgttgctcgggct

SEQ ID NO: 25977 - DNA, 4161 bp, Cannabis sativa
  modified_base (4093)..(4112): a, c, t, g, unknown or other
gcataacactgtatgtatgtgtttgatagcaatgttttatatattgtgtattattattaagtataattagtcgtatgtaatatttttttttagatatatgttaccttataattaattagcaatagtttttaaatattattacatttcattccaaagtggggccgctcatggaacagtgacaacatgccaaatgaagcatctctttgaaaaatataattaattatataaacaagcttgtataaggtttgattaatatacagacgctggtgatgatatgatcacttattctccaactttggatatgaagagattttaagaatctttcatatatcttcattaaggcccattaaggattttcataccctaataagcatctctacccctctctcttatattatctttaccttattataacctcaccaactctcttcctctctcacccttccccaaacagtgggggcttgaaagaaagaaaaaaaaaataattgtgtctagaattattatttgcttttacaaatgtttccaaatttacatcgaagcgaagagctctgcttccggatttcacctaatcccccaaaaaagaaaacaaacttctcagaagatcatattcttgatcattatgaggagatcatccgaagcagccaaacccccatatctttgactaagagtacaactttggtgaaccatgatagtgctactgtgactcagatttttagtgacaacaagagcaaggagatgatgaagcatagagacaatgaaaggcaaagaaggcaagaaatggctgcccttcatgcttctcttagatccctactcccgcttgaactaatcaaggtgaaaacgaattatatatattgttgatttgatactatattatcttcttcctagctaacattactttaagatttgatcctcttataattcaattagtcaaaattatcttatgggtttcttaaaaaatgaaaatacgatctgtataaaccgagataaggctctagtactgtacctatatgagattaggtttataaaaatatatatcacaacttggtgggaatattttatcagggaaaacgttctatttctgatcacatcaacgagggtgcaaattacataaaacaactacagatgaaaatcaaagagcttgatgcgaagagagatgccttgaagaggtacaattacttgtctaatggaaacattattatcgggccgagcagcactacagataatgatcaccacggcggagccagcagctctagtgtgctgtgccaagataacttgataagagtccaaccttggagtggtggacttgaaattgtgatcagtagtaccggagacgctagtgcccttcccatgtcaaagattttgcaagttattcttgaggaaggtcttagcgttgttagctgtatctccaccaaagttaatggcatattacttcacacaatcaaagccgaggtatttgataatttggatattcattcaggtagtatcaaatatcaatgtacatgtgctataactaattacttctttttgatgttccttcacaggctcattgttgtcatattgaattacactgcagtgataattatctttcagcgctttatcaaaaactaaaaaaatgtgatcattaatgatattggtcgtgatgatgatccgtgagtactgtactatatataaataatttttcattatgttcttttctatggtctcataattcttgatttcatacagtgctagctgtaacatattcacatttttgtctttctatatatatatatatagtacaatactactcatcctcagaatgatatctgaagaagttatacattgaaatgcatcacgaaagatatgatattattgtaaccgctttaatatgtttgtgctgtagaaatgaaaataagaaagaaactagctaatagtgaaatgtagtccattacaaagcacacacaatatttatacatatatatgtatatatatatactagtatacatatatgcatgacattttctagcaaaacctttgtagattttataggaaccataaagattttaaaggtaagtaaacaagcactatgaataatgtttttcaagtaagataggagtactacttattcaatgaagaatatgtatttatatatttatatgtatagcttgacttattttggctgcttcgtgaaaggataatttgtagacatttaatgttgtatatataaatataggaggatccttatataggacctcccgaaaagattccgtcgttgtggtgtctcgaagctaatattagggtaacacatgaaagtggaaaggtgtaaaacactagaacataatatcttctttcctttcttacaataaaaattcagttttttttttctctaaactgatggagctataacacatctaactaaagcacaaatatatacaattatgaatatccataaaaaaaataccaaatttcaatccatcttctattaataagatgtacgatcttttcaacgaaccaagacttgttaaatctgatcatcacagatctcctttaattttttttctcaaactaatggaacaataatagtgatttgcttgtttttgttctgtggaggattattagtgctctctcttggctgtagtttcattttttcttttctctcaatattaaaaactaaataaataaattagaacaaaaaattaattaatcaccaaaaagatttcctaacacaaaaatcagacagtgctcctttattttggctgtctacttcttttttttcaatgaaaatttatcttattctcaaaaaacaaaaaaaataataataataaaaaaaatatctggaacaaaaaattacttactctaaacacaagaaaagaaatttggaacaaaaaattacttaccaagaaaagaaatctagaacgattaacttcattccatgctttttttttataaaaaaaaaaatcaaaaaaaatacaagaaaaaataataattcagtattttcctggtaacaaaaaaacaatttttacttaattaatgacgtgtcaaaagtgttgttagaaaacacttcatagatgaatgggatttttttttgactcccctatattaaaaaattcttataaacatataaacataaaacaatatagttagccttccatgattaatgaagtcaatttttgctaacaaaagtatccactccaaaatatgtataatctatttatatatataggctaattaggatttttgccactgaactttgacatgtaccaaatcattcttctgaacttttaagatcgttaaaaatacccctaatctattgagattgttggattgaaggcattttttttctaattttagtaaaaaagtctaacatgggtgaaagttcaggaaccatgatttagtacatgtcaaagttcgagtggcatgattcagtagatatcaaagttcagggagcatggtttatttacttattggtggtaacttgtaaggattctggtagaagcattaatagcattggttatgcttgtttttctctttttcccacttactgctttgtgtttggtttttattttcagggtcttccttaaccaacagagaaacactagcggagaaacaactaactttattttcttctcaacattgattttttaaatagttgctattgcagccatgtatttacatccacatattatatagcttattctatttagcaactattttcaagatttagtttgattgtttaggtttgttatgtatttttgtagtggtgaataaacaagtttataatttattgtagaatgatagtagattttttttcaattatatttaataagtaaattattttaatttattgtaaatgatatttatattatgcttttaaattctttttgttgattttagtatttttttttaaattttttaatccactttaagtgtaagttttaaaccgacactaaagggagttttagtgccgattttaaaacaataataaaactcaataatgtcggtttgaaaccgacactaaaggaaaaacatatatgtatacattaagttctaagaaaaatatcctaatttcagctggtctaaaattaattatcaaattaattttcaacttaaatannnnnnnnnnnnnnnnnnnntattagaaaatataaattagttataagaaatcactatctagaacatttc

SEQ ID NO: 25978 - DNA, 4189 bp, Cannabis sativa
tctctctcatccatcgatctccacccaccccttctcctgtcggtctccctctcctctccgtcgcatacgtcggaccaccaccacttcccgttggtgtccctctcatctcggtctcatacagaccaccaccacctcccgtccgtctccctctccaagctcagtataaatacatttatttatttttatatatatatttattttgttattgtataaatttaatgtgttttaaagttagttgttaataaaattaattagttgtttattttaatggcagaaaaaattgtatttttttgtcttcattttttttttacattcctggcggttaaaaaatcgtcgcctataacagggtataggtgacggttttaaaccgccaggaagtccacattagcgacggtttttaactgtcgcctattttgaccgttttacgacagtcgtattggcgacggttatagaaaccgacggaaatactttaaacgactgtttaaaaacgtcggaaaaaactatttttgtagtagtggcgctataagccacaagatttgagagcacttttacttggcaaagaatatatataggtcccatatatattatctctttttttcctttactcctttaatttatttggttcttttttaacaataagcatatatactcttcgcatataacttaatgtaactacaggttatttatttatacctttcttccatacgttttactattcctgatcaacttctttacttataagttataacatcattttattccaaagtgaaatttacgcttaatagaggagatgagaccgtagttatatattattctccttatatataaacaatgtatgtcttgttggttcacccgtaaactgtatcaactcctaccactctttcccttgaataattaatattaagtttttcatatatttagattgagtaaccaactacggtaaatcagtccattagtttccccaaattattaatgcaaactgatattttttactttattttatgaaaattatatatattatgcttttagatgtgtgtagcattgctttgatttattgtgtttattttggttacatgcagcccaacacaccaacaatggatgatgaacattgtagatggcagttgggcggctatggaaagattaacaataccaaatgtcgtacatgcaacggtgatatttccggatctttctacgtctgctaccactgcgacagttacgcccatgctgattgttacgaaaaaatcaaaaatcatccttttcatccttccgaggaacttatatttcttgctaacgaatccttcatatgcaactgttgtcatacacagatgagcaacaaaccttgtttcacatgtaggtatcgccatctctttttggatgtccattgtgcaagaatgccccctataacgagtgatgattttgataaccaagatcacatacaacatttcagtcatccacatccgatgccacttattctcgcaacagaaaaaggcggattaagtctaagtgaatgctttgcttgtcgcttgccatgcttcgcgggcaaagcttattatggttgcaaaccctgcaagtattttttgcatgaatcatgtgcaaagttgccactacaactcgaaggtgcctcttttcacaaacatcacgctttatcccttcgtattgcgaatcaagaattccttgtatgcacattatgctacaagagtgatcttgttttcgcttacgaatgtggtcagtgtgaattccactattgtgtgaattgtgtcacttgcacatccaggcaaacagtaaagtatgaatatcatgatcatcctcttttttttctcgacaaaattcacactggtctggtggaatgttatgattatgattcttattgtaagaatccaattttggctgaatgtgaagaattcaagtataccaattcagctgtgtttggttgtgatcaagaatgtaattttaaagttcatttgctatgtggtccattacctagcactctaaaatatgaatatcacatacatcctcttattttgtttgattttgttctcaacaatgattatggagacttttactgtgatatttgtgaaatgaaaagagatccacgaatacgtgtatacttttgtgaagattgcaactatgttgctcatgttcactgccttacaactgaggtatgatcctgatcctgaattactcaattgttataatttattttcattattatattctcaattatttgataatatgtggaaattcatatttagggagtatattctcttgttaatattgatctattaatacagatatagtatttatgtgaggggcagactcacattgtagcgaagagggcagtcgcccccttaaaaaatataaaaaaaaatgtatatatattttagttagttacaacgtatatttgtaataaaagatgataattatagacatagatttggcatggtgtaatgattaagctagattacatatttattagaggtcaaatgatcaaatcctactaacattactttttcccctttttaacaaaaaataaattacgcccccttactttaaatcttgagtccgccactactatgtgattaattttattttcattgaatgtcacactcagattataaatacattaaagggagaccttaaagatgtaaagttgaagacagtaggcaatgatctttggaaatttcctgaagaaatgaatggcaatttaagaatagaagatacagagcagagcataccattgactttgagggatctcatattatttaaattaactgaatctgagcaatcttctcttggaagatgcttttcgtgggatgaaaaagatgaaaatgaagtgagtaaaaggagaatgacccctcaacttgaagataaaacaattgatgaggttctccaattttccaactttacagaaagtcagttcatgaactttattttcagagagtttaatattaactttaataagaactttgatgaaaagaagatgaagattgaatcaagtgatctagcattgaaaatagttgattttaaaggttatttcatacctttaaatgtggtttctgttttcaaaacattacttcacaaatatggagatattgctgaagggttcagtaaatcaaaggcatacaagagcatatgctatttcttggtatgtaaagtgatgaaagagatgcatactactttcatcatagacatcaccaaagatcttcttcaacgttggtttgactacatcgtatttgcagaattttggggttactttgatgtggattttcttgaggcatctctaagggagatcacaagagattttttctatctcaaactaactcaaatacttgaagttgacattccaacaatcataaggggaaggataaaagaggtacagaagaagatagctgaggaacaaatgaagatatcaaacgaacaaaacaagatggtagtgtataaaaagttttgtgagtctacctcaaaaaaggagtttatgaaggagggtttgaacaaagtgatgaaacataagtggaaggttgcaagcaaagtgggtaagttgcacttggattgattctcttatgctttgcatcttcctactctttattgatgtattgaattgtattgtgtgtgattgtgtgatgttgaataatttgtaatttatttaatgcaaatgaaaccctcaaaaaatcgttccactatatgaaaatttaattattaaatttatgtgtgaagacatgcatggtcttttcccataaggctacccgaagccaattgggaattttagacaccaaatatttcaattgaaccctgttttgaaaatatttatatgttgatacgaaaagtaggcattctaattatcaatgaacatacgcattaacacgactaaggtttttggattgctcatgtaaagaaagtaaggaagcttatttgtacgcctcgtctacatgagacaagagaccctctactcccctcgtgcaccttaggtcgcgagagaccccctcgcctcatgcaccttggtttatcaatgaacgtgatgcattaacacgattaaggttcttggatttctcatgttaagcaagtaaggaagcttacccgtacgcctagctagttcggacgagacgagaggctccctactccccttgtgcaccttgggtcgtgagggaccccccttacctcatgcaccttggttcagggagggcctccctcc

SEQ ID NO: 25979 - DNA, 1551 bp, Cannabis sativa
cgtagtatcttcttaggctttgtccccagcataattaccgcaaaaacctttatggatgattatgtaccgagcgaccttttttctcatcttctttgcttcatttttgttagtaggcagttcgccttgttctaagtaagctgctatgggagtcatccatgattgagtcgaatctagtaggagtacctcttctttggtgttgatgcttggttcggataggtattctattggcacaaggttaaccttatttatcttttcactcgtcgccaatcttgccagggcatcaacggtagtgttctttctcttggtatttgttgaatggtgtagccttccagttaggcaagcaaatcttgtatcttgctaaggtgagccatcatcttctctcctctggctgtgtattcacccaaaacataatttacaacgagttgggagtcgctgtaaatgtctaattgtctgaccttcacttcttttgctagtttcagactagttactaatgcttcatactctgcttcgttgtttgaggtagggaagccgaagcgaatggtcatatgaatttgttgtcattcaggggttattagggtgatccttgctcgtgatgactgatctttgaaagaaccatcaacttgtagtttccaagtttcacttgcttgatcttccttttctttcttctctgtgttgggaacatttggtttgggtgaaccgctcatatcaggtctttgggtgtcactgattgttgatggttggtcatcctcttacgcccttgtttaatttcaacatcttgaaccctagtacattcaacgacaaagtcggccagggcctgccctttaatagccgaccttggctgataggttatgtcatattgccccaactctatcgcccatttaaggaggcatcccaatgtaccgggtttctgtagcacttggcataatggttggtcagcgagtatcgtgatggggtgtgcttgaaagtagggtcgaagctttttggatgctaagagtaagtagtaggtcaatttttctatgagggggtatctacactcttccccgatcagcattttccttacacagtagaccgggtgttgtaccttatcttcctcccttactaagaccgcattgactgcatgttctgtcattgttaggtatacgcttaacccttcaccgtctaggggttttgaaaggaccggaggttgggataattgttgctttaaagcttggaaggcattcttgcattcttcaatccattcaaattttttgttgccccttaggatgttgaagaaagagacacatttgtcggttaactttgagacaaatctactcaaggcagcgatctggcctgtcaagctttggatgtctttaaccttagttggggatttcatgtcgattaaggtctttatcttttatgggttagcctgatgcccctagagttcatgatgaacctaaggaattttccagagcttaccccgaaagaatactttagagagttgagcttcattcagtattgtcttaggatctcaaaacattcctttaagtcttcaatgtgcccttgggccttctt

SEQ ID NO: 25980 - DNA, 2846 bp, Cannabis sativa
  modified_base (1005)..(1007): a, c, t, g, unknown or other
tcctgaactcattttttgttaattatttcttaaatataactaacctctaaatcaagttattattatgatctattttgacataaattgagttcattatattattttgtaccattttaaaaataaatagtctgaattgtcatttaattaacaaaaaatttgatatgtaacttttacaaaatactaattataaaatattatttacctttagtttgttctctaaataaatatttgctaagatattatttattcttataaataaaaaagttattaagtgatttattaaattatcttaacacaaaatacatctagtattaaatttttaccattttaatttttttcatgccaaattaaatgtgatatagtgtttgttctgtaaataaatatttctaggtgatttagaaaaaaaatttaatacaaaatatagagttaccttttagcaaattttatgtgcatgttaaatataatgaaaaataatgaaggaaaattaattacatcatgttgagtttattgtagagtctaaatgatattgtaaaatatatttttgtatcctacaaataactatagaaagttattaaaaaatatataaatataactatagaaaaaaaaatgtttactatattgacattataaaagacaagcacctaagagaaaaatagtcatagattatttattaaagtgcattgttatgagacacctatagtgtctagtattacgatgaagtatcactttataattgattagctattttgtataatatttattaaaataaaataagtgagatctaatattaagttgtactaatattgataaatgccattttggcatttctcatttattgaatatatacactttacacacatataatatataatgttaattaaaaatagatacaaacactaaaaaaaaaaaagatatcaatggaattaactaaaatgtttagacaaatttttcattgaaagggtatatacgctcttagggtaaactataaaaaatcttacttttagnnncaacaaaacttgtgattaaaagtgaaaaagttgtggctaattataaatcatcatttttatgctgtaactaaaaggtccgtgaccaaagatattagtcacgaaaattacaatttgttctgactaaatgtatttttagtcacctgactaaaattaaattagtgacagcttgtatttaaatactatattttattcacaagtaatattttgttgtagctaaaaagttacatttagtcgcaaaaaattatgttgtgactaaaaaattatcatttgctacactaaatctttaggtggcttggggttcaggaacattttttattggaatttggcaactatattcaagtacgtttgggccattgctaaaaaagcggataatctatgagtgaagtggatacataacgtgtacataaaggaggagagttggtggtcttataagaccaccccagctgccaactagtattgacgcaaattggcaactataaaagatagagcaaaagagctttttgacttgaatcaagcctcaaatgacagctacaaagtgctatcagttttcatgctcttcgaccttccactagcaaagtagagtggagttctataatatggaaccgaatgaacttgcccaaacatagtttcatttttttggcttaccatgctaaatagactcaagacaaaggatagagcgcatatgtataaaccagtcaaaaacacaaagtatttttctgcaatgccgaagaagaaacagtgcaccacctcttctttggttgtcccttctctttggattgtttgaggaggattaaagattggctcacttggacgatggctactaacacccttcacagaatagtcaggtggatccgaaaagccaagattagcaaggtaaaaaagatgatgctagctgatgtcattgcagctcttgtctatagctttggcatgctaaaaataatattttgtggcaaaactcaataccaagtatagatagtatagcgagcaaagtaaaagaagtttttttttaaaaaataattacatgtacatggccaaagaaaacaaccattagtgctaaagaatgtttagatacattgtaaagtttatttttgtataggttctcctatttatggagaacgctatttgtttgtataaagagtttttgaacaatgaaattcacttgattcataaaaaaaaattatcattaaaggtagcaattttttataatgatatagtaatatatacgtggtattattgtaaaatgtgatattttatgaaataaaaaagtgatattatcgtaaaatgtaaaatatgatattttatgaaacaaaaaagtcacactaaaagttaatcataataataacaaaacattggaataagtggtatataataatactagtatgggcgcacgtgcctttgttttgatggtgataatatagtgtgagtcaaatattttttatatttgtgatgaggacaaaaaataattgtatgttatttttttttaaaattttgtaagaaagcacataaactgttagtttaaatttgtatatacatatataaattatttttagagagaatacataaatttaagatcattagtagaaaatttatttataaacatggaagtcagtgacttcatcagtctgtatttacattgggtgttatatgtcctgatagttactatttcttgcaaaaggtaacataaaaggatgagatattggtcttgttaaagttaaaacataaaaaaacaagatatacatgtagaccaatagactattagttataggcaaaaggctatatttgttggtgactttatccactttctacatcatggagtgcatctactatgtatttgcactt

SEQ ID NO: 25981 - DNA, 2106 bp, Cannabis sativa
atttttattataaactttattcttctattaggggattcctcgccccgtccccgctcccattaggggatttcccgtcccatccccaatgaggaataagcggggatggggattaaaatcgttaacggggatggggacgggggagcactccccgccaattccccgccccgtgtgcatccctacctaagagagagaaatagaaagagaactagggactccaccaacaatctgccattgttactaattagagaaatggatgtccatttaacttgaatttttgcatcttgacttattgagaaatataatatatattgaatgagttaattattctttctttgataatattaggaatgaacaaagggattgacttatttacgtgggtttacaaacacacatatatggagacgtaaccaattttttggggtgaactcggagatcaatcttttgccttccattctctgttttaatttctaacccctagtctctctaatttgtgtgtgtatgttagatttcgtgtgtgtgacaccctaggttttctctctgcgagacagaaagtgttcaagttggatcttgaacattctactgtttgctaagatttgtgttttgggccgagctattagattttcaaaaataccaactagttgtggagcataactatttgattttaattattttaattctaattgggtcatgtgttagttgtgcatctcaagagttggaaagctgcagatttttaacagttatttcttttttgaaaataaatggaattttcattaattggtaacccaaacttaatcaattacatatagatattgctcatcaaacataattaataaaaaataagcaaattaagcgatttataataaacggtccgggaacccggcgactaactttttagctcgttctcctggttctattcttggctgtatttcacgcggaggttatgttccttctggtttgaaaactattttggtagctgatttgatttaataaaaattaattttttagttaaaaaaacaaaaaaaccatttataataaaggataaaaattctaatattatttttaattaaataacccataagtcgctagcgttattttttattttattggggagatatattaagatgtatagtaaataattaattacacaattattactacacccatagtgtggaaatcaaaactaactgatgaacaaaagttaaactttattttttttttaattttttggctctcactatatataacaagattattggaatattcttttcttcatataatagtgtgtagcttatctatgagccgacagaaattgaaagttggatccaaaaattgcaaaactgaaaaaaatccaacctcacgttttatattacgtagactcatttggtaaatatattgtcccctggtttcttaaagttgcagcatggtttgtacaagatttatttctttccaaagaaatttctagttcatccctagctataatgtttatgttaattcaatctccattaaaaaaagaaacaaataatttccattactttaattagtattttcatttgcaatttttcgtctctctaccccataaaataataatatttacaataaaaaaaccagaaagaaagttgaaaatttaatttattgtctaaactcgtaatccggagacaattttaaactagtcgcttaaacaaatttagtaacatttctaattataaacatgctgtaaatgacatgggtttatacatttctaattaatgaaaaagatcatattataattatatatttttatgtatagagattacagagagagagagagagagtgtttaggggttccatttggaactcgatggagaagaagaaaataataaaaaggaaagaaaacccacttaatggcagacaaaactccaaaattcaagaccataattctatgattgaaaatgggtaggtagtggtggaaggtgtcgtttgaaatgactcattaggcttaggaacaccatggaattttccactatatatatatctactctacattcacataaatacattgcttggccctataactctccttattagcagacattaatgccaatattgaattgaaggcattcaaagatg

SEQ ID NO: 25982 - DNA, 1930 bp, Cannabis sativa
tttttgtttgttttcagtcttctttattattttttttttgtaaggattacttattttttattattacttgttgcttttttaatttatagctccgatcacaaagatatatttggtaattggtattgaactcagtgatgagtgatgcatatcgtattttttttttttactttcttttttcttcttttcattttttaaagctcaaacaatgaaagataatttattaaaaaaattatctataatttgtagattatttttaagttaatttgtttaagaatatttaactagtttatcctacttaaaattacagtgtatttcttttcttacgcatccatgatttatccatataacgaaaatcctaacaaaaaatttcaaatatttaataattaattataattagttacttgttacataatgtaattaactagtttctcacaactatttaatatttatatattattttaattcttattttaaattatatcatgttattattatattactcattttaaatattgacggatgataactagtaactaattgtaagtagttgcaagttatataagttgtaattaactaactagtttcttacaactagtaactaattatttgtgttatgcgtaacactttttcatttaatatttatgtatttttagtaaaatttattttaattctactaaaatttcggtagcataacgactgtaataagacgttcctaaaaattttaaacatgccaaaaataagaatcaaaacaaataattaaaacaatacaaaataaattaaacaaaataacattaacaatacaaaaattattcacctattcaactgcagtacatgtattcgcagaacctacttcactacggttgaatatttaagatattcaaattcatctacccatccgaccgcaattcaatatatcacagaacctacttcactacggatgaatatttatgatattcaaactccactaaatattggtaattaattaataacaaaagttaatgaatgtatatacatgtaggtagttaaaaactaatcaacattaagttattcggaactttgaaaattagctcacaaactacaatataataaaatacaagaaaattaaaattttaattttttatctacttactagttatatcatctatatgtaactagttactaatgagtaactagttagtaaattagtaactagttaataataaaaatatatgaatatgaatgaaaaaaataataattagttactagttagtaaaaaatataaaaacacataaataaaaataaaaaaaattaaattcaataagtaaataaaaataaataaataaaagagctattttttctcacctatttttaaaaaagtttacatatacatatataataaattatatctcacactaccaatattttacaaacttaattctaaactaattaaaactctcttatctcattctcgtttataatatttaaaaaactgattagtttaaaatattcaatatatacatatacaatacttaaaatatatacaatacaattacaatatttttataaatacaatgtaactacaaaatatgtatacacacaatacatacatatatactattaaagtttgaatttttactttattagcgtaattcggcgaccatgccgacaaaaatccgatcaccatgcacaaccacaacaacataatcatagaaaaattcctaaataaattcacaaaaaataaagtaatgtacattactaaaatgaataaaaaacataattatactttaatggacattgagattcaacattttttctactaaaattggtggccggagtaataatcactacattacttcttggctttagtttacacttaaaatagggtaaaaatctaaactttttgggtgtatatgtctaggtatggaaaatagaagggttttttttttttttt

SEQ ID NO: 25983 - DNA, 9023 bp, Cannabis sativa
agagagagagagagagagataaggtttatttaattttcttatttgctataaatgaataaacccctaattctatttgttttactctagttgcacaaattagaataagtgagattattctataatatccctctaaaagacaacaaccaaataaatagcaaaattctaattttacccttacttcacccttactcaatcgtaaggcttaaggataaaatggtccacaaccataaccctgcccaaaacgcgatattccaaatatcacttataattatctcactaaaacaaaggttctaaactaactcacgtgatactaatagccattcatcgcatttctatcattaccgagcaaaaatcataaaaatgataaattttacatgtaacataaataatacacctagagtttaataaaatctctaaaattgaaaaattataatcttaattcctaattcttgaaaataaggcccacaacataagatattcacatataaccataaaattcaaataattgatgttaattaccctactaattcatattctaagtatgcgactattataattatcccaccattaaaaggattttgtcctcaaaatctgacatgaataactctggatgtttagccctcatgccagactctaattcctaggtggcttccaccaccttattggttactccaaagtattttaaccaatgatatggccttattccgaagaaccttttccttcctatcaaggacttgaattaggaatataaaatatggccttattccaaaggacaaatctgactctagttctagggctttgtaactcaagacatgagtagggtctgacacatatttcctcaacatagaaatataaaatatattatgcacagccgataatgttggtggtaagactagctgatatgctacctaccgaaccttctcgggtatctcaaatggccctatgaatctagggcttaacttacccctcatgccaaagcacttagcacccttcattagtgacactcgtaagaaaacatgttatcccacctcaaactctatgtcattacgcttaggatcagaataatttttatgcctgctttgtgaaacaaggatctaagctttgatcttttctattgcttcaatggtttcctgaactaactcaggacctaagtatttcctttttccggtctcgtccaaatgaattgggaaacgacacttcctaccatataacatctcatattgagccatccctattgtactctgatagctatttttataagaaaattctatcaagatcaaatatttgctctatgaacccttaaaatccatgacataggctcgtaaaaaatcttctaatatctgaatcgtcctctcagactgtccattagtctcagggtgaaaagttgtactaaacttcagctttgtacccatggttatctgaagacttatccaaaactttgatgtaaacttcggatctctatccaaaacaatggattttagattttcatgaagacgaactatctcttccacatacaactctacatattgaaccactgtaaaggttgtgaaatgatccactatgacctatactgaatcatacattctcatggttctaggtaaactaagtccatggtcacatcctcccacttccacttgggaagtgataaaggttgtagtaaccctgttggtttatgatgctctgctttgatctgttgacatgttagacacttagacacgtaatcaaccacatatttcttcattctgcaccaccaataatagagtttcaaatcttggtacattttggtggtacctaggtgcagtgaatatggtgtattatatgcttaacccaataaactctttccaaagcccatcattgttgggtacgcaaatctgagttttaaaaagtaacatcccattattcaagattgagaattccttagtttgatcctttctaaaaagtcaattgaagcactaggttatgaagttttccaactacaaattcgataccatccctaaccatattcgaagccaactgaggtgagataactatggtactaaaaacctacccagaaccttttgctcaaagcgtccaccaccacattggctttcccaaggggatataaaatctcacaatcataatccttgactagttctaaccacctcctttgtcttatgtttaaatctttctgagtgaaaaaaatacttgagactcttatggtcagtatagatctcacaattttctccatacaaataatgccaccaaatcttcacgctaatacaatagcaacaagttccaaatcatgtgtcaggtaacctttctcataatccttgaactgacgagaagcataggcaataaccctgtcgacctccattaaaacacacctcagaccatgtctagacgcatcaccatacaccataaatttttctcgatccgatggcaaagctaacattagtactaaaatcagtcattgctttaactctgggaaacatgattcacacttgtctgaccacacaaactgtttattcttctaagttaattctgttaacagaatagaaatcttggaaaatccttccacgaaatgtcaataatatcccgccaatccaagaaaacttaaaacctcagtaattatccttggtctcggtcaattcttaactgattctattttccctatatcaaccataattccatctttctcgataatgcccaaggaaggagacttgtggtaaccaaaactgacaatttttaaactttgcatacaacttgtgaactctgagtcgttgcaaaacaattcagagatgttgctcatgctctgcttctgtctgagagtacacaaggatgtcatcgataaatactataacacagttatcgagaaatccttgaacaccctattcatgagatccataaaagttgtgagagcatttgttaacccaaaagacataaccataaactcatattaaccataccttgtctggaatgccgtctttgggatgtattcctcctaaattctcaactgatgataacgcgagcgcaaattaattttggagaaaatagtcttatcctgaagctgatcgaacaaatcatcaattttggacaatggatacttcttcttgattgtcaactttttcaactcccgatagtcaatacacatccaaagaaatccccagggcgacacactgtgtgatgccctaattcctagggatgtcacatgtgtgtttttggaacataatttagtaatagtagattaataatttaatcaaatacatgataatagtaaaaaaaaaaaaacttcatgaaatagaaaccatagcaatgaacaagatgacctcgctaaaaatttgtttcagggatctcctatcacaaaagttttacaaaaagagctatatacaaaagtaaatcaaaatacacataaggtatagtctaaaacaactcctgacaactcgaccacacaagtcggataagtcgatatgtacatttaccaaaaaggactgtcatctcgtggctatcctagttttcccttgctctttcctgcaccacaaggcacccgtgagtcacaaagactcagcaagaaaagtaaacataaacacatatcaatcatataacaaattcagaagaatacagttaaacagtaatacacaagtacttgtctaataagacaagccatatttgttactttataaagtgatcatttcttttattgtctaatatgacaaccctgataccctaactcgacatctacacatctcttgttgtctaataagataaccatgatgccctatcctggcatccacgtacctttgtcattgtctaataagacaatcgataagtatgaaacttaacagtggtttcaatttaacatcatgactttttcttgcttgacggtaattaccgtatcttgacctcgatgataatcgagtaataaatgataataattgtatcttgacatgctatgtggtacagatgtactttcttacctcaagttgtaattcaggtatgtttgtcgacccaaaatggagaaagatcaacgatctcggacctttagattgcttgggaagatggatgagctatttcttcaagatatccttggctgaaataagattcaaaaatggaggaaatcttgctgattcgttttttttttttttgttttggagggttcaaaaatggagagaaatgaagaagaaaaagtgaatttggtaaattttttactttacgtttttctttgtcttttttttctttctttgtttcctttttgtttctttctaagtttttggtcatcctcaaaaggtgagatacgttcacacaccagctccaaaaaaaaaaagagtgacaaatcaaagggccgaaagactaaaatgcccttaccttcctgctatgttacctcgtaaccctagaggtaaaatagtccaatttcgttattttgcaaaacttcgatattataaaatcaacttatcataataactctattaagattactaactaaaccccttatgacatttttggcctccatcgggtccccaatgtcgctgaacctaaaaatatttttattccacgtataacatacatcatacccacatatttttaataaaatctctatagttaataaattaagcttatttatcaacttatggcaaaatttcctaattcacagtgaaatagattagtagaatcataatcctactcattgtaacccaattactccatatttatataatgagtcctaattattcataattaggtttccaagatattacaactattccctcctaatagaaattttgtcctcaaaatatacctggacaactcaagatactgctctcatatttgtgattctaacttccaagtcgcttcctcgacctcattgtttctccatagcactttaaccagtggaatttcttggttccaaagcactttttcttttcgatctcaaacttggacaggttgttcctcatatgataagtctatttgaagctcaatatcatcatatctcaaaatatgtgttagatctgatacatactttcttagcatggagatatgaaacacattatgcactcaggacaatgcaggaggtaaagttagccaataggactaataaatctagggcttagcatccctttcttcctaatctacgtatccttttcataggtgatacttggaaaaatacaaaatctcccagctggaactcaatatctctatgctttggatcagcatagtttttctgctttgtgaagcaagcatacgagattgaatcttttcgatgaaccactttaggcccaagatgtcttctctcactgacttcatcccagtgagtaggcgattgatatttttttccatacaacatcttgtaaggtgccatgccaatggtactctgataagtgttattatacgagaactcaatcaaaggtagaaacttgttccaggaaccttaaaaatctatcacacatgctcatagcatgtcttccagtatttgaatagttttctcagactaaccatacatctgaggatgaaaggctgtaaaaaatttcaacttggttcccatgactttctgtaaactctcccagaacttagaagtaaatttgggatcacggtttgaaacaattgacttcagggcactatggagttgaactgtacaaattagcatgttgatccagagtataagttgtccgcataggcagaaagtgtgctgacttggtgaagctgtccactattacccatatagaatcgtataaactggtcgtcttaggtaaacctaccacaaagtccatggttatatcttttcacttcaatttgggtagtctcaaaggctgaaatacacctgctagcctctggtgttcagcttttacctactcatgggtcaaacatttagaaacatactcaactacgtcacttttcattcccgaccaccagtatagtgccttgaaatcatgatacatcattgttgttcctgggtgtaaagagtatggggtagtatgaaactcatcaaggatttctctcttaatttgatcatttactagaacacaaactctatccctatatctcaacaatccacctggtgtcactaagaaatcctttgtagtatttgccttcactttctttctatgctcaatcaattctggatcactttgttgggcaatctttatcctttccaacaaatttgattgtaatgtgactttagctaacttcttgaccacgaactcaatttttgttgtagtcatgtcttctactaactttggataaatctgcttcaggtcatacacttgtcctagggctctctgactaagcgcatctgctaccacattttctttgccggggtggtagaggattttacaatcgaaattcttgaccaactctaaccatcgttgctgcctcatgtttagatccttctgagtaaagaagtatttcaaactcttataattagtgtaaatctcacacttctcaccatacaaatattgatgccaaacttttagagcaaaaactactgctgccaattctatatcatgagtagaaaagtgctcctcataatccttgaatatcctagagacataggcgataaccttccgtgattgcattaacacacaacccaaaccttatcttgaggcatcacagtatattacaaacttctcattgctggttggaaaacgcaacacaggtgcggtaattaatcttgcttttaactcctgaaagttgtcttcacccttgtcagtccgtagaaacttactattcttttaggtcaacttagtcaaaggtgttgagatcttggcaaaaccttttacaaatattctgtagtacctagctaaccctaagaaacttctcacctcagttgttgttttaggtcgaggccaatcccgaacagcttcaatttttttcggatccaccagaatcccatctttacttacaatgtgtcctaagaaacttacttgggataaccagaattcacatttcttaaacttagcataaagttcatgttcttggagatgttgtaacaccatacggaggtgttgttcatgtgcttcctccgactcagaataaacaaagatatcatcaatgaacacaatcacaatgtggtcaagaaattccttgaacactcggttcatcaaatccataaacactgctggtgcattactcagaccgaaggacatcactagaaactcatagtgcccatattgagtacataaagtagtattggaaatatcctgaatagtattttttgtagtagtggcgataatggttgtcgaggaggaaagggcctatccgggaggatagtcgttgtccaggaggggagggcctctctgcgaggatagttgctgttcgagaggagagtggttgttcgggaggatagtggctgtcttgggtcaaagcattgatctgggccaagggtgtcgaggtgggtacatgctacaattggtagggactaaactaaagtaagttctatattaattaattttataaaaaataggggaccagtactgcaatcaagtcttttatgaagtcagtacatttcgaccacaaacgaaatgtgtggtgttgtgggactaattttgtaacttctgttattgtgtttgtgtgtatacaaatttttatattaaaataataatagccatgggacaaaaaaaacctcaaaattaatatcggcaatacaaaataaaattagattctaatttttatatacacattacacacactatgaaaaacgtgtccattaaaataaatagattctctaaataataataaaatatgagtgatcatactttcctggtatatatcatatcataacgaaaagatatagatacttgtagttgtataaattcatttgttgttaaaaacaaagattcatttgcagttttatgatgtgaattaaattcaaagttctgcgattaaaatatcaaaataaataaataatcatttgcatattaaatacttaatgatcacggaaatattaatttatatccaaccccacttcttcttcctttctttttatcttgcaatatatctattcatatgtaacagaattattagtttaacggagtattttaatttttacactaattttaaaagaatattttaattacttaatagaatattctttaataattttataatattattatatgaatttaaaaataaaattatttaaatattttatataaaaaaaattaatttaattatatatatttaaaaatttatattatatctatatataatcacttctatatataaaatatatatttaaactttaatttcacttacaatttattataaccacactctcttaagtataaattaaaaactatcattatttttttaaaatatatatttagacataatatataaaatatattttgaaagtaattaatcctctaatcaaattcaaattttgtcaaaatattttttaatataatccttatacatagagagattaatataaaataggtataataatgaaattcattcttttattgtatatataaaatatgtatgtatataatcatatttaaagagtacaccaatatagtcggaatagctagctaaaaaaaaattctaaaagatcaaaatatcaaactccctattatttcaaaaaaaaaaaatacattgcctaattaaaaagtttaacatacatatattgcagttaacatcacttaattaaacttgattaaaaagataattaattatacgtgcattagacctaacatcaacctagtactccattaaaaggaaattctatttttgcgtgcacacataaaaaaaaattgaaattaccattttttacctatgccaaattaaattataaaaatacgctacatccaaacttattctatatgtgtaaaatatatagtttaaagtttatgacattaggctttctttattgtcatttatagaattacgtttttttcaacaagaaaaaaaaattattttggacatcatagttcagaatttcgtaacgactgttaatctatgctatcatataagaaattaatataatcacttcatctgccaaaaatgtaaatgataccctacatatatatatctatacatatttatatatatat

SEQ ID NO: 25984 - DNA, 3308 bp, Cannabis sativa
  modified_base (1392)..(1393): a, c, t, g, unknown or other
  modified_base (1638)..(1641): a, c, t, g, unknown or other
cttcatatttctcatgctttttctgactatgttacttttattacgcataaacacgtatcagaaaatgcttgaggccttaaaaaagagagtgggaggaagcgcgagtaccccggccaagaagtccaatggtggtgagacgaccccgtctagagagaaggcatcagccgaggtggtcattgatctttctgaggaccaaactgttgtggaccctcctgtctcaaaaatgaccaagtctagggattctagaggaggtagctcagacaggctagagcaggcagagggcggatttgagctgatcaaaagcgggtccgaacagattaaggcccctgctccacctctagtactgcacctagagaccaaatgaggcagagaaatgatcactcactatgtgacttggtcggttcctgaggttaacgagaagctggctgtggcagacaatgacctttttctagagttagtcatgggaggagtcctgaaagagctttcgagggtaagtcttttctgacagtttccttttgtctttcttcaattagttaagattttgatattattccctgtatagaccggtttgaagatggcttatgcttattcttgagctaagtcagctgctgctaagaacgcttccatttccaacacaatgcggacggaagtggacttagccgagaaggatgccgaggaagccatagttaaccttggggctgtccggatagaactgggagaagtcaataagaagcttcttgctgctgagaacaaggtgaccgaactgaccaaggatctataagccatgccatccaccaaataacttgaagctgatattacctctttatctaaggatgtgaccaaccttcaagaagaaagggaggttctctggacacttttccacaggttggaagaagagaaaaaagcaaaggaggaggagcttggagacgaagttgagaagtataagtcagagaccgagcagtagaaatcggaagtggagaggctcggagggaaagtgaatgccctagagacagctggtcttgagattttttatgacttttgaaaggccaatcccaaggaaaattttgaatacttgaacgaatccaaagacatgtttctcgaatactatactactcaggcggcctacgaggaattcgaggcgaccccttccacctctccaactgatcaaagagttgaagtgcctcctgtccagacaaatgatcctccagctccagttgacccagttgacctgcacaaagagcctgggactacagctgttagaatgttcctttttctatctctgttttatctgtttggtctttaaacttggaatttatttttcattttttggacaactagcttaccgggcatcctttaatcccgagttggcatgcttttgttatctttaatgannttcattctctgtttataatcatcatgcaattgtgtttgtttttatttttaccaaatgcttcgtacaggtataggtgcccccaagtgaccaagcagacttatgaatcttggtcacttttcatatatttttacaagtatactttcttgtctattcgaggttttgggttcgaccaaaccttttgtatgcattggatggtaaattaatatcatgctaatggattcgactcaatttgaattttgaaatannnntctttattcatttaattgatcggaagttatttttgtttaccgtaagtaacttacatgaaagctattatgttgatctgatctgatctttagcttaacatgaaataaaacaaattgtagaaattaaaaattgtactttcaaaaatggtcatccgacctgagtacttgagaacttgatccaaacctttgggcgtggtccgcccagaagcccattcacttaagagcaaatgttcttttgttttgtacttgatatggtcatccaacctagtacttctattggtagtattttcttatatgttccccattctagtaccttggtaccagaacgagttgcattttttaatcatacttacccaatttgtacgcccctgactctagaactttgactacttgatgtggtggtccttcccaattaggtccgagcacacatgccatactatctttggtgtttaaaaatactattgttaggaccatatctcgcacaaaaaatttatgagctttcacttgtttgttgaaataccgagctactttttgctgatgggctatcaattttaagtttgttgtggctcgcttttcttcaatttcatcaagtgattctgcaaggagtacattattggcctcttggaattatgtcaatcttctgtgggatagtggctcgagttctacgggcagaatagcttcatatccatacgccgtggccaatggagtctgtttggttactgttctttcagttgttcggtacgaccatagaacatcaggaagttcctctcgccaatttcctttgccgtcctcaagtctcttctttaaggtatccttcaatgtcttgttgattgcttcaacttgaccatttgcttggggaagcgccacaacggagaaacttttgatgataccatggttcgtacagaaatcgataaaggattggctgtcaaactgcttgccgttgtttgagactattttatacggcaatccgaaccagcaaattatgttcttcacaatgatgtcttgcaattttttgtacgtgatggttgctaatggctcggcttctatcaacttggtgaagtaattaatcgcaaccactgcatactgtacgccacctttgccccttgggtaatggtccgattaagtcgattccccaaatggcgaaaggccaagaactttgcatctgagtaaactcgttgggcagtgcccgaggtatcttcaaaaatctctggcatttatcacattttttaacataggcctcggaatcttctatcattgtcggccaaaaataaccttgccttagaattttctttgataaactctgcacgacagcatggttgccacaaaatccatcatgtactttagaaaaaagtcgtccagcttcttattgtgtaacacacctaagcaatgccttggagaatcctcgtctatacataactccctctattatgatgtaccgtgcaaccttccttctcattttttgagctttgtttctattatttgggagttttccattgttgaggtaggctgctattggcgtcatccagttcggggatgtatcaatcatttcaatctcttctgtgccggtgatgctgggttatttgagaaactaaataggaattagatttgctctatcatttacattgttgcttgcaagtcgagctaacgcatcagcagtcgtgttttcttcc

SEQ ID NO: 25985 - DNA, 1992 bp, Cannabis sativa
tgaaaccaaaaaccaaaacaaaagtattattggggggttttgccgccatttacccttatataaaatgttattaatttttaacatataagtgtaactctctgctacaatacaccacaccataatagaaaatagaaatgcaatcctcttcatatccacaaaatgcattgggacctattttattttaaatccctgcgaatgaagtctttttttaatgcctcacagttagaagtctcctatatatgtatataacttatagataagaacacattgtatattatcaaggtaaaaacttttaggtaatttcgatagacctcctatttgtttcgacatacatgaaattcaattttatttttcgtgatcatatacgttatagctatttaagaccacctataaattttaaaaaaaattctaaatcatgtacaatgccgtaaataaaatttacatcttttattacacgagtgacttttttttaatacacatactaggtaactgtttaaatcttattattgacattgtaaactatttagaagtttttcaaaatttacaaataatgataaatgtgatcatgaaaaaaattagattaaaaagctttcttggatgccaaaaaaaatagagagtttgccataacgacctttaagaggcttagtatgtaaatttctaaaactataatttatatgacaaaattatctattaataaataatatgagatatatagaatatattctatatattttaatattgacttatttttttagctaaagccactaaaataataacaattaagaaaaactatctttaaataaataaataattaccctataatttatagagattcagctacgaatatattttatttttatttttttttgaaaattacaagatctgtaaccaaaatacagacaagaaaacatgttacaaatatccagaaagattggaacattgattgttccagacacactctttgtcacttcctaaagctgcttgagccaggttatgcgctaaagtatttttcgatctttgaataaacctgattgaagcacctggaaagtagaacaaagaggaaacaatatctataatgaaacctgaaagagcagggcggtcattgaccttcttttgaacatttgtgatcaaattctagtagtccgacaatatgagctgaattgggaaacaaactgcttaacaccaacttagagcatggcgagctttcgcttaagcaaaaataggaggtaggccagagtgagctgaagaggaaaaacctacaatgattatgttgtgagagtcttggactacagcaccatatccatgaagatttaagtgagaacgaattgatgtatcgacactaagtttaaacattcctggagagggcatcaagggagagtcttccatggatgattgacttgcatggggttgaactttgtttgtacatttttatattcctagaggaaagaaataacaaaagattccacttttagatccatagccttgttatcttcaaagatgatcttattgtgcttgttccaaattgcccataaaagaccgaaaaaacagttaggtcttctttactaaaaacttcaaaacctcttaacaaaaattctttaatgtcacagtatttgtttttagagaaaaaatattagaacttagactgtttccacaacttacctgccctagaacaaagcaatagggagtgagtgttagagtcaatatggttaagacaaatggagcagtaagagttatcgaaaattttcttggtaaagaggtttagcttaaaaggaagaagatgatggaaagctttccaaatgaagtgtttgatttcaagggggatattagatgaccaaacagatttccaccaaggcttgagagcatcagagtttgaagtactgggataggggttgtgggaaacacttacttggtgcattaaagtccaagttgagtgtggggactctctttagcagaaagctggaagtgtagagcagtagttgttgggttttatgc

SEQ ID NO: 25986 - DNA, 8116 bp, Cannabis sativa
cgttttattagatgatcatatgaatcctaagatttcagattttggtttagcaaaagtttttgttgttgaccaaacacatggaagtaccaatcgtattgttggaacttagtaagttataaataaagtctatttattatattaattccatatttatatattgtttatcactatcaattataaatattaattatgctatttttgtagtggttatatgtctccggagtacgccatgcatgggaaattttcttttaagtcggatgtgttcagttttggcgtgttggttctagaaattctcagtggcaagagaaactatttttccgatgaatcatacggtagtggagacctcttaagttttgtaagtggtattcacctaaattatatatatatataagaataacttttaaggtaatctcatatgttaattaatatctgatttattgtgtaatactctgcactctgaaggcttgggagctttggaaagaagggacttttttggaattgttggatcctacactaagaaattcctactcaaaaaatgaagtgattagatgcattcatatgggattattatgtgttcaagaaaatcctgttcatagacccaccatggcaacaatagttctcatgcttaacagctactctgctatacttccaccacctcaacaaccagtagtcctttctcatcgtaatagaacacaatcaagcacaacaacaactagtggtgagcaacagttttatgaatctatggctagttcaactcaaggctctgctaatgatagatccatgatcactgaaatctatcctcgatagtactggtttgacacaattaattctcaactgtattttctaaattagacgtctctatagttaatttttgtacgattcaactttttttatatgtatatgtaataatattcaagattagttgctgatctgtacgtaaatatatgcaacaacaagaatatatagatcttttttgttaatttggacgaagtagcagggttgaaaagtatgagtactccctggccaagacaatctttccatatcaataatacgttgccagcttcgttcttttaacttttccttcacgtatgtcttattattcgttatggaacgttgattttcccaaatgaaagttgcttttgaatcataaaacttaaatagtggagttctatacatttggatgaagattctcgttaaaaaattattcattgtcgtttgaaagggacaaataaacttcacatttacggatttgattcttcacagaataatacaatctaattttttattagctatactaatgcagaataagattgttctcaatcttcgaatagaaagtttatatatataattattaaaacaaactttcatgtttcatatttttaaattatatatatgtgtatattattgaaaaaaaaaaaactatatatatatatagttattgtagtcttaagggaccacatcacataatattactggtgtaaataaatttttaaggataacataatacattgatattatttgcctacatttgacttttgttaatattattaccattggattattatttttgttttaagtatatagtactttgtatatatgtcaaaataaaaataaaaaaggtagagttagtatataaatatattcattttatttttatttctagacaagtatacattgtgaaaaacttaattattatattaaaagtaaatggaaaaaataaaatggaaactaacaaaaaatattagaattttagttattttaacttttataaaaatactgtcatattaaatttttttaaaaaaatattatatttttataaaataaaagtgaatcacaaagcataacaactaaaaacaatagtgaaacaattaaaaaacaactgtaaaataataatgaaaacttaacactgtatacataataaaatttacacagtatttttttaaaaaattctgttccacaattaaaaaaattaaaaattttatacggtgtaaataatcctaacaattgggaacatagaaacaatatatagataaattaagtattagtaattatattttgactttcaagtcataaaaaataataattaaaacagtagaactctgcaaaataattactattaatcaattattaataaatacataaattcaattcaatcatgtacttgaatattatattattgtgttttaaaattgctaaaagttattaatggtacttatactttattggatatgtatttagtatcaaaatctcatgtaatttaagaaaataaattttaagtaatattagtacaacttataaatggtgcgataaatggtgttggacacctattgtgttttagtgatgtccatataccatatcaattaaaaagcgaatacttttcccttgatctatattaatttatgtacacaaatttttggaccaatcacgtcaataaaacacaattcacccttaactcataattcatacatcaccttcccaccacattcaaaactaaattcataaattctctcatttattattttcaatcgatcctatttgactttaatgactataacgacttacccctcaggatgaagattcaacttcaatatcacgcaaaacaattccccaacgctgacttgactccgttttcattgatacattcttatcattctcttggaaaaacatataaggatctgtttggaaagttatttgagaattgaaattaaatataatttgagataattacataatttaatttgtttatttgaccacacaattatacagatctcaattattgtctccaattttcatactttcagtgtaactaaatataaaaaataattttaattatttaattaatataataattatttaatataattttgtctttattttattttattttctcatatatctaatatttttttttcatgtataatactattttataatatttttttgtgtgatttttttgtattgtttgtaaaaaaaattataaaaatcaatgtacgaatatatgatatttgattttttttccttaattaatattatattttgaattttcttttaaattaaatgtttaatagatataattgcaaattaatataaattttgattgattaaaggctcaaatttattttattatttaattcaatcaatataaaaataataaatattaaaatttctaaatttagaatattatacaccgaatagaataattgaaattatatggaagtaattagataattttaatagataaatattattttaaatattaattaataaaattgtgataaaatttgagtttattttataattttttttatttatttaaatattattaatatataaaattcattttaaatatttattacataatgataataatattatacaatattatagaataaaaatttatatgtaactattactttatatctaggaatgcatatttctcccatgggatggaaccccacgagtacccgctcctaatagggtaggaatttcctgtctaaatgaggaacgaaactggaacaaagattattttttgtctccaaatgttatatttctagtaatattttataatttatgtttgtatttttttttactaaattagtattttttttttatgaattttaagttgtgttttaaataataattaaggtgtaatattataattgtgatgtaatttaatatttttaaatatttaaatttttattataaattttatatttttatagtgtaattacatcttatattactacttacatctaatactatatagttatcgtatagtgtaattactatcttaaattactaggctagtaattaaatgcttcgaaataccctctcgttgttcttgcttataaatcatcataaggaaaagcttataaccagtcaacgttctgtgcctttatcaaatctgaaaaaactacacgcttaccaaaatgatcatgctcattcccataaaaattcccaatactcttttgtttatttcgtcgttactatacatctcgatcgggctaagccttggagctaaccccgtttacctctaccactcctgtccaaacaccaccactttcgccccaaacagcatttatcaaactaatctcaacaaccttctctcctccctttcatcgaatgccaccagcgaattccataacaccagcgccgatgaaggatccccctcccctgtatacggccacttcctctgccgtggagatgtcaacaccactgcatgccgagactgcgtaacgttcgccgtcaaagacatcctcaagcggtgtcctgttgagaaagagactgtgatatggtacgacgagtgccaattgcgctactccaaccggtcgttcttcggcaccgtatacacacgtcctggagtatatcttctgaacagcggtaatattactgaccagaaccggttcaatcggctagtcaacgagaccaccaaggcggcggcagctgaggctgcaaaaggcttggcaggggacaagaaattcgcaactaaagataacaatttcaacgggttccaaaggctatacacccttgcgcagtgtacaccggacctgaacgcgtcaggttgcagcacatgtctcaccgatgccatcggaagtcttcccatatgctgctctggaaagcttgggggaagagttctgtttcctagctgtaatgttaggtacgaggtctatcccttttacaatcaaaattcaacaacccccttaccgccaccaacagcacaacctacaccggctcctccaagtttcacatcgagctcaaatggtatttttctccacaatggctggtctcatttaaattcataattggttttatttgagttttataatgttactatgtgactgctaatttatctttcaaaaccctattttactcgtgtagaataaaaaagtatttgttgttatttggaagaaaaaagaaacgtgcctactactctcttggattgtcattaattagttagattagatacgatatatgatggctctattttgaaaaaaatgtgaatttataagtgttaattatgtcttattttcccaggacaagggaaaatctcagcccgaacgatcattgccattgtggttccaattgttgttgctatactcctattcatattaggattctgtttcttaacaaagagagcaaaaaagtacactttgggtaaagattaatctagatgccttcaataatttgttatttactatatttattcatatcttaccttggaaagggaagaaacaacaataaaataaaatttggctaagcatgaaaaacattttggttgtgcagctaagagggttgacgatattactacccctgagtccttacagtttgacttggctacaattgaagctgccacaaacaagttctcagctgattataagttaggtgaaggcggatttggtgaggtttacaaggtatagatttcccaagtgtttactcattgatatacgttggcgttatgcattagttactcaaaacgaatacttaaaattcattgtcagggcacactttcaaatggacaacaaatagctgtgaagaggctatcaaaaggttctggacaaggtgcaatagaatttaagaatgaagttgtagtattagctaagcttgaacatagaaaccttgtgagattattgggattttgcttggaaggagaagagaagttgcttgtctatgaatttcttgccaacaaaagccttgacacttttctatttggtatgtcctgtcttattattcataaatttattttcaatattacttatgtagctaggtgcttagacattttctaagtatgtgtgcagacaccgagagacaaggacagttaacctgggagatacgttacaagattataggagggattgctcgaggcattctatatctccacgaagattctcagcttagaattatacaccgtgatctcaaagctagtaatattttattagatgccaatatgaactcaaagatatctgactttggaatggctagaatgtttgatgttgatcaaactcgaggaaatacaaatagaattgttggcacatagtaagttcttcgactttagtgctctcttatatacaaaaatacaagatatatatagttatatagttattacaacattttctttaacttcatgagtaaattgttttattgtgtcatatcattggcagtggttacatgtctccagagtatgcaatgcacggacaattttccctcaagtctgatgtgtatagttttggcgtcttagtacttgagattatcagtggtaaaagaaacagtagtttttatgaatcggattatgctgaggacctcctgagctatgtgagtttgattaaaaaatttacaattttattttgattctaaaatgcaaagagaataagatatccattatatgtatgaagttattgattgattaataagtatacattgtaattacaggcttggaaactttggaaagatggaaatcctttaaaattactggatccaacactggtacaatcttattcagagaacgaggttttgagatgcatcaatattgggctactgtgtgttcaagaagatccagaggatagaccaacaatgaagacaatagttcttatgtttaatagttactcaatcactctgggagtaccaaaacagcctgcattttacaatagaacagatgtggatatgccttccatgggactaaagttggatgattcaacaagtgttgggtttccagtttcaatcaatgaagcatcaatcaccgaattataccctcgatgattagtatatttaagttattaaatattatacaaaatgtatgctcatcctttatattttaccttctaaatatgtaactttattagttgcttaggtaatgttaagtcatggacggctagaaggcttcaaaaaaatattgtctttgtttcaaatccatctatataatattaagtaataaacaaaacgattacaattataacacactgcaacaatttatattattgacatgaattactaattataatatgagtcattaaaaaacaaaataaaaacaattcgaactttgttcaaaatatactctaataattaataagcacatttcatcagctacctgaatattatattatttagtttcactgatgtccatatcgtgcaacaaaatgccaatacttttccttgaatgttattcatcacctgtaaataaaagtaaaagctccggtatcttctcacatttatttttattttcagccaatcgtatttgacttaatgactatatacataacgacttatgcgtaaggatcacgatccatcttcaagtataatctttccctaaattctctccttgttgttgggcatcaatagaagaggcaaacaattcatccacggttgacttacccagttttcaatatttcatttctcatcattttctttcttttttttctttttcttttttatgcttactaccatagtccatgatcacatcataattcataagaaattaagaaagctcataaacataacaaactcaacttttgtgagctttttatcaaacctgagaaagctgaacgaaaatataatgatgctaaattccataaaaaattccagtaccctaattttattacaactgtcatttctatttatctcgatcggtctaagcgttggagctaatcaacctacttacctctaccacatctgtccaaacaccaccactttctcccccaacagcacataccaaactaatcttaacaacctcctctcttctctatcttccaatgccaccaccagtgagttccatagcgtcaccgccggtaaaggctcctcctccccaatatacggcaacttcctctgccgcggagacgtcaacgctactgtatgccgagattgtgtgacgtttgccgtcaaagacatcgtcaagctgtgccctgttgagaaagagaccataatatggtacgacgaatgccaattgcactactctaacaagtcattcttcggcaccttatccaacagccctggtggagcctatcttgtgaacactggagacatcacggacctttacgagttcaatcagctagttaacgctactactgaggtggcggcaattgaggcggcgaaaggcgtgggtggggagaagaagtacgccacgaaa

SEQ ID NO: 25987 - DNA, 2507 bp, Cannabis sativa
catggggactttgtttcaaaccatataaagatttccaaagacgacagacttaccgtaactccccctgagcaataaacccaggaggttgttccatatacacttcttcctgaagatttccatgaagaaaattattttttatatcacactaatgcaaatgccaatgatgattagttgtcatggaaataaacagtcgaacaaatgtcaatttagcaacaagagaaaaaatgtcacaattgtccactccataggtttgaggataacccttagcaacaagatgggcctttaatcgagcaattaatccgtctggattgaccttaatcgtgaatacccatttacaccctatggctcgttttcctgaaggcaaatcaactaagtcccaagtaccattcgcatctaaggcattcatctcttttatcattgcaataagccaatcaggatgagatataacttcatgaacagttttaggaatcaagatagaattaagggaagcaataaaagagcgaaaagacaaatgagtataagaaacgaaagaaaaaataggataattaaacttgtctttacctttatgtggagcaatgagaaggtcatcactgctgggctccagatctcatgacaaagaagaaggttcaggacataaagcaagaggtggacagttgaagtgctctttaataggaggtggaggcatgtcaagagttgtgcttgagaaaggttaagtaatggaagactcttcacatagtgtggttgagataggttgggtagtggaagactcttccggaagtgtgtcagagagacaggatgaggaataggagactcgtctagaatgatgtcaaggtcataagacgggataaaatataccaacaaatcatcatccttttcttgatgagtaggaattgatagagacgtaaaatagggtgtgttccatgaaagtaacatcaatggagacaaaatatttgttaagtctgggacaatagtatctataccttttttgaagacgagaataaccatggaatacacacttcaatgatttgagatataatttggttacctatggacgaacatcatgaacaaagcaagtgctaccaaaaattcttggctcaataggaaatagtggccggaagatcgtgtatgaagatcgtggacacactcatattgagtgtttcttagatgcagattgggcaggtttcgaggatagaagatctactctaagttattgtgagattggtctctttaaagatgagattcttctagtatcattcccaataataacaatatcatccacatatactactagtagaatgataccaatagaatattatttatagaacacaaaatggtagacttgctttcatcttaccaaatttctcaatagccagactaaatttgtcaaatcaagcatgagggctttgcttcaaattgtatagactttcaaagatgacaaactcgccctgacttcccttgagcaacaaaaccaagatgtacctttagaagatgaccatgaacagaaacattcttgatatttaggtggcataaaggccaataatgaatagttgccatgaaaataaataatcaaacaagtattaaattagcaaaaaatgtattgcaatagtttacactacatgcatcagaaaatttattttcaatttattccacataaaatctgaaatgctcaggatccacttctcatcctctttatggtttttatgcatcttttggaaaatgattctgattgaaagaatctaacttcttatgaattgaactagacatgcttcgtaaacgtgatatagttttctttaagttatcaaattatttgttgcaacctcttgagtagaactcatttccaaagattagtctaagaaactagggatcaattaggtataaaccagcaactaaccccacacttagtcaaggtgggatcctaacaatacaccggctcaaagtcgacgtccatgatggctcactagcccactaggatttttttgagggtgcatgaattcgatactatttgttacgactgaggtagaactcactctaaaagactagactaagtgaggagggtgtccacgtagttataaaccaccaaccaatccctcactaggtcgatagtgaggagggtgccacatacactcaaaaaatctggacattactttataaagaacttagactggaatgggttttgccatgtttgttgacacaggccctactaagtataccggtgggaagcaaaagaaaagttaagctttggaggactacaatgttagcactactttgggctgtgtggaatgagtgaaatagcagcatttttgaaggacaagagagatcagcaacctttgttttggagagaataaaattctggactgccacatgaatctttaaaaccaaacactttgaggccttttcttttctagacttatgcagggattggagtgatttgatgtgaaactcgggatttctttctttttgtttgtttggtcattcaatgagctaactcattgtattgttataatttt

SEQ ID NO: 25988 - DNA, 1281 bp, Cannabis sativa
ttattctatttcttgagttagttacattagttagttaagttgttagcatcgttggttaaatctcatttaactaactcatctttacttggcctatatacagcttttctgtaccagacccatttttaactaatgagacttttttttcttctcttctcatactctatttttctcatactactaaaaaatgaggatgtttgggcctttttaatgagattatttcaaatatgacagcaagataaacgttcaaaaactaattacacaaccaaagcatcaaataaccttgataataaaaaatgataataaactagaggaaatataaaaataagagatcgagaatcatactgactagaaattctaaaaattaaaaaatttagggatttttatactagatgccaaatttagcatcttttgtacatttctaacttagtaaggttttttaaacttttttaaaaaaattgtttttcaattttatttttcaaaaaattctttaatttcaaaaatacatctattgtttatgtcatcttttcctcttttttcttagtctcttttacatgttaacttcctctctctctcttttttttttttttctattttctctttcatcttttcatttttttttctctcttcaaattaaaaaataaatatgatattaattaaaggaatatttacaaaaaatgactaaaaacttatattttttttacttttttataatgacacatttttttttcattatttttttcttattttacatttatatggtcgttagtttattaggagacaactactgatgcgcatagactccacttgcatctagtgtggggagaacacgtcaggttgcgcgttggaaagttttttttttcagtttatgtcattctcattgtcagattataatataaaaataaaaaacgtatatcaatgttgaaagtgacatgggtgttaactaaaggctattttttttaacaatattatattaaatttatatttgactaatttaatattatattttgaatgttgaccaaccaatagtattattctttttaatattttaccattttttaaataatttttttataattagctttatgtttcttttttttttaggattattgatgtgttgattttaatttattattatttgtatgttgatgtttgaattggcatattaaagaggagttgttatcctaatgtttgtttgttgttgtagagtcatgtattaaaattgtttgtgtgctgtccaattttattatttatttatgtattcaaaagataacattttaaatt

SEQ ID NO: 25989 - DNA, 3855 bp, Cannabis sativa
tatagttgcaccttgctccaaccctttcgttgaatctattcctccagtcccgtctccagtgggtggtggattttggtggctgtttttttgatcttagcttctttggttcaaactttactttagatttttttagaacaaccctttttgctgatacaaattgaagagttttagtagagcagaccagagctggaggatgttgggctgagagtgaaatagaagaagaagaaagataaaaaaaaatagaaaagataaaaataaaaaaggttaattaattagtttttaaaattatttatttatttattttaaattaattctaatttggacaaataaaaaatcaacacgtgacattttttggaacaataaatggaacagttaaattaggtacctacagactaaagagaatcttgagcttaaggctgttgtcacaatttttcgagattagagacttatctgcattaaaatactttttaaggagttatgtcacaattgatatcaacacgtgatattttagggacaaattaatggatctataaaaagaggaccaacggacttacaagaatctcgagcttagtgactattattgctatttttttaaattgtggacttatatgtatcaaataaattttttgaggacgtttgccccaatttttcccttatttggcatttttttctgtattttatttttaaaactgcggtttaaacatggaagatgttgaatagttattagatgtttattttgagggaaaaaaaccttcaataaaaatatttatggaaatttaaatattgtagaagatcgtcataatatagtgataaaatgatttgaaaaaaaaaataacatgaaatataagatttgataaaaaagaaattacaaaaatatgacaatgttctcaaaattttgtagtattttataagtttattttgaaaattgttttatgaaaataccaaatacatacatatatgtgtttatctataaataaatgtgtatttggtagagaatgtatgatcaattgagaaagagtagaaaattataccaaatgttattagtactcatgtctctctttaacaaaaacaagtaattttttatttttgattttataaattatttatttttaagaaacaatttgttgccatgatgccaattttcaaacaccttcttaatcttgtattttttttttttttgataaatttaattacaccaatttggttaagcttgtatctatttatttgtgttttttttctgttctcctatcaaaacttattttatatatctaaatttgcatataaggcatgttatttacctataaataccatatattcaacgaaattgtgaccatttagtcttcattatattaatgataagtatgtttagattccatcggttaataatatgatcatcatgtttaatcataattttttttgttaatgcatagaaagaactatatatagcttagtatatcctctaaaaccatattcatatacatatatgtaaacaattaatatggttcgtctactttagattaaacatgaaagtactactcaaattaaagagctataataataataatagctgtattaattattatttaattggctatatgatatatgtaggatcagtttggtggatgtctaattcatcaaattaattaaacgttgacgtatacttaataattatatataatacatgtgaccaaatattaattaatcccttagaactaccttattttttcttgtaggaaaaaattaatgccccccacagttttgttgcttcccaaatttcgcattaaattaattaacaccttaattatataagttgattcttctaacttcaaagttccatctcttttatataaatgtatatgtttatacaatataatacaatattatgtatgtgatgaataagatgtatcataatctatgtttgggtgcatattggatgtttttcaatgcatcaaaggctttgttcttgatttgtatacttctgctggcttcattctacttctcacaaatccttcatggattagaattagatgaagattccattagtagtagtaagcaaaggttatatcgtaagaatattaattatacttgttctttttgctctattatttggatgaggtagccattatctcattaattacttttctcaacaatattactcatatatacacttttacatgatatattatgtgtaataatatagttctcaatattttgtaacatatagcagaattacttcttgttatatataatctctacaattatcacttatattaatttatgtaaaagataggttacaatttgaaatttttgatgttatagaaattatgataagtccatataagttacatatcttttagtcttacacttaatattgatcagtccataatatcataaacaatatataaagagatctaaggtgctcatattgagataatgaagtttttttttttttttttttataatcaataagcacttgttagaaaatacaagacttgataatttttaaagctatttcctagagagtttttttaatgcttaaagataggaaaaataaacttttagacaaatgtgataataccttgttcaaatttttgtgatccatactaatctacactcaaaattatgaggtagtgtttatcttcttcttcatctattagatactatatatgttatataatatattgttttgtaatttttatcttgtaatttttatatatatgtactgtaacatttgttaatcaatctcttattttgtccttgtattatgactttcgaagaacgtgttaccacctagccctaggaaaggtccacttaggacaactcacgtgacatcccatgtcaaactaatgtcaaaaatgtacacatgcaagtaaatgcaggctgaagtagtcaatcactttgaatttgactaataataatcagtctcggacaaggtcaagatcttggaggaatatctgtaggggacttgttctacagtataatatttatttaagaatactcttagaaccaagcaaattatattctaattgagtgattataattgaatagagttacattaaaaaattaaaatatcaaaaaatatcaatgtaacaataataacaataaataatcattaatattatattataatagaattatttttaaataaatataatatttatacatgtattataatttagaataaaattattaattttacctaaataaatttctaaaatatatgtatatattttattaaatgtaattattcttatataaaagtatacttttgttaatacgaaacttaaaaaatgtataactaattatagtttagatgttattttaatttataattgaccccaattaaaatttaatttaattttataacaaattaaagattatttttgaataaaatattcttacattcagattctactatatcatgtaaaataatttggtgtggacactaggaggaacactaactgtcgtggcccccacctgtctcttccataccaatggcaaatgagtttctcataaaacataataaacattgagatagatttacacaccatatttttccatgtgttcatagttggctcacaacatcacctgtcacaatattggacaagttaactcttctctacttaccactcagttaggcctgctatgtgggcttagtgtagagaaattaaacttacaaccctgtattactattttataattgtatatttcatgattaattggttgtttaggactatttaatggctctctttataaatagaagtcatcttctcattactaaggaattcaaaatttagttctcaagtcaaatcagtcatggattgatagtcctggattgatgatgttcaagccgac

SEQ ID NO: 25990 - DNA, 3359 bp, Cannabis sativa
ttttttattatttatatactaattaatgaagagaatatatgtaattaatgataattaatctcatgataaagacatgatgtgatgcatctaattaattacatcattaattgtgatcttctttcatctaatcatcttaattaatcctctatatttatttattattacttttgcatttgcttaatatttatgtgaatatttacctaaacaaatcccattcatctattaattattgtaatatgtatctaaatgttttttattattatgataactattactatctttaaaataaaaaaaaaaaaagtgagatagaaacaaatacgaaaaaagtacatttagtgtattaataatattaaagaaaattatacttacatagatacatgataatatttaaaacgaaaattaaaaatatataaatataaatcttataaaaaaaacaaagaatcgttaatcacctaatactaaaaatgtgaaaattaaataaataaattatcaaagccaataatacaacaatggggaaaagtccaaaatgagaagaaaaatacatatataatacaaaataacaatattaataatactaataatatttgtttaatttatctggtttcagacatcccaagaaaaatcacattatatctttttcttataaaagaaaaatcaataaaaacaaacatataaagatttgaaaagggcaaaacagaaacaaaaaagaataagaagggcaaaagtggaattaaaggtttgagggttacggcgctgtgtctgttctgtatgttttggttttttgccaataagtccagtgatttagttaaaattatgaatatgacccaaaatattaaaatctatttaattttataccttcttttatcttaggtagggcactttgaagaacaacctctctctctctctctctactcaatctctttctctctctagatttactgtccctcaaattcccacatgcttgggattttctctttctctttctttcgttttctcacccgccaaacatgtactaatatatatatatatagctatatatagctagcttaaaacaaccctaaactactccactgtcaaatcagtaagtttttatttatttatttatttctccctacattcttttaaatctccctctctctacttatttttgccccaatttgagcaaagattttttgtgaattcaagtttggttcttgggtttttgatcttatttcatcatttctggaaattggaaacatatatgtattgaaagaaaaaaaaaatcatgagctggattttgatgggttttagagcaaaaaaattacaactttgaaatgggctttagatttgtaaaattcattgctttaaaatcatgaactgaaaagttatgattttgatgaaaacccaaaacagggaagtgtttgtttttttgtgattttgatttaatttgtaaaaatctaaaatgggattgatgatattgcagtattggtctcaataagaggagaaagattatatatatatatatatagatatatatacaagaggaataatgaataaattaatatgtggaatttagtgttttttgtttatggttattggtttttttcagtaataaggaactgatcccatgaattttgaacacacagatctgtgagcttacagcaccaagaaataaaaaagaagattttttttttataaacacaatcacagtcaacgtttagctacccagagactttgacacctgtaaccccagaatctaattaatccaaacattgttcaaggtttgtcatttctatatatatttttaaatattgttttataaatatttatatataatgacagtgagtgagtgtaatatatatgtatatatgtctgccatttttagggactgaaacagccagcaaaggtgattaaatcggcggcttgtaatgaaatttacttgaatctgaaaagaaaaagaaaattacagatcaaagtctttaaaaataggagctttgctatactattatatagtgttagcttttttctttgtatttcggctaaagcttatctttttctttaaaacccttttgttaggtatgaagctttatttgttttttggcttaatttaattatatatatattatataaactaagctaagctaagctaagattaatacaaagtcagatcttttagcctgtttgaaaaaaggcttacatacagtgagtagtggtatagtatatagtgctttcttttattactcatctgaacatatagatatagtacaactgtgttaatatatatatataatgctctctcatttgtatttgcagagttgagagagagaagaactaaaagcacaaacaggcacagcacagcaaccaacagcagcaccaccatcactcacctctctctgcaatactgcaaaaagcttaaaagagagaggagagtgagagagagagagagagtcctcttcttctcttcactgacttagactgtgatatatcaaagcgtaaaaaaaggtctttttatcaatacaaaagccaaagtactctctgaattatcgtcatcaatgcaataggacacagccaagcccaaccccacctgcacctctcatcaactctttacctctttctctttcatactcaccaatttctctctctctcctcttttttctcccatgtctaaaggataagaacaagaagaagaagaagaagagggagtaaagattgaagctttaaagttaaaggtgaagactttttgaatgagttcgacttgggttatctgttttagtttagaaaaggcatgaaagtactgctgttatggaggtggaggagattcaagctcaagccttaaagtactcgaggattaatggaaatggcagtaggaaagggggaaacgaaaattacccacctgatgaagaacaagaagaagggagtcgagagatcaaaagggttgccggcgccggagctgctactactactgacctatccatcgttaacggcggcggaggagctggagccaatcggcttcgagggtggcaccattcttcaagaattattagggtttcgagagcttcaggtggtaaagatcgacacagtaaagtatggacatcgaaagggttaagagaccggcgagttaggttatcggtaacgacggcgattcatttctacgaccttcaagatcgattgggtttcgatcaacccagtaaagctgttgaatggttaatcaatgcggcttcggaagccattgctgagcttccttctctcaacggctcttttcccgatactcctaaacagcttagcgatgagaagaggggtagtgttggaaccaacaccggcggcggagaacaagggtttgattcagctgaggttgaaatggacggtatcaattaccatca

SEQ ID NO: 25991 - DNA, 1980 bp, Cannabis sativa
cccacaacatattccaatcaataaaattcaaaaatacacataaaatcaaaacatgtcatgtatgaaccaagcttgagttttcaaacttaaatttgtgcatccatcaccccacaaccctaaaccagttgctagtaccccattcaaactaaaattaagcttagaaactggattacaaacaattctaaccctaacagccccataacccaaaattgcacaatcaaaccaaacttcaaactttttttaaaaaaaaactaaaggattatggtgctaaggcttacctcttcttggaaactcctaagttgtttgctgaattccagaaaaaatgatgaaattgctggttcttcttggctttggtggtggtcgagcaaagagagagaaagagaaatggaaattctcttaattttttatttttcctttaattctttgttttttttccaaaatgtaaaaggcctattgcattaatcatatgctggaataaaattggctaggtgtcaagctctaagacagccacctatcccccacttgccaaattaccataatgcaatggtgcttaatcttaagctaattcaagcctaggggtaaaatggtcaaaaatcataaccccacttaaacttggtattctatttatctctaatatttatcccactaagaaaaaggttgtagactaactcatgtgatttaaatagccatccatcgcattttttgtcgtcgctgagcaaaaattgtaaaaataacataattcatatataactcaaataatacctctaaagtttataaaatctcccgaattgagaaattataactctaatgcccatttctaaaaatgggacttaaaattaaataaattaataaatatttatagaaatattaataattaatgttaattgcctttactaatccatattctaaaatgaggtcattacaaatgtactcttggcatgtgggaccttgtgcaagagtagccattttattttattttttttttgcgaaaactgggtataacataaatatatttaaattgtattttatttgataattatttatatttattaaattaaaagtgttatttaaatatttagatgagataagtggtaaaattagaaaagacacattagtttcaatagttaaaataaattggcaaaaatttaactctacaacccataatggaattcaaccatgggttagatttaaagtccaattgtctttattttaagtttatcacatctaatttaaccctagtgtgaaggctataaatagaaagagaggatagttttgttagacaaatgattgtaagcaattcacccatagattttgaaataacaaaagtgatcacacaaattattttgattactaaagaccatctccagtgggagatttaaaatttatactaaatttggcacaaaaaatgagtttgtgttatatttggcccattatttacaattgtgctccaatgcataagatataaaataagaaaaaaaattaagtaattatattgatgatgattctattgagaatatacaaaaattattttttgtattcttttattatttaaataatggtaatatgataaataaataatgtaaagcttagtaaaaattaatgaatcataataattagtggcattatagtaaataaaaaagtaatacttattgtgggctaaatttaacatacaacttttagcatgtgtcaaatttagcacacttcttacaacaccagtgtgtttaaaaattaaataaaccaagatctaaattttgtatataatctagaacacaataataattagataataattaagtatacatactttattgatccataacaattaacgcaatttgataggacaatactattacctaagttttcttctctagctctctaaatcaaaagtagttttatttatctgattatcaaaagtattcaattatgtatttatagagtaagagaggagatttaaccacataaccctagttggactgggct

SEQ ID NO: 25992 - DNA, 5268 bp, Cannabis sativa
  modified_base (28)..(30): a, c, t, g, unknown or other
acgtggcttggcacgtaacaatcacctnnnatatatatatttatatatattccactaacgttatgtggtacttagattttttttttcttttcaaattactattttgctttcttctattaacactctacattgaatattattcttttaactttaatacaacattaaaaaataaaaatacaaaaactaaaataaaactcattgatgcacgtaattataattttttgtagtattgctattaggtattagtggtgcctactatctagcactttctagacgtatcattctacaattagctagtaatactctctaaaagttattacattaaactatatgggacccgatatttaatttgaccaatatcaatatttacacgtagaagagtactagacatcgttgatatcttttatattctttttttatataattacataacaataattttagtatatatatatttgaaataagaaaaaaataatttaataattaattaggtttatttatggtatgtttgttgaacttctagtttttttaatattttttttcgaactaatatatttatttgagaattgttggggcctagcacccttcctatgtgttaatatcactattggtgcaattaagtatcagtcccatatagtttaatataataacttttatggagtatcgttaactaatcgtaaagcgacaagtctagaagatgttaagcactactcgtacccaataacaatgctctatttatttatatccaacgggattgcaaatgctacataaggtgttaaaaaaaacctcaaaactttcaaaattatgtatcataaacgttttcttaaataaataaataaaaataatatacttatgtaagatcaaaatttcttgtttatttatttttgaaagcacaaaacacttataatacaaaagtacctctacctataaatttaatttatacaatttgacctaactaaaagcaaaggtgattaatcagaaaacataaggaaaaaagaaaaaggattacaccatatgaagaaaacaagaaaaaaaaaaaaaaaccataatttgattaaactttatacaacgttgacaatagagatttgatggtctacgaaagaggaaacatatgaggtatcgctaggtacttgagattgagaactctggttggaagatgactcggtatagaaaactatgctctggttactgtccacaacaagttttagagagcgtggcactggaggaagattcaactcaataattccctcaagcatttgaacaactctactcattgatggcctttgaaattcacagtcttgaatacaccaacatgcaaccacacaaactcttttaagctcttctatgtctgcatttccatccagtcttgggtccaacaggctaagcacatcacctcctctaactatatgacttgcagcttggcttgcaaagaatctcactttcccatcttcacaaatctctgtgtttctctttcctgatattagttcaaagagcaccattccgtagctgtaaacatcagctttgaatgttattgcaactcctgaaatccactcaggcgctagataacctcttgtccctcttatggttgttaggactcgactgaattctctactcacaagctttgccagtccaaaatctgcaactttaggattgaattctgcatcaagaagaatgttctctggcttaatgtcacaatgtatgatgcactctctacacttgtcatgaaggtaaaccaaaccccttgctgtcccaagtgctatttggaatcgtgttttccagtccaaaatgttggaacccttttcgcagaaaaggtgggtatttaaagagccattgggcatgtaatcatagaccaataactttttagttccctgagaacagaacccacgtagccgaacaagattgacatgttgaattgtgccaattgtgctgacttctgtcctgaattgtttctctccttgatgaacactttcaagtttcttcacagctacttcagttgagtcagacaatatacctttgaaaactgaaccaaaacctccttcgcccaatttatttgagaaattcttggttgcattttgtaaatctctataacgaaagaccatcaatgaacctcccactgatgttcctgttcccattgaattctttctctgtctcaaaattgagagaaataaacagcctagcaaagatatcaagaccaaagcaaagctcaccacaaccccaacaaactttcccttgttttttttaggacttggaaattccgaggctgctagtcgaatatagagagtccttccatttgtgtcacctggtgaaagctgctttagatttagcaaatctcttgtccatattgaacagactttattatcataagcataagctatgcatgagcatttgcttaagcaaatagattcacattcttcaagactgccaactctcttggattcttcatcttcaggtgatgacacgcttggtagttctaaaaatctgtctttcttctcatttgtaaggctggtattgtttccacagtgcaattcactctttctcacgcagccttcagagtaatcctgcaaatcccaatcattctgagattttggcttaaaccctttgagacattgacagaaaggcattgagttctcactgcaacttccataagcaccacaaaaagcataaacttgacattgttgtcttggaaaagaccatagtaaattccatctctttgaaggctgccctaactgcttcatctgccctgaaacatccatcacaagtcgagatacaccagaagtgttatgagcatacatagtaaataagatatcactttcgtttgaaacaaacttgaaatagcaaataggatcgcctctcatttctgggaccaaggtaaagatgtctccagtccaaggtccagtggtccagtagctcctcgacctattccaaagaataatataaaaaccatcacttgggactagctcaaaagtgaagagaccaggggaaggatcctctaaattcttccatgaggtgagaatttgtttcctctttgttattttgttgaatcccaaactagctccaggaagccatgtatcagttggatagtcaaaactttgccataagagcttggattcatcaaattcatcgtctaagagtactatatttccatcatcttgaagagttgccctaacagaagtaccagaagtggggaagctcacatttgttgaccaaactgggatcttcaactcattgatgagaactaaattgctatttgatattatcagctttgatgaaaatctatccataactggtttttctctatttgccacccaaagtatggtcttgtaaggatctcttttgtaccacatgcctatataatagttcaaagtagttttacctggtgtgaaaaatcccagttcatagacctcacttgcagatactatggtctgatcaccagaaagggattggtttgcagatatggtttcagctccaaatgcaatatgggttttcaacactaggcacaagaaaagagcaagaaacatgacttttcggtttgtattggtagccatggttgcataaaattcttcaggcactataacaaaattctgagtttgaaaagggaatggaccatagcaaggcttgtgtttgactttataagatattgaacaaaggtacaacatccggcaataatactattttgcttatgaagtaatcggcatttgcatctaacaatgaaccaacaaggcaaataatatttaggtaacaattggtgttgtttcaacagattacttcaataaaagagtttcaatagtcaaaaattgtctaacattaagcttaatggtcaaaagatataattaaattaagttatataaatgttttagtattggatatgtaatagtattggatatgtaataaatatattagattattaaatatatatataataatagtatttggtatatcgttgaaaattaatatactatagtaataaaattatataacataaagaattataacaatattaaaactagaaatagaaaatttgaatgagtatcctcatgaaaaaatttgtcaatgttttttttgatgttgatcaacaatcaattataacttaataatattatgtggaaaaataactgttaaaattctgtaaatcaactttacaacaactaaatgaatatattaataaaactaaccatactataatcttttttttaaaaaagttttatgttggattgtggatatgaaacacctgcaaatatcataaaaatcattgtatcattgacaatttgtaaccattgatatgtctagttttagagcgttagtaaaatgttaatgcaactacaatgtaactacgcagaaacttagaaactagaacaatgtttctatgtatatagctctagatgaatttagattttttttattattcttgatttgatatgattaaatccactatcgaaaatctggaaaataacgttaatgcaacaagagaaacaatgaaacattagctggtatattgatacatttttctttagtttatatttgatttggattgaccgggaactccagatctatttcagacagatctacactttatgaatctgaaaattgatactaaatgattagttttctgcaattttaatcttaattcagggttgaattttagtttcgaaccaatttttctacccgattttgcataaatttaaaattatatgtatttggatttcttctgatcttcttctcaggtgaagtcgccaaaatctatggtgatttttaatctagcttggtttcttttcggttgccctgttggtttgttggttggaagttgtcgttgttgaagaaggtggttagtgaggctgaatgattagaacaagaggtatttttgtaaatttttattgttgggttgtatgaatatttatagggtctgcccaatatatttatgtaaaaattacctaaaatatggaaaaaatttaagagtttacttttttatggcataaataaataaagctaagtggttatgggtttttttgtttttttttttttacatttatatagtttttttatgccatatttttgtaaaaaaaaaagtagaaatctcatatttgtaaaacaacaataagttttgccggaaaagtctccggcaccggaaaagtcatcggcaaaatcacggtcgccggaaaaatcaacgtggccagaaagtcaacgaaaaagtcaacgtcaccagaaaagtcaatgtcgctggaaaagtcaccaaagtaaatatctcatatataactaaaaatataatcggtt

SEQ ID NO: 25993 - DNA, 3326 bp, Cannabis sativa
ggacccatcagacaacatcgggcccaatcccagaaattaaataaaaaaccaactttagagcccccattggaccccaatcagaccccaatcggacaccaatctaacacccatcaaatcaggcctaaaaaatccccaaaactattttttagactataatcggacacctcaatcagaccccccatcggacccattggacaccatcgggcccgatcccacaaattaaataaaaacccaatttttttgtacccatcagaccccatcgcgtcccccatcagacaccatcaggcccgatcccagaaattaaataaaaacctaattttttggtagccatcgaaccccattgggccttcacccctatcaaccatttttgacatggcatcagaccaccatcacacctgtattgaaccccatcgggccagacaaaaaaaattgcacgaactaggaaaattgcagtattcacaggcaggaagcattttaatacacaaaacaacaataatccacagatcaagcatcaaaacaacattctaaactaaatataacaacaacaaacaagattacacaaataaaaaaaattatccattgcttgcatatgttgctgcgtccaaaattgaaagaaaataagtagcatagcttgtagtgtagtagattatagtgtagtgaagtgaagtgaatgagtgaagaaaaaaaaattgtttattatgtggggagctcgatagtgaagaagaaagagagaagaagagagtgggtaatatgaatgggggtattttagggatagtgtaaaatgtgttatatcccacaaatattaaatgttacgtgtttagaggaaaaattttaggtacatgtaagtataaaaaatcaaaattttcaattagttttctgccaattaaactggaatttagggttaaattttagttttaaactactttttctacaatttttcatcaatacaaaacagtatgtgtttggattgattctagtcttcttctaaggtgaagtcaccggaatgaatggtggttctccgcttggttggattttatttcggttatcttgctgggttgattgatctaagcttgcatcggtgaggtttttgctttgtgcggttgaaggattagaagaagatgtattattgtaatatttagtttgtaggttttataaacgtttaaagggtcagctcattgtattttagtaatataattaccattttgtttatacttgaaaaaggttgtaaaaatattattatagtgagattctctcacttagaaactcgagaccggactcctatgaaaatgacacgtgtactcactctcctcgaggaaaggtgagatgtcattgagtgacccctcgagtatgaacctcgtctagactagatttagcgagatgatgctaccatgaccgagtctagtcgcattcgaatggctcacaaagtgtaggaccaaggaacggttgaagactcgcgcataccaggatatatgcgagaattctcgagatcctcctacgaattgtagagatcgagtctttactctgcgagatggtccagatgacccaataacctcgataacgtgataagagctcgcatgccttaggttatcaacttactacagatgtctgtataagcgacttgaacaggacgcagacatcttagactcgactagtctcaaatgcatcttacgcctgcgagcttatgcaaggatatgaacagccaacccgcactatagaagtcgcatacgttgttgtatttagtgaattaagctgaaactgtccttcatttattatgtttatgttgtttagtttaattattgaaattcaatatataaacggattgataatgaattcaatcttcgtgtaaatcaaatgacacttgctttgtatataaaggagtgatccaacgtgaaatgaaaacaagatagaaatccttgcaacagtggactaagtagagtgtgatctgactacaccactatactctcttgtgttctttatatttccagtttctattcagtattttgtgtccttagtttgaatactcgcctctcgaagttgagtactcgcatatattctccttatattattacattacttattttggtgttgttaaagttccatcaacaacaaatatttacattttataccaatgccatttgaaaaattattccaatcattaaattaaccttctaaaattcttgtaaggtatgacctattagtttgtaactaccttatatgacaccctacgagattttagggttaattgcaccttataggagtcctagtatacaagaaacaaaacaaaagagatgttttttttttaataaaaatagaaatgtagtttttttttctctgaaaggaaatagaaatgtagtaagtgaaggtaaaatgatagtagatattttattagagcattgttattgggtacgtgattagcatctctagatataccgttttacgattggttagtaatagttagatcaatagtaacacttaagagttgtgacttttaacatttctctattttattactatatgactatatactttgaatatagtgggacccgcattcaaaaaaaaattcacattgttcattccaagaaagttgaaaaaaatcaaaatatgagaatgacaactacacaacgaccatccaagaaaaatgtaataatttcaaaacacggaaggtgtacatgtgtaagggcagtcaaagcatctaatgaagcttcccaaaattgttcggtctttcccccttccattccttgctcaccaagaatataagcaaactaactataattaatcagcagcaccatataaatacacatcaaaattcacaaaacacaatactttctaataaatccacttttaatatactgtagctagtctttcaaattaatattcacaatctaggttggttaagcaatatggctcttttgtcacgcttcttaagctgttttcaagtttcttcctctagagcagtctcggatatcgtcgtggaaaatttcaagcagaaattaggggaagggaagagtattaataagtcggccaatattaaggcatctaaatcaccattggtagtgtcctacttcccagtcaattcatatctttctcgcttatagaatccactacgggaagagcgagctggctttctttgtcgtacgagcgtcgttatatacctatgtgattgcaagttcctcttcaagccactgctataaaattagttatttttccaattcattgcattttttaatcgatgatcattattttatcttgtactttaattaattgttttgtaatattcgtgtataattcctgtccatcacacaagtgaacaatttctataagacttt

SEQ ID NO: 25994 - DNA, 4123 bp, Cannabis sativa
tatatatttatacatattcaaggattgatgaccttcttcttctgttgctagtaattcttttgcagttgatgattgtcgagggtttgttgtttgagtttgtttaacggatcttgattggttttctccaatcctttcaatctctttatgcgaactagtatatcaccatacagaaataataatggatattacagtgagtcataacagtcatagtaatattgaactttgaattgtctatcggaatggttatatacaaagatattacgtcttccattttgattttcatcttcattttcaacccatattgttgttacttgtgaagaagtaggggcattgaatacacgttgatctaggccaacatcattcctaacatctattatttgtctttccaaatctggcatatcaccaagtgagcagaagaaaatagagtacgaattgatgcgaagaatattgatgagttgacttgtgactgttgggagcgttttgtattgtgaattaaatagtcaattctctaactcattttccgtgtcagaaatataattggagattagagggataaccatcagaaggaagcaaatctatgatgttgtggtagatttgtccttgagctttaaaagtgtatattccattatttatttggcagagattttgatcacatttaatgcccaacgatgtgaaagcaaattggttgttataagtttgaatatatgtataaaaatgtgcagaatcacttgtgttggaggttaataatgtgtaaagttcatttagaacttcatttgtggccagataaattttccatctgcacaacaaaatccatttgtttaacggataaatttctttgctttacaatttatgcatatgggaaccgatggaagtaaaattgcttcagatggcacattttgtagcaattctcaaaatcgagtgaccctattttgcgattgacctacattaataaaaggtttaattaggtcaaatagtaaactacttattttgttattatgaatatatattaatattaaacaaatattttgatgtaggaataacccttacttctacaagttgttgacataattgtgtggctaattgagtcctcaagatcaacgggtgggatttgtttgtagaatttttgttaggtggactgatgagaaaaaccagaaagtaggatcaatcagaaaaaataaggcggtattccgtatatacctagtgaaatctctcattattttcgaaggataaatttgggtagaaattatttccaccactacatccaattgaagaatccaaatcttgataaggagatatcttctcagttgaaatgttgttgttgcattgtctctttgatactctgtgaccatgtctatcttgttgatcattattaatatcatcagcacgataatactaatgttgcgtacttgtagatgccgcatgatcaacagtacatgtgggtaaattgttacgattcaaataacttgaattagtcgtatcaacttgatagttcttcaatactttttgtttagcatctctctctctctctttgttttctatgtatttcttccttcttcttttctggcaaatctctatatgagattcttttagaaggtcgtgtgttttgatctttaaaaaatcaaatcgaaatgcatatatcttttaagaaatttattgtttaatctaatgtagatttgaatttaaatgtttaagtattgtatttgtacaatcttactatctgtcattatgtcaatcaaggaaatgtatgtttcagaagtaaaatatcattctacatcaataaaatattaagattagaataataattattaggctcatttaagtatagatatttatttttaaatgaattttattagtaggtcaatttttattcatttgtaacgtaaaataattttttatttaaataaggatattatatttgcaactttaatcatttaattttataataaagagaattatatcctatactattgaaatgtagatgctcaattaaaatagaaaataaacttaaaacaataagattcaaaaatatacatctttaagatgaagatgtccaatttccattaaatatcaacatcatcataattgcatattttgagttattaaataaaaataaataaccatgaccatcaaatgtatgtgtgcatatttatttaatatatatataaaaaaaatataaggaaaaaataatgtgggagttttttatgcatgatatatcattttattctcaatatatataacacaataagtacataaataaatataaattaatatgaggagtaaaaaaaatacctgacttccaatgaagcagaacaataccagttgacagttaaaatccagcgatagtggccaccaattgtgttgaaaacgtaacaaaaaatacgaaaaaaagctgacaacaaaatgggtgaaacttataattattgaacttgtatatgatataacagtaatatacactattatctcattcaatatacatttgataagttagtccaaccaaactatgtcattatcaatacagaatcgctaacccaaatatataaatatatttgtacaacttatagaaactataaaaacaatatattttactgcatctcaaaatcaatctaatgtcaatattttcagtaagatacaataccaagtttccatacaaacatggcatattttacatacaacttacggcttaccgatcactcaaaatatattgtacaagaaattattcattaaaagaatcattcataagaagaaaagaaaaacaaaaataataaaataagattattaaaaaaattaaagattagaaatattattttcaatcccaccataatgaaaaaatcataaaaataagataattaaaaaatctttcataagaagaaaaaaaagttacatgtcaatacatagttttccctcattgaaacacaacaataattttttaaatcaaaagaaaaacatgttcttatttcctctcattgaaacacaacaataattttttaaaaattctcctttgtcccaaaagttgcaatgatgtaaaagatttttaatttttttttgtaaaaggtttctttaaaaaattagatatacacaatcatacaaaattagaatacaaaatcatacaaaataatatatctaccaatggaggtatactttttttaaaaaaaattatttatttgaagtgtaaagatatgaaaattaataaaggaaatcattaattttttattattaatggttgatacaaattgtatttcactatttaaatgtgcatataacagtaatagaagataaatatcaaactatggtgagaaaaataaagatgagtaatataaacaaaatctaaggcattaaaggcaataaaatattagttgtgtagatggcatggctaaaaatgactaatcaatgctaatgacatactaagattttgtaagccaatatttaaaggaaaaagaaaaaaaactggcaacacttttctcatcccaaaagtatataagacataataccggtattaaaagttattatctcaaggatattatggggaaagatatgaaaactaaatattaacctgattaatcaagagataatgttgtcaattgaattacaaaaatattactgaaaatattttcttatgtatacgaaatttttgaagtagcattagaaaatagaaaattcagtactatatttcttttcttgcatccatatgttatccaaagcatcaatatttatttcagaacaatcagtaagaaacatgcaatgaaacatgttattttcagtcccaccacaatgaaaaaataaataaacccatattaaattcatcctcgcgaataaaaagttttaaattttcagagtttcttaactatagttatttggttgataactgctatctcgtgctttattgtatgacgaaaggttatacgatatggttgtataatataacgactgatttattaactacgaaaaatgatagatatgatggatattaatcccattaaaatagcaaactttcaaatgaaaaatggtttactcatttagcaactgaggacttaagttaaaaccccatattctaaaaaatactaattataattcaaaatcatctcttgataatgtgatcaaagatctattgttgaaggattattat

SEQ ID NO: 25995 - DNA, 3441 bp, Cannabis sativa
tatagaaatttctgtgtgaaattctataaaaattaaaaaaaaaaaaaaaaactattttaaaatgtaaaaaataaaaaaatcctttaaagttattttttaataaaatattcttatattaataaatataaattgtggttgatgtgaaagtttaaaagtttttatttagcaaaaataaaataaaataaaatatatattattataattttgtgtgaataatggtatccaaatatcattgaaagatcttatcagctttgagacttaaaatctacgtgtcatattgcccaatgttcatggaacacaacacaattcagattttttttttagattttacatcaacatcatctcacaattctcacaacttttataaaaaaatgaggaatatataattaggggtgcattgaatatgcactgtaaccaatttttcaagtaaaacataaataaatatgatgcttttttgtcctcatgaccttggtagaaattagctttcaaaaaaataaaccattgctattatagtgtttataaaataatcgattaaattgaatctgttacgtgtgaattatgtgaattagattgagttagaaaatttaaaatccaatttgtcatgtgcgtatactgtgatttatctaacttggtacttaacagagttttttagacgaaatagtaaataacataatagaaatgaaatttaaaggattttaccattaaaaaatcaatttataaagttaagtgttacaaattatataaatcagataattttaccgccaatatctcttagttaattggtaagatataaggtagttttacactgtaatttttgtactatgcactatccattactattataattttagaaaaattctacaatgtaatgagccatccttgtatactgttgcatccttattttccgtatttggaagaaacttttaatttaattttctttcatgatcgtatacattgtaattatttaagatgttttacaaaattttgagaattttttttttaaaaaaaaaatcaacacactgaaaataaggttcaaacaatttgttacatgacttgcgtgtgtgaaatatactatttgaacgttgttttatatattgtaaattattttaaatttttcaaaatttcgcagaatgtcttaaataactataacatacatgactatgaaaaaaaaattgaactaacatttttcttaaatgctaaaacaaattaaaaatacatcaatacactttttttaaaggtgtattgtagaatcaaccataattttataatatctcataatatacataaataattaaaaaaatcttaatcaaacaaaaacacaaaaacgtaaccatttcataacttgatgacacttggcttatggagtgtcctaataacttcactcattgttatatttattttttgcaaacttccaaaagctcctctatcttaatctttatgtcctaacatatcaaacaattaaatacatttttattttaaaaattaatatacctaactgaaattgtcatgtttttatattacaaaattttaaagtttaagattatgatgactgatgagtagtattaaaaacaaatgccatatttagcttcattatgagatgttcctatcaaccaatttcgataaaaaaaaaaaaaaatatctctcaaatttttgatatcatataaattactcatatatatggtcgattttggggaaatgtaaattcatttggataaaaatatgtaatgtaatagtccattacaattatatattaatatctcagaaatttattgaaacaccccactatttaaatatatatttttttaacattgcattcattttttttaaaaaaaaattaaatattattcgtataaaataataatattcttttccaaggattttctgttatattatttaataatatagattagaatgtgaaatatgtgatatatacattaaagtgaggttataatatatatgtatggtaatttaattacatattatatgatttaatatgtctaaagtaatatgtttcaaaaaaaaaaaatatgtctaaagtaatataagagtaagagttacaatctaataacaaatttgtaactcttttatcacaatttttcaagtgtgtaattagagaattactacacaaataattataagatcaaaatcatcatatagttgttagagaaagttaatatactcatttatgtgattaaaatgagatagaatatgttgaaaaatacaaaactcttaaatgaagtgtatgctgaaaaataaccgggcagcatgtcacctgaagctacagtttctagaaaattcaactttcaaaatgaaaacgttagcttcattctccaatgtacataacctattttacattcataatttaagggctagtaaccagtctttgggtgttgggggttttgaattttgaaattgtagtttacctacactatgaatagagacatgttcatatgatatgatttagtgtgtttctataaagaaaatacattactaaaaactctatagacttgataaacccataaaactatttctattctttcctttctctaaatgtttggtaggggaaaataaatttttagacaaagatataaaacattgtttaagtttactgattttcatattatgtacttgtagtgttaagattattctcaaatatctttttacatatatatatatactatttatatgtatattttgagaattgtaactttcattaagagtacaagttacaatcttaaaaagtgtgaaatattatcatttcacacatttttatatagccctaacgcctttttagcaacccgatgagcatccacattgaacattgcgacagttagagcctcgtgatccgaatgagaaagactaggagttgtacaatctcacatcgcctaggaaaggtcatatgggatgattccgagactgtgtaggtatgagactacatagttgaagagggcttaagttaaatggattgattggtactacctttatcaacagtgtgcatcttatttttcggtagcccatcacaaaagaactccacagttaagcatgcttgacctgggataatatcaagatgggtgaccttctaaaaattttctcaagaagtgtgcgagtgaggacaaagcacgttggaaatacttattttggtttgtagagtcaattgtcattccaggaagcatcgtgtataagagccatcattctgtgagtgtaagagcccaatggaggcttaaagcagacacgttacaaatggtatcagagccttgatccagtcgtaagtgtagtcgacgaggacgtcggatcctaaaggggggtaattgtgatagttagagccccgtgatctgaagggaaaaggccgggagttgtacaatcccacatcgcttgggaaatgttcatgtgcgatgattctaaaattgtgtaggtataagactacatagttgaatagagctt

SEQ ID NO: 25996 - DNA, 3038 bp, Cannabis sativa
tgactgcaggtttttgtttggcctcaataccccttaacagttaatccccgggggatgggaggtgaaccaaagcaggaagaagccctcgtagtcagagtgttccctagatttatcagtagaagcaatatgttaccctacataaagaggagcttgttatcagtagtttaaaagtaactttaaacgattgaagtttgaaagtttcttcacatattttatcataatgtttttcgaaagattgtcttagtaaatatttccagtagcatgaattttagtaatataatatgatctgcttttaaagagaaaagactagaagaaaaaactataaatataggtcttcccccaagaaggtggtaagacccttgcagagttccccaacaacgcatagagtttgggaagctcggaccccatcaagatctgaaaataaggagcactcaactactagttgttggacaatctgtctatggttccgttgttggacaatcaatgggaattttgggttgtccttgacaagtgatcaattcaaaaagcttcgacaatggaagaaagcactcaacctcaaaggttaaattttggctggaaattgtaaattaaaacacttgaatcttagctatgaaaccccttgctactggatcactctagtgctttgagtactacgaaccatctgccatctattgcaacggagccaattcatgagccgtcccactcttcaaagcggggaaagctcaagaaggatgaagagagagattaagctcatatagatacattaatatgaaatcaggaacgattcatattcaatatttttagattggtcactacttcacataatatcataatattgtgtgcaaaatttcaataaaaagacaatatattgtattcagaagatgggaatagattaaaactcgtgtttcaatgaaaatattaattttatgtgatcatgaagagagattctctaagattagggaacattgcatagacagcggctatatatccaaatcagaatctcacgtgcaagttgaataagaagatgcttgatgtcttcctcaccttatgacatataaatacatatagagaagacaaacaaattttgtaaaattggatcacataagtttaggctaatagatctttcttgagaaagaaaaacaatgcatggattcttcaaaatccactttcatgtttgctcaaatcacacccggttattgaagagtgcagtgatcaattgatcagattaggagcctctaataagacttcatcatcattcgtagctgtaaaaatcagtggtcttgaggatttgcaccacttattgagagaaatgggttgaggaacttgtggatggatctctctcttcggcatatgaagtgttgagcacaagaaattccatcaaccatgcatagaaaagttagtcttgaaagtgagattataaagtactcatccttgagaaaagtagtgaaaaaggcaatccaaaaggcgttgacgagtttgaacagcgtcgaatcaaacatcttagtctctccttccactatagacacattctgtgcttggtgtttcgtccctagtttccaagctcgtgcaaagcagaagggttggctaagatgaagaaattaaacatgaattttcaaaggttgatgctgcactacactacctcgtgtacatcatgagacaaacaaagcaggtcaagctttgctgaagctacataatcttgagctatgcgatgaagaagctagaatccttgttcagacttttaagcaaaacaagagtttctcttctcaacattctcaacaactagcttaaaagatcattgtccagcatatggcagacatccaaaattttgatagcctagatgaaaattgttcaaatactattcacactcaatttaattaaaagactttttgtctaattgatctctctattcctctctatactatttattttattattttcttagcaatcatgcattctatcaattcagtgaaaagtgatcatatatattctgccccaaaaaggaaacaatctattaaaaaaaagagtgaaaaaggcttatgcaataattatcactcaacatttaaatttcagtgcagtatatatattttatatataaacaagcactgcactggccaatggaatcatgcaattacctgaccaaaaaataccctgcctgttccttgtttgcaaattgtattgctcattgtgagagagatgtatacatgtgcctattaattctttgtataaaataacagaaaaaaaaaatgagagagagagagagagagataaaacgtgtattattatattacaatgtcatgtctgcaaagattctaattctcaggaaaatgatgaaaatcattattagacttgaatttcacatgtttaatgcaatgaaacttaacactatctctattgacaggagaccaatggaatcaacagcacacttgctcaacaatttcaaagtatttgaaaacataaccagctctatcatgagatatccacatatcttgtctcatttaaaactatgctgatctctgaataaaatgctcattgcttgtctctcgaaaaggatgcattaaaaaaatattaaatgctaattataaggtatttaaagcctcttccataacaagatccggaaatggtggttgggagacacagcatcagcatccccaatatataatatgtttacatcaaaaccactatcaagttagccttactgtacatgtgcgtggggaggatgagattccttctgtctcccttatggcttatagattatataaatagagggtagatgccaatgaatatcaatcaaattttagatcaatattcaacaactctcaagtttcaatctcttctccatctttttacaggaaaagaaaaatggcagcttaccatgttcgatccaacagtttcccctctcagcaacatccaattatttccgagttcgatggcatattgaggtcttctgcagaagcctcatcttcaacatcaataacctcaaagctgaacagtcttcaagatctccatgattgtgttgacaagttgcttttgctacctct

SEQ ID NO: 25997 - DNA, 2215 bp, Cannabis sativa
acttggttttttggttttcttcttgtttctctgatcagtctgtttcttgtaaccattcaaaaagttttcacttagttttggttcgtcgtttatctgatcactttgcttcttgtaattgtagaaataaagaaggttatcacttggttttggttcttctggaaatttctctgtttcttcacctatttcgacaaagtttcttgtaggatgtgttcttgaatctattgtacttacaaagcacttgatgaaatgggacaaaacaaaaaaaaaagtagaaaataagtaaatttgtaagtaataacacatatttctatatagagagactatcatgacatgtatccatcgttcaatttcaacgactcggataattgatatatttatatatagggccggtcttagttatagacggactaagtttgcgcgtgtttatgagccacactttttgggacccaaaataatttttatttctttgagtatgtacagtaaataacaaacattcacaatttagttaattggggtatatgatacattggtaaagtccgagtctcgtgatactctctttcaaaaagttggtattaggttagtactttttaaaagaaattttgcagtaacaaatgtcatatttattgaataagtcatgaagacataattttaataatgaattgtaatattaattgaaatgtgtctaggccttatttatataaatatatatatatatatatatactactcaatggttacatatttattgtaaccatgatggttatattttttctttgatatgtaatagcaggttactaataagtaaaatttttttttagaattaattaattgatcataattaataatttttctaaaataattaattttaatttaaatattacataaaacccttttagcaattagtatttataaataattttatttttatatttaagtccatattttaatatttttaacatttaaactatttaactataatatttacaataaaattctattttttttttttacaaaatttagacttccacctcttctaaaataattttttgaatacttaatcaatttttaaaaattacatctaattactattttgcaacaatcacttgacccatcttccttctttataaaaaaaatttaaaaattagaatttcagtttgtcctaacctaacatcatgtgaattttccacttcgatacaatctcctacatctatgacacaaacatatttctctattcaaccatctacagttaaatttctcattgatttttaataattttcttgttacttttgtactattatgcttatttgtgaaaaagaaacaataatttcaattaattggtaatctactttgataaattttttttacaatctttagattgatgaagatgatttcaacgagaagcgaaaatagttaacaatcattaattttatagttgttatttcattttttttatttaatttttcattttttttaaaaaaaaaataacttgaaccaatcttgaactgacatactaaattggcacttaaagtgttaaaaaataagattgagcataaaattacctttagttagagatcattcatactatttttttattagttaaggttatgtatataataactttaaattataagaagttttgttgtaattatttcaattatttaagttaaaaaaaataattgctaaaagatctttacttattaacaaattgcataaaattaattaataattatttgtaatttaattttaaatataattaattttaattaagtttttatatagaaataaagtatcaagttataagttatttattgtttatttattttttaatttctaaattaatcacaatcattcaacaacgatggttaaaaataaatgtaaccatcatggttacatatttaatgtaacattgaaatttctcccatatatatatatatttattttcaacacttatttactaatatacttccgaacaaattattacttgtaattccaaatcaaaattactaaagacatcctaattaattactattaacctgtatcatcaacaacttgattttttttccttctttctacaaccggcataatgacattatagtattatagattatcttcccatcaattgggcaagattaaataaataatatcctcattataaaaataaataaataaatgatatcaatcacaaacatacctgcttttttatttttacactttaa

SEQ ID NO: 25998 - DNA, 5916 bp, Cannabis sativa
  modified_base (1413)..(1416): a, c, t, g, unknown or other
  modified_base (1920)..(1921): a, c, t, g, unknown or other
  modified_base (2093)..(2096): a, c, t, g, unknown or other
tagttcgggagccacgaggtctgcctcgtggtcttctcactccaggttcaggttgattttgagcattcatcccttgtgctgccctggctacgactgtatcacattctaattcagcgttccgtcgtgcgcctcttccagacggtgtcttaggcagcggttttctgtttcataagtaccttctcccataggctgggcacctccacgattgggctcttcatccctcgtcccagggttctttccactgccacgctgagttctcttcgagcgtgttgtccacgtactaggaccaacgtcgagttgggttctccacgaacgtgtggtccgaatgttggggccaccctcaggttgagtccttctagagtgggtggtccgtcgagaccgtggggttgtagaccttctggagcccatgggcactttcccagaacaatgattagtttcctcatgtggggtattaacattttctgggttttcaaccatgaaggaggtggtttttcttcaaaagaaacgagggtttttttctgagctttttgacagaggctctctatgaaagcgccaaactgttaacgcagattttcattaaccaaatttgagcctaaccgtaacaatctcacacagaaaaaataaacctatacaagtaaaagtatgaacacaaggtttttacgtagttttgtagttaaaattctacatagtccacgagttaatcttattcagatctctgattgttttctcatggcctcttttgtatgagtttttcagtccctttttttatcttgtttgccactatttataattacatagcagacagttaattacaaagttgactgtaatctgcttacaacaatcatcccctaaaatcatggggtttgattacatatcacgtagtgtaaatgtgtttattatttggaaatcatacaactgtgatttttccacttttactaggtcaaaatgatcgtgtttttaaacacgtatttaattgttatatctagggatgtctcgacagaagctttgttctagtgatcataatagcagctggggccattttttccttctgaggtcgaggatacacgtcttgtgatgattgcggttcttatttacaaagagttctttgaggctcgtttgaatgttagcttctgactcgtcaggattgtaagcctcaccgaaaaaatatctaaagttaactgggcgaagttactggaaaccttcccatatcaagatagacacctcgcttactaggtctcggactaacccaattgttgcacttagtttgttcattatacactaagtgcttccgcagttgatatgtgtcactttcatcttcctagatgtaatgtacttgatccctcgctattcacattcagcgacatatggtttctcacaaatatactaagcaacagtttgtatattgattcctcnnnnaagaccttacagtcagcaggttacaaatatactctgacatttacgtaattaatgagttattccataaaaagcgattgcatcgatccatatttcttttatcctgacacatgtcccccactgagatggtagtcgaatttcgggtataacaattacaaactgatgttcaaatgagctaataatctagaagtagttagctactgagattatgattttgctagttgtactgattaacttaaatcagcacctggttatgtgtttatgtttgttggtggagctgtgtcatggatgagtaaaagacaaaccttgactgctacttctactatggaggctaactttgtttttttgttatgaggctacataacatggtgtatggctaaagaatttcatttcaagccttagatttgttgattctatagcaaggccattaaaagtgttcgatgataattcaattgttgttttcatggctaagaacaacaaaagtggaagtcgaagcaagcacatcgnnattaagtacttagctattaaataacgtgttaaagaaaataaagtggtcattcaagacattagcactgaattgatgattgtcgatcctatgacgaaagacttgccacctcatatattcaaggatcatgtagagaacatggaatttgggtcccttatgtaatttttacaaatannnntattattaatgaaactcttattttcatattttctcatattcatgcgcatcttaattttgtgagaaaagaaaattacatctaaagagagttaagagagcgagaaagcatgatttcccatatcaaaactatcactagaattgaagctcaaacgtcaatggcggaaggtatttcggtactttcatcgcctatatgattttaatatagggatttttactccatacaccatattatctgaaaattttacatttatacggagtaagagaaatttaaacttttttattttttcatttgtatattttaaatttatacgaccacgctaatctcttcttagatacaagttttttcgttctctctaatttcaccttcaattttattcatccttcattgacttaaccttcactatatatagtcacatttacctttgataactatggccaacaacaacactttgaaaaaaaattaataagcaaccatacaattccttagaaaaggctattacacatagaggaaatagaattattgtatttaccaagctaaaagaaatgctaggtacccacaagactcaagagagcaaagaagaactatgaacaagaaaatagcaagaagaatatactctgtttttctagatgtaaaacagggcaactcttacttatggtacctacatttatatatatatgtgtgtgtgcgtgtgtctgtgtttatatgggccagattgaatagcaagtgtaaaaaacttatttttaatcgataactaaaaaaacttaaacatgatgaatttttctctcatataaggtagaattgtaacaaactttccttataccattctcatacacgtactctattattatgcacatgatcaagtctcatgcacttactctgctagtacttgctccacaataagcgtcaaaatactacaaatgaatacttcagattttccaagataattatatcttgcacattaaattagtttgtgatatatgttagactttgggattatattgaactctttggtgtgtgatactaatgtggtagtttcttagttattttaatacttctaacactcatgtatttagatgctagtgtggtattattttttgttgttttgtaattgtttttgaattaatatattgtagaattgatattttgttgttttttcgttatttttttgctgtttgtaatttaatttaggttggtgcaaaatgagatttatgtctttttgtttttgagttgtttgttggttgtttcacattagaataatataatgtggggtaaattttttaaaaaaaaaactaagaaacctcattcgaagtcatccaaagttgatcctaaaatgggttttgaaacacattgcagataagggaatgggtgatgttgcaaagccatcggttctaaaaaaagacctcttccagataacattgagtctcgtaagacaaagagaaccaaatcttcgaaatctgtcaaggatataagttgggttttgtttttttttaaaattttttttagtttttctcttgttgttgtgtttttcgtttgttgttttgtgttttaaacttttccctccttgttgttttaagttaactctgattctgactttgaggatgaagttcatgatttggaagtgaaacctaaaggtaaacccaaagtatgtctaccttgaattttttcatttttttaagttgaaattttttaatcaactgttgttttttattttgtttttgttttaccttattatattcacggttttatgttttgtctcatttttttgtgtatttctttatgtatttatcttgatgttgttttgtgttattttttgattttgtttctgctattaaacagtttgtagcattattggtcttttagtgttgcattggcttagtctaaacagttgttttaatgtttgttttcagtagttttcgtgttgtttaatttaatttcacggttgacaattactatggtaatttcatgttttgcagattgttgttaatatgttgtttggaagttgttcatcttttaagctgttgatgtctgggtgtttttaaaatgttgttgtttgatttttttttattttttttctggaggcttagattatgtttgtctttttcatatttttgaaaattatttatttaattgttcgaatattttgcttataatttttattgttatatacctactttcaggtccctcctaaaagttcaaaaaagtttgaagactttgatattccccccaaaaaaaaagtatgattcaaaacaacataatacaatgcaacagacaaattttattaaaagaaaatcaaactatttgataaattatttatatatatataaaaaaaaaagagctataccgctaaagcagatgcactggttggtgtagaaattacaatccgtagcaaacactgattctaaacgtttttcatcctcatcttcaaagatatataaattttaataatcgttctcaggcatgatgtaaaattgtaataaataatagtaatccgaacaaatcaacaataacaaacataatataggaagattgagataaacttgaaacttaaatcatccaagagaaaaaagtcacaagctttatggttgaaatattattataaaaattggtttcaacaaaaaaaaaatattataattttcggtgcattgcgggtttgatgtagagttttttttcataataaaattcaattagttgatttataggttatgtttagttattttaagttttttttacaatattgatgtgttattaatttttatatgaaagttgggttgttgtctagttatttattttttgatatttataatcacaaataataaaaaaaatatatatatgcttaatttcataagtatattttttagtgttgaagtctaatttatttctaattgagtaatttcttttattaattttaaaatttcattttagttgacaaaatattttaatatatatttaatctctatattaatctggagttgttctctaatgattttaaatcatagtttcataattttattctaacaaaatttgtttatttattccaataaagttatggtttttttttttatgaataagatgatttcattactccaaacaaccaattatacatccaaagagcagcctcaaataaaaagagaggacctcacttctaaactatgtacactttacaaagacacaaaccacactttacaatgaatcaaaccacactctatcacaattagagactttctttggccatatacatgatactctattcttagttacattttgaacttgttgaaaaatcaccctacaattattctctttaccatcccaaagcttaaggtttcggcagatccacagttggtacatcagggcagcaagagtagctgcatacacacctctcttgagcttactcatcctagcttttccaagccacaacacagccttttcaacagtttgcacactagtcttccatcccaaccaatttttatccaaatcaaagcattctcgggtgaaagagctagcaaaaaagaggtgatcaacactctcttctgcattactgctgcataaatggcagctactctgtcaatctcaggtctataaatcttcactctattctttgtcttcaatctttgtagcatggagagccataaaataaagtatgcttaggacaattcaatcggctccacaccacagatgtccactgttttttcacaccagcaggaaccaactttgtatagccagtcgacacattatactgattgcagcagttttgtatttcattttcatcaaaaagctccatgactttacccttcaatgaaactaattttctccaataccagct

SEQ ID NO: 25999 - DNA, 1797 bp, Cannabis sativa
ttctagaattagcaaagaaaaaaatagtaggagccttatgctcagatatgtaataaaggtttccaactctctcacccatcccaatcacttgattcttggtgatatcctgaataatgcatttttggagggaggaataaaaaagagtagttagcagaattggacaaggcacagacatataaaagattgtgctgaaaatcagggacacataacacattatcaagcaccatatttgacagatttacacttccaacaaaagaaactttggtattagaaccatcaggcaatcccacggatttaattttgctgtcaaattttatagaatggaacaaagaaggactggagcacacatgatgtgtagcaccagtgtcgatgatccaattaaaattaggaagagatgtgattttacctgaaatattggacacaacaggctgatcaacttgtggtgaaggtgcagctgtctcctgcaatttttgtgtcagtaattgcacaagtctttgacattgagcagcaagatccatctcccctccaacattttctctgttatcatttcctgctgtaaaattggttgttgatttcccttgctggttgccagattgattaggtgtttccctaggaaatcttccatgtaaacgatgaccaggaggataaccatggattctatagcacttagctatagtgtgtccaggtactccacaatgagagcaaattggtcgagtatcagacctattatcagatctgttatcagatttattatcagacctattgttgcttcgatttccataagtgcttccagcaaattgattggaattttcattagtggactgattgttctcagtttgaggaataatgattcctctttgtttctcttcttgtattatgcaagcaaaagctttattgacattaggaaggggatcttgaagaagaatttgagatctagcattcaaatatgattcatttaatccaattagaaattcgagtaccttatcttcgtcctggtattcttggattactttcaaggctccacaagtgcagaccggttgtggtttgtattcctgaatgagatcccaaagacctttgagctttgtgtaataggcagtaacatcactcgagccctgagtcaagttctgcatatttctcttaacctcaaatattctaggagcattcttttgatgaaacctttcttgcaactcgctccagatctgtgacgcatcctccatatacatgatgctgtcagcaatagcaggtgaaacggagttcaagatccaagagataacgaggctattgcacctgatccacgattcatagtcttcatcctcttcatctggttctggaaatttgccattaatgaactttaacttgtttctcgccattaacgcaaccatcatagacctacgccaagagctgtaattctctgcaccagtaaggattttaggaaccaatgaagaagaagcattatcaccattagagagaaagtaagggcttcgtggatcattcgtaggaagcttgctactatcatccagagctgaaaaacgattagaaccagcagcaactccattgttgttgttacttcgagtttgagttcctcctcctcgagccatggagaagaaaagatcagagagaatagtaagaagaaatgaagcagaagaagagccaaaagatcaaaatgcctctgataccattttagttattgaagagaaacaaagcaagaaacagaacaaaaaaaacagagagaatgaagagctcatttttcattgattgaaacaagagaacaattacagtgttatatacacttacaaa

SEQ ID NO: 26000 - DNA, 2556 bp, Cannabis sativa
tgaagcctcagaagctggatccacaatggaggtttaaagagaagtatctgtcggaagggtggctttaggatcagttcccttagcttgatttttggaaggtttttcagttgcatcgatctctaagatatcctttaagaacatctcattcccactcctagaatatctcataccttgacatcaatcttccaaagttgataaagaatgactaccaatgcctggtttagggcctcctctctttctaccttagtctcaaataactcttcttccactagagatttttcctcctcaagcttctcaagggttccttggctttttccttagacttcttgagaaccagttctgccctagcaagcttcgaggaaagatccacccccatattcttcagcctcagaattcttagccttctattaaagattgagatgatgtggaatcttcttttccaaattggaaatttcggtaatcttctcgtcaatcagcctggtctgaaggtcatagtcttgataagtcttagtagcctgctgctcaagggtattaattttgtcatgggcctcctttacctactcttctaggtgagtaacccgagattgagaagtggtgtacatcttcttataatcaaccccacattttctctctttctaggcttcctccttgagactggccataacatcattgagagaagtcttaatactgagttttaccaactcatcaacatgagccttggtatcttatagggccttgattgcttcttctctcctccgctcagccctagtctgctcagccttcaaattgtccacttcgatggtcattatcaagcaagattaaattacttaccccaacagtttgatgcttaaggtagtcagccatgaaggacgggtcctcactagctacagtaaaaaaattctttgaacccaacttactatatgtattagcatattgatccaaaagatcttccatacatggagccagatatgatccaatcttcagacaaagccacttcgtaatggacgaataaccaaataatagaagtgaagtgtccaacctttttgcgaaattagcgagttcaacaccccgccttgtggagatcatggtggtctaattttgaatcctagatgcatcaagctaaaacttcgtctgaaagaatttattataagactctagctgggtttgatcttgttctaaaacctccatggtccagataggaaaatttatttttaaagttggaagaggtggaaggcttgttttagccttcaagattggaggaacctatttggaagaagatttttgttgttgagactgggggtccggagccttgttcccagaagaaaagtttattcttgtcattttcttagtctcctaagacccccttcttttttgcccaaacgtgttcgagctttgcctctggccagttgccaattgttgaagctactgtttagattttgtcctacttcttttactatttccaccaagggtggaattagatctcttatgatttttgaagacaagtccctcgtcttcatcttcctcttcctcctcgtcgatgacaattggcaatcgttggaagggttccaccgcgcagcttccataagttccccatgggatgggacatccacctcaactgttggaggttaaaattcaggagcttgagagttagagatagtttcctaagctgaatcctaaaaaatgacctcttggcccttggcaaaggtaatggcccctttgcatcagctttgcaagacttcccaactttccttttgcccttggcacctttagcagcctccatcatcttaaaggatcgttaagtatattgcccatgaaattgtcgacgagccccatttgaaaagtgtgggttttctacaaaaggaaactcaaatttagtatcatggaagcaactaaaaagcatgcataaaattaaaagaatgctcacgtatggttcagaccataattctagtatattaagggtccccattagcaaataggaaaatgtcttccctgtctaagaggctcccatattggaagaatcttggatacttcatcttgagaaaagattctatcgtaaaagtttgggtagggaaaatgaaatggttcagattcctaacaatttcatctaccctatcgatatatcgaacaactgggtatctactgcgatctaagttcaaaaatttaagggtcgaatctgcctcggtcaaaatgatctaaattccccaagtgcagaacacgaaataaatggaagggtgtcttacctcttccatatgtactcaatcccagagtactcttgttccagactacagcgtcgaactgaatctggagctcttcgtcttcacacaaagctgttgaatgactctagttccagtcagctagcttctccggttctaccttatggctttcagtgcctcatcaacaatgatttcaacaatcatttcctttagctcagaggtcctccgtggtgaaaatctttacttggatccttcacttgaagggcattgatgttcgatggggagccagcaaagcatcatccttaaggttgactgacgttacaaggtgtcccacttttaagtc

SEQ ID NO: 26001 - DNA, 6206 bp, Cannabis sativa
caaatctgattacaccattgtattcgtagacccaaataaatagcgaataccaagtcctgtcccattccggacaatattgaagatatttatgaaaataccactgcactaacagtgatacattatggccagaactaagcggtcataccgtagtgcacaaccatctgatcctcacgttgccaggctagcaacaatgggcaaggttggcatagtggaagaggccacacaacctcttgatggtacaaatgcagaggtcggtaggaagaagtgcttatggtcgaccatggtgctgagagtctaaatagcgagtctaaggtggagtaggatgcgcctactaggaggaggacgtactagacttgtactattttctctaacagccctctaggctcgtatgatgatgataggcagccattgaacaggcttggtcagcccttggtgataggtgtagaccatgtcttggttagtattcagagcctcaagttctcgatgttggggcacaaggagaccattaggcctcttctccatttgtcatcactattgagactctcaataggatacaagagagtggactggtgagaggcgtccagtgtgaggtgccaccgagggactaaggagcacactgattgaccttcaattagatggcattatagagcgccacatccagcaggtggcaatgctacctttacacccatatttcagagacataactgcttactttggaatgtgtctaacacaaatcaccccaaaaggtatcaagtaccttttggcaatatttgttctctatgcagagctaggctggccttagcatactccgtatgagattggatattattttgatttgaagtctactttgaagctgaatcgaatggggtacttctactttagccagattggctatcagtggttgggtgacaccaatagttttcttttcttaaaagtaggagaatatgcccggaactaatagatgacacttcaaagtccataaagctttccaaaatcctggattaatggagggagcaggcaaatatttcatctcttgaataaaattgtatgtcgatttaactgtatacacacctgaaacatccttgctccaataccagttatccaccatatttgtatgggagataggaattttataaattaaatctctatctctattattgaaaaggtcagaaatgatttcaaaatcccatcttttctcattaacatccattaaacaactcacatttttaccacaaagaattggatgagatgaggtaatatatgggttatcaccatcgggaagccaaggatcatgcataatagaaaccccctcacccgatccaataagcaaccaacctcctttcatgatcatctcttttgcttcaagtatacttctccaaataaagctagaattattgcttaattcaacaataatgaatgaaccacgaggataatatctagccttaaaaagcttgctaacaagagagtttgtatgggagtgtagtccccaagcttgtttgccaagaagagaaacattaaactcatgcaaatgtcaaaatcccatacaacctttatcatttgcaatacacataagatcccagctcatccagtacctgaaccttctttagaatttgatctccaccagaacttacacatcagcccagattatcacatgtacctttgggaatcaagaagacactcataacataattaggaagagattgggcaacagatttcaaaagtatttctttaccagcacgaaataagaatttattatcctaattttcaactcttttcctcatcttatcttttagaaagctcaacaccgcatttttgttgtgcttcataatgttaggcaatcccagataaaagccatcatcaccggcttccaccatctcaagaatagagcacacccgtccccttacatccaaaggagtatttttattgaaaaaatagaaaatttctgacgattaactttctgacctgaagcatgttcaaaacttgccaatagagccatgattctttcagccttcgtctcaagagcccgacagtacaaatagctatcatcaacataagacatatgtgacacaaaaaaagccccacgagccacttgacaatgtttgatccaacctctagcttcgtatctatggataagagatgataagccttatgcacagagaatgaaaagatatgaagacaagggatcaccctgatgaattccacgtgacagagtaatggatccacaaaaatgaccacccgaagtgatccaataccacatagaccaaacaaaagccatgataagctaaatccatataatgtgaaaccccattttaaaaagcaacgtctccaaaaaagaccattctacttgttcataagccttgctcatgtcaagtttcaaagccgtcagaccaacctttcccctattttttcttttgagataatgcataatctcaaaagacaccaaaatattattcgtgatcagtctacccgggacaaaagcactctatgtttcagagatgataccatttaggagcaccttaagtctatttgccatgactttaagatgatcttgtacacaacattaaaaagagcaatgggtcgaagatcactcatgtttttaggattttacttcttaggaataagcaccaaagtgttatttagattaataggaagagaagccgagctaaagagctgttgaacaagttttaccacatcagatccaacaatatcccaacacttttgaaaaaactcggggtcataccatccggtcccagagatttatccggatgcatttggaaaagagcagtcctaacttcctcggttgagagtggtaaataattctaaattcatttcgggagtgatagaaggaataatatcatcaatgatatcggacccaagagtaccaggggaagtaaataaacctgaataaaaattcaccatatgatcagccaaccccgtatcctggtcaagccaaataccatcatcatcttgcaacttgtgtatcatattttgacatttacgggcactagcagaggcatgaaaatatttgctattctccttattttagccaaagttatttcgatctttgtttccaaaagatctcccttttagttaaaacttcaaataattctttctcagcgttttgataagccaagatagaatcattgtctctcttttccttcaaccgcctaatggtgttcttacaggcaacaatagcttgcttaaaattcccagtaacatcctttccccaaccagccaacacctcaccacatttagaaattttatcttggattgaaagatagatgtgttcattctaacaatcatggataagttggtagcaaagaggctcccttgaccaagcattcttgaaacgaaaatgcttaacaccagtgaaaacattatggacagtcggatccaaaaaaaattggacaatgatcggaggatgatgcatgaagattaaaaagcttggcagataaaaaagtattaacccaataaatagaagctaaagctctattaagcctaaccactgtctagtgagcagttcctcttcctctttcccaggtgtacgggtgcccatggagctccaaatcgactaagttaaagtcggccatcacctgaataaaaccttgaatcaatcactcagtgtatggacaagcacctcatttgtcattatggtcggtgatattatttagatcacctatgaaaacgtacgatcgacttctattttcagcaagagaacgaatgtgggtccaagtattagcacgataccctctgttagcttcaccatatatctccaccaatctccatcgtggcataccaggcacttgggtaagaatgttaatatgcttttcagaaaaattaattacttcttcctcttcactgtctttccacaacatagcaagccaaccactatgtccacaggcctccaccacaaataattcctcatagccaaaagacaaatggactctttcaagaacattttttccacataacgtttcacaaagaaaaacaaacttgggcttcttttggaagactaactcctttaagaactgtaaagcctgagggttcccaagcccccgacagttccttaaggtactcatgactcttggctagcctaggaagccagacccgccccaaataagtttttttgttacaccttcttcctcattttcaaaaataccatttagattcaggcccatagaacctagcccaaccgaatttaatctcttcttttttaacttagaaatagtcaacccatcttccactgtgtcatgcgaatccccacttgagtgattgagcatatttatttcaacattagtgccgatattctcctcaaaattagggccaaatttttgcacaatcattggctcttgaattccacaatcaactccttttccacgattcttgacattgtcaactgcattatgaacctggacaccaatcggatcatcttcagttgtctcgccgccgtgcattctggtggagaacgactgagcttctccctgtttgtcttttcttcccgatcgaagccactgtgagccaatcatcttattttggcgttgagtcgtggctctcataaaagctccatatggtttgacaatcatcttctctggcgtctgaaaaatccttggacacaatttatcagcatgaccgattaatccacatatgaagcagaacgttagggcatgctcatatttgaaattatcccaaaactagtttgagttattcattcgatgaatcttcattcggcgcttcaaaggttgatcaagattaatcatagcccgaaccttaaaatattctcgccacacaccagagaagttactctcatcggactccacaaattttccaatgtaatcccctatcttctgtaaagttctttccgttcgaaatccatgttgaaaatcatagacttgaacccacaaatctagtcgattgagagtgatagttctcagattatcccctgccttaagtctttcaaatatgagttgtttacgttcaaatgtccatggacttccattaatgactctcttgatatttaattcatgataaaactgaaacaaaaatctgttttattccaattccttcacatataatcccttgcctggcttccaaagaaaagtcatcatatgttgcatagcttgtacatcgataatcccagcattcaagaaccgatcaactagacattaccgaatgtcgtattgctcttcctcttcttctacctccaatgacaaaccactgaactctttgatgtcaagagttacctcctcctccatatcaattggtggatgacttgaacttccggaagccatcacgaatgggaacaatcaccgaattacaaaacaaccaatagattaagaaacaaggacaaactcacaccatgtcaaaggataggacttagaataatattgggcacatctggtatgaatttttttaatgaaaaccaaatcaagctatatgcacaaaaatataatgatataggtgagtaagacttaaatttgtacattttaagtctttatcaatacatatataattaatataaattaaatatttcataattttaattgtaaaattattttagttgaaatatttaatttacttaaatttggtatttttaaatttgagtaaattaatataaaaatggagtctaatgcccaaatgattttcataaacttcatatgtatatattaattaaatatgtatttgggcgtgacttttctacgagcaggtatctcacatttggctttcctaaaaactaaaggcccatgtcacaatagcaatttacttgctattttccacgtacgtgcacgtcccacaaagccaatctcccattaaagctgaagtgagaccacttcgtcatacacatatctaacggtgctactccaagcaacacgtgtatttcattcccttcagctacaacctttgccaacaagaaagaagagcatcacaaatgtgggtgtgccacctgtgcaacaagttcccactctcttagtataacctaatttaagtggctccatgatcccattttatctcaactttttaattaggccacaaacaccactctctctacacgaaaaataccagctttgtgttcaatttttctctataaatagagaaacaaatgtagtgaaaaaggcattagattttagagagagtagaaaattactttgttattttattcttctctcttattactattttatctatacttattttagtgataaaaatga

SEQ ID NO: 26002 - DNA, 1742 bp, Cannabis sativa
ttttttttttttaattttatataataatttatataccatatcgtagattagaaggagctagctagtactgcttgctatataggtttgaaatttctttatgtgtaatgatactattgctatattgtgatcattgattcatttgaattatgtttactaattaattaagatcattaaatattaatgtaatatatatgataataattatggtatattattgatctatcgattccggccaggaaaaaacaaacaaacaagatataaataaataatatttatttaaatcaatcaatgtactgtttctggctactctatgttgtcagccatgtagatctaattcattaaatataatatataaacagctcaaagattcttgtcgtattgtggcacaataccaaatttgtcttgcaaacgaccgatgttgtaaaaacatcaaagaatatattaatacgtagagaaaagctatttggttcagtaacttcatatcaaaaaattcagaacactggatttcattgagtattgttcattctcaacaacagagaaatttaacacgagtaaagcgacgtgactacagtactagctacctacctaagctaccaccacatgcattttttattttttttgctttcagaatatattttcatcaaattatacgttaacaaattaattaattaaacaacacacgttaattacttatactaattaagtggttgaccaagatacgaacacttgaccagtgggtccaaagatctcttgatgagaaatttctacagctggattgcatataaatattgtacaaacgaataaaactcattaattttcaacataattattaatatttgtgagttgacgttaattttaatgtgtatatatctctttttacctcaaaataaatcatttagctacttaatgtttatatagctatagaaacaaattttcttctatgcaaaaataataatgattaattattaggtgtttaaagcaagctcatatggttagggtttagggttaaacagttataaaggggctgcagctgtagtagtagtagtagtttgagtcagtagtagtagtgaataatatatatgtatatatattttatattgatatgactaggtttagggttttgtagaagaaaagagtacgcgaatcggtcacaacagcgtaagaataagaagcaagcaaagcaattaaagcaaaggctcaattgaaaagcatcgaaagacgtcagagtgaataattatattatgtggatgcaaactattggttatcgttacactactttatagggacaagaaactctatccagccctagctataccccttttcttatattttattataaattaattatttaattaattaaaccaaaactttttttaattttctttctttctgatttcactttacgtcacttctatcaccagttgcatgtagagaagatgttatgtacataatatattattgaatatatacatataagctatatattgtgtgtttttgacaaattaaaatttaatgattaataatatgaattatctttataacttttttatcatgactaaatataatatgccaccctttttcatgtttcttccttttgatcgaaggaaaagttcaaatataaattgtttatgttgtcactaattaatcattattataaagtaattaatacctcttttggtatattaacatagcctagcatatcaaattcatcttttcgtgttccaaaattagaaaggagatta

SEQ ID NO: 26003 - DNA, 3427 bp, Cannabis sativa
gattattttactttatacacgtgtgaaatagactactttctataatataaataatgttgaatttctcaaaattttgtaaaatatctcaaataactataatatacaaaaatatatataaaaaaatggactaaaaaatctttttgaatggcaaaacaggtaatacataagtgtattttaagagggtgcattgtaaaaacgggtccggctctttgtgcatagacggattaaacctgtgcttaggaccgacctagtcagggtccaaaaaaaatttactcttttaaaattacatttttttactaattttgaaattataccacatttccattcaaaaaaaaaatatataccacattttttttgaataagagccatttttttttctatagtctactactctactcaatttcaggccagccctgtgtagaagcacctaatactatattaattgtgtttattatttacaagtttttcttttattttttaggagtgtccgaaactctcacgcaattttagaaattaatgaataatttttttttgttaacttgtaaattacattatcttttaaataataataagtaagagaaaaggaaatatttggccgtagacttagaagagccactaaaactttgtcatgggtggagtaggaccctttgacgactgacatattgaataaaattatttcatatatgaaaatggctcttatatattattataattacgaatgttattattaaacaactcatcaagtcaaagtcaacactaagtatagtctttaattcatcttgtctgtttgctatatatgccagttgcctcactataattgatcttaacatcccagctgatcgagatatattaacaacacataattatataaatatatatatatattaatttacatatatatgttctttataatattaattttgtttcagatatatatgtacgaaaattaatttcaatcttttaaatgcaagtgcagggaaagttctgagaattttaatggcatatctaatcagcatttagtgagttttttaattcatgagagagactgagattaacaaaaataattactatttattccaaatacagattcggttttacattataattgccaagtttaacacctctgtgtttttggtatccaaattaatatttctgattccaatttttttacatgccaattgtttagattgtaattattcaaatatttaaaacacttcaaaatagtatataaaatagagttttgaacaatataacgcatgccatataaaataaaaacacgtatacgtgcgtgccaagtaaacttaattaattattttctatagtacattataaattattctaataaattttcactaaatttatacactacttaaaaaaaaaatagagtatatatttcaaaaaaaaagaaaatagtgtatacattcaattttttaccatatgtaaaatataaaacctaaaaataaaagtaatgtctcgaaataactaaagatacatagatctccactaagctatccctttattagtgaaaattatatgttttcggttattttaaaacaactgaagacataaagtctataaattcttagaaaaataagttgagatcttttattttctctcttttctcataatctttctcattcgaaactttaataaccaccgaacttaaattatcatttcatccataaatttaaccaccgttttttttcttcattttttctaaaatattttatatatttcttattccaaaaacacaaatacactataaaaattgatttattttaggttttaagggtaaataaattattgctactttagggtttggcggccacgttaaatagtaacttcggtttagagtataaaatatgaatataaatttgtttattttttataaaaataaaagtacctatatctctaccaagattttttttaaccaaaattgaccaacaaaaaaaaaccgaagataaaaccctttcaatatggtatcacaattaaatatctactatttacattgtaatacatatataaaaaataaattataaattcaaatgacaaaaacataaaaacatcgatcgagacaaccaatttttatttcctattttatatctatattatatatggtccaaagactaaagtatataacattttatgtatatgggtttgatacaccaaacggtaacttaataaataaaagcctattgctattcgtatatattaaaatatggtacacacatctcatgatgagtcatggggtagtactatatatgtatatagtatatatagacaaccacttcatcctcataagagtcatgaccaaacctcataacaataatatcagttataatactactatataatatttttggtaaccagttaccaaatcaataaatcatgtatccaacagcaccagctgaagatgatgaatatgataataagaagtattcaagcccaacagtaaataataatcaaaatcaaaatccaagtctagcacaaccagcttatcctcatcatcatcatcatcatcatgttccttacataaccagaatgcctgttcctggtacagccacagggaagtggtcttctggtctttgccattgctgtgatgacccagcaaattgtaagttaatattaagagaaattaccttatatactattttttttatcttttttctttcaaatttacggtttgggaccttgggttactataatagtttcttcggtggtttttatattagttgctatgtgagttttggttgtgatttagattgcttagttgttatatgagtttttacgtagatttctataaaaatacaaaaaaaaaaaaaaaagtattttgaagtgtaaatatgtattattaaggggtattgtatctagtatatcaataccaccaaattaattagtactcaaatttaagatttgtgttgtttcggtagttgcttcagtggttcacatgaattttgattacgatttaggttatgtgagtttttatgtcgatttttgtaaatatgtatgattaataatgtttgtcatgttaggtatggtgacttgcttttgcccatgcatcacatttggacagattgctgaaattgtagacaaaggttcttcaagtaagcccaattaataataaccaaaaataaattagaaattaataatatgcatttatatgagtagtaatataattaatttggtggtattgatatatatatatatatatagcttgtggttgtcgtggggctatttatgggttggttaatatgactggactggcatgcttgtactcgtgtatctatcgatcaagattgagaggtcaatatgggttagaagaggcaccttgtgttgattgcttagtccacttctgttgtgagacttgtgccctttgccaagaatacagagagctcaagtaccatggctttgatcttggaataggtaa

SEQ ID NO: 26004 - DNA, 1652 bp, Cannabis sativa
taaggtaccaatgatggtactaaggtgtcaccttataattaattaatgatattctataaaagttaatataatatatgagatttgatatttaatgttaattgtaccaaaaataatatgacacgtcatttcaaaaaaaaaaaaaaataatatgacacgttggagggtgttagacactcaccagtaatcaaggccgatcttaagaatagacgagacaggtgtgcgcctcaggctcccaaatgttcaggccccaaaattgagaaaataaaaatattagtatatatagataaaatgttatattatataataagaaaacgtaataatattgtctagtgtagctaagatatcaagagatcaattcttaatctctatattatttttttagaaacaaatatttaatgtgtaactaaggattgaacattaatggagatcttaaacaacttttaaaagttttaccataacactaaaattattattttaataataattaaactatatagtatatagttctaaaatttaattttatgttatgtactttaagactggcctatatgggtagtggtgcattttaatatttctctagatatatataattgatttgctagctcttctcttgactatattatatatgttaataattttaaagtttttttagttgagaataaaagaaatagatataaatatgatcatatattcatgtgtacgtacgggacaataatatattatttattattattattggtttttggtttgtgactttaatttaactaattaattatattatatatgggtatatatatatatgtgcatgcatggccgtgatcaatataattaatttatgattatattggtcacttaattaattaatgatggattatatataataatgtcagaatttgatattggtataatcttttcattgctgcgtaacgcagatgatcattattaattataatattattattttttgatgatatatatataattatatatatatatatgcagctggagtctgagtcatcataatatgtccacgttgtactgtctatataaatatatatggcccatccatgattatataatatatataatttatatgatgatctgtggagccagatagaagcaattcatatatatacaaaagtttcacattcattatatataattattatataatatagcagccatgcaaagagattatatatatatatatttatggttcaattaataattaattagctttttgttatgattggcttcttaatttaacattttaaactttattattatataatatttataatttataattacatatgcttgcatgcattacagctttaattaatattaatcatatgtataaaaagttttttttttctttttttatgtgtgtatttatttaattaatattatatatagcctacctatatataagaggttggagtgttatgatgtagctatatatagctagcaattaataataatcatttcattcaactcattattcgatgattatttttttttctcatcatcgctttattaacatattctaacttattacatgcacaaactacaaaattagttcttcattctttaaaattcttgaggaaattttgataactcaaacggagtcatcaatttaagttatcaaaatt

SEQ ID NO: 26005 - DNA, 1633 bp, Cannabis sativa
aggtttcataggaccaccaaatttatctgagtgagaaatggtttcattaaagtcacccagtacaagccatggcaataagggggcagtatccttgagctttgttaataattgccaagtaaggttcctttgagagacacaaggatcaccataaaagccagagaagtgccaagaagggccatcagagagcgacatataacaatcaacaaagtttttaccataattaagaatagttacatttacatcagatttccaaagaaaaagaagaccaccactaagacctactctagggacttctataccattagggaattttaaaatattatgaaatttagtaatagaaccaacactaagcttagactccataataaaaattacatcaggcgaagtttgagaaatgagcaaacgaagctgacggactgctctcgggttgctcaaaccccgagcattccaggagatgacgatcatggtgattggcgaggctgaacatcagcctgcgccaaaaaagcattagcaccatcagcctccagtgacaaacttgagaagtcagagggggagacaagttgatcatgcatctgagagttagtagcatcagcaagtggagaagcatttgtacgacatcgctttaaaactgtacgcatattaccactggaagtaaccagttgcctctttgaaaataaagaagatagtctattttcattcccataaacatcgtgagccaaagtggaatcaggattattgctggtgatgttaaccagaccagaagagggtgctgtgacgggtaaatcagaagataagtgctcattttgcatagaagtttttgctgctgcaatattgagtgatggagtaatatgagcataagcaggaggagtatccattgataatactaccgatctttttggggagacatgaaatgtagcagagccattctttttggacaagtcaacaggcgcactaagagaggctttaaaggtcttggtaatagtttctgcattgcaatgtttatcagtcttaccactatcatcagaggggtcaaagatcttaacattttcatgacatgaaggaggaagtggagatctaacagtggaagggccactaccatcagccatatttaaaaagttttgtgggagagatccatcagtagaactttcagaaattgccttgcctttctcatgattactgatgtggtgaggaattgcaggcaaagagacacaaggagggataataggagcaacagtgtttcgaaccaaccgagtaataaaaggccatggcccagcctttgaaaaatcttgacgatacctgtcatatccagactttggtaatgcagaaccttccatccaaggtccataggacagatcaggctcttttccttcatcaattttctccataaataaagcacacttatcaaagacatgaccaacaataccacattcataacaaaaatcagggaggcgttcataacgataatcaagccacaagtcatcagccatccaagggaaagtcaccatttgtccacgtagaagaggtttagaaacatctataccaactcgaattctcaaaaaaaggccccaaccttcatttaaagaatcttcaaagacttcaataaaagttccaatgaggttaccaagagtcctag

SEQ ID NO: 26006 - DNA, 8162 bp, Cannabis sativa
  modified_base (5621)..(5631): a, c, t, g, unknown or other
  modified_base (8100)..(8113): a, c, t, g, unknown or other
atccacataattattaatatttataacaagtactatatatatagtacatcaacaattaaagttgtagtgtaaaattgtgatacgtcaatattcaaaaaagagacagagtcttatatatatattatattaattgatgaggattgctaattataataactattttttttatcaaaaaaataatattttagtatgtgttttcaagcacagaatttgactaagaggttgtcctcttatattgatagtgagtttttagcagctaaatcctcttactatcatttcacttgcacttaattctctaaattcaaattttggcagtaaaacttccaaattactgaaatattagcaagtttaaggtgttatccgattaactgcatcgtgaactgtttatgtgcacactcttgtacacgttgacacgtttatattagcccacttaatatttttatttcaaaatttatttttaagttaaaaaaaaattataaaaataaaataaaatatttaaaaaatataaattttgaaataatttgttttataatttttaaataataatatacgtgtgtacaagagtgtacacataaataattcatgttgccagttaattttaaaatatagatgacactttaaattaactaaatataaatgttcaaaacatatattattttatgtatttgaaaaacaaataaaaaacatgttttggtagttgagtatagcatatttataatttatatatatatagggagagatagagagagagaacaaataagaaagataaaagagaggaagaatagagtagtgagtgggaaatcagagagcatggaaactaataataataataacaacaatgaagcattggcaactgaagctccattagcaccaataacttctcaaagaaaagttgtaactcatctagaaatttcactccctaaaccttgtaagtctatattaaccatatatatatatatatatgataattaataatatacatatatatattggttaattatatattaatgtgtatatatagatatgccaagagcacttgtggctgtagatggagagcatccaaatggaacagaaggccacaaacacaagaatatgagtgttcttcagcaacatgctgcatactttgaccaagatcataatggcattgtttatccttgggaatcttatgttggtaaatctaattatatatatataacccatgaatctaattaattactcttttttgtatgaattacccaattgtattcaaagaattacaattatttcaaacagactatatatataagactatctgaaatcatttttattaatagcccgatacaacaacataaatcgcaactaaaatccaaatagcaatgcactagaaattacttgagtaacccaaccctaaatttaaaaaaaaattaaaaaatagtataaagtaattttcttaaaaaaaaaaagttagagaaaagtctgctaatgagttctggtattaatggtgtttgaagagttctttcactttcacaaactatcttttttcgttgcaacagtactactccacacagtttagatatatagctaattatttattattttattaattaacaataatttacaaactatagagccccaattaattagatgtagctaattattatgattattattgtaaaatatatatataataattgtgtcaggaatgcgtgctgttggtctgaatccaattgcttcattttgtttggctatgctcatcaattctgcactcagttattcaactcttccagtaagtaatatatacaaatatttatatatatatacatttctttttcagatttttactgtatagtcgtactagaaaaatattagtacaaataattggcatgtgcccccttttttcaacttattttacattttagtctatttttgatcatttttattttttttaaaaaaaaattcattaactctacatttatgaaataccatttattactctaaacatattttattaattcctattatatagtatatatatatacatataaataaaattcaatataattgtgatttataaaattaaaaaataattaatgttttaattcatacatataaatttgatggtaataattaaatatttcagggatggctacccaatcctttatttccagtatacatataaatttgatggtaataattatatatttcagggatggctacccaatcctttatttccagtatacattgataacattcataaatccaagcatggttccgactctggggtttatgacacagaaggaaggtaataataactattaaattactaattataattagaataaactcatatcttaacaaataaaaaaaataattaaaaacttaataaaaatataaaattatttaaaaagaaattagaaattaaactaaaaaaatgttatgtttacttaaataaatctatattttttttttaaaaaaaaaaccaaaataggctcaagtttgttcctgtaaaatttaattttttataaaattaaaattttaatatattttctttaatatctaaatgatttttttattaataaaaaataaatattttttaaatcgcttgattagttttaaaatttaatttcttttttaatttttttaatcattcaaaataatttttttaagctctaaattatttttttaaaatttattaaaaaaaatattgaatctttatcatttttatttttatggggtacgatttgataattgtcaaaatttaagggacaaaattactaatttacgaagatacgtttatttaaaccgaataatgagacgacataacctaacagaaggtctaaatctctataaatgaaaaagttcaagatgactcttaacaagccgtatattttaaggggcaaaatcagtattgtcgaaagttcaagagagaaaattactaattattcctacaattaataccccattatttgattattacttatatatagtatgattaataatatactttctacaaaatttggaagattaatttccacatgaattaaattatcattattatttatgaaaatgcccttttaatattataattaaaaggatatcaactagattaattatgatgacatatagaaaattaattagttgtttaacttattaattatactcatgaatacacaagaaaatgatttatgttatttttttttataaatgctaaaaagcaacaattacgaaaatatgttgttcgaaattttaaacatttttaatggtttttaagattttatttacaaaaaaaaaaaaaaaaaaatatgatcttttaatatttttatattgtactcttgttattttattgttagttttttattgtttgtatattattttttttttgttattttcatgtgattctcttgttgtttttataaaatataataaaaatatatataaaaaaaattgaacctaaaactataaaaattttgccaaaaatattactttttgtaattttcatagtggaatttatattaatattaattatttcaggtttgttccaatgaatcttgagaacatgtttagcaagtatgctcgtactgtgccagacaaattgtcactaaaagaaatttgggaaatgactcaagccaaccgatgtccatatgatttttttggctggtatatttataaacattaacattaatattggtatttttgtaattttattttgattaatatggacattaaaattatcccagctaaaatatataagaataagatataataataatcttattatatatatatatgctatttatttaattgtgacttaattttcaggttatcaagtaaggtggaatggttgagtttatatgcaattgcaaaagatgaagatggttttgtgagcaaagaagctgtgagacgtcttttcgatgggagcttgtttgagtatttagctaacaaaaatttaggcactaatgctaagatggaatgatgtgtaccaaaatttatgtttaactaatttagttgtggtatgtatttatatggagtgtgtgagcctaggctcttctatgggcagtggtgctttggttagggtacattagggtttgtggttgttggacaatttttcttcatattgttgcttgtttttggctaatttggtttttagtttttggtttactttgtaataatgttgtttatcactctatttattctcttcttctttccctttaatagttccacttttggaaagttgagcgaattcggtcaagcccagtctttggctaaggtgagttataggcccgttcttagaatctacccattataagagagaaactaaagaatatgaaaagtctttctttattgattgtattttgaaagaattacaagtgaaatgggaaaagcttatataggctaaatgaaccaaatataacagaaaagactaactttaacttttaacaaactaacaaaccaattgaaataataggccctttcaagatggtgtgtaaaagtttttgacacccatcttggatacaatgtcattgaagtgagtgggaaagagaagtttggttaagatggcaactaagttatgttttgaggaaacatggttcatttgctgctattggtgaccttttctcttactatgtggcagtctatttccacatgcttagttctttcatggtagacatgattttttgtaatgtgaattgttgctgagttgtcacaaaaaacaatgtattggtatgttgaagtccttgatgatagaatggagccatgtgagttcacaagtggcatttgccatggccctgtattatgcttcaactaaagattgagaaaaagtgggttgtttcttggatatttatgattgtccaaggaacacacaataacctgaaattgatcttctagtgtctaaacaagctccccaatcaacatcagcaaaggcctggagttgaggagtggggcatgatgcataaaattaagaagatccttggccaggagaggtttttaggttctgtaagatctaagttgtagcatgtagatgaggttgtctcggagattggagaaatttgcttaatttattgactgtaaataaagttgatgtcgggtcttgtgatagtgaggtaaagtagtttccttattaagcttctgtattgagttagattttgcaggagttatccatttttattgttgattgttatgttgggttccattggtgtagagtgatttagatccgaggtaacttgaatcttgtaacaactgtatgaatggtctttcaatgaatgatatgcctttggagcatcagctatctcaagtccaaggaagaagtgtaggctgccaaggtccttgagtttgaattgtgtatcaagtgtagctatgaagttggtcaatgctgcaatattattcgtaacaactaccttgggagaatatcagaaatatttataactacttttcaaattaaaattcaaataaatatttatctttttaattaattaattaaacaatttcaagtgagacactctacaatattaagggcacctacactgtgtttaaacacagtgtaggtggcgcctccctttgtcttagttaagacaagggttgggtcttttatcctcacaacttttatcttttctcaatttatttaattaattaatttgaaaaataannnnnnnnnnncaaaataaataattactattttgaaaaatcaaaataaattttttcgaactttcacatacaacttttatctctccccttgacagtgtttcaaggtggcgatccggggactctggacctagaattctaaactctaataaactaaattatttattgaatctcataaaccaaataatctatgtcttgtctattgacatggcgagttttgttgtttggtacaagattagtcaattgtgaattgtgtttttttggctttttgagtcgggtgggttcgtaggcagtatggcatcatcaagtatagggattgatgagttagaattgggctgggatgaatgacagattaatgaggaagaagaaagagaagtgttgtttgataatataacagatctagaggatgaggttgatgcacgatagtgtctagtaggaagattgttatcagatcgtgcgactgattttgatactcttcgaaacgtcatggcctccttgtggcgttcggtgaaaggaatgtttgttaaggaaatggagttcaaccgatttttgttccaattttttcatgaactggatattagtcgagtgctagaaggtacaccatggacctttaataaagtcccattgattattcaaagactgaaggtgggagaaaatccaaggatggttcccttgaacaccatggaaatttgggtgcaagtttataatctaagagttggctttatgtcggatcgagtgcttaaagcttgtggtacatatatcggtaagttcgtttcttcatgtcttaagaactatactggtatttggagggagtatttgagggtccattttctgatcaatatcgataaacccctgaagagaagaatgaagatttattacaccaaagaagactttttctgggaaaatttcaagtacgaaagagtgcccacgttttgcggaatattgggtcacactgagaagttttgtcccaagttgtttgatgaaccggttgagaaaattgttaaaccttatggtttgtttaagaaggcaccagatcgtcgtacacaaaagaattggggcgaggtggcttagagataatatggcaaggcctttgcaacaatgttctgacaatgttttttcggtggcagctagcagttcaggggtagttaatgctcctaataattaggatattaatgtggaggatagagagatttatggggattaataaaggagtgattgatggggagattcaggggatcatgggaagagataatggtggagttaaggcttcgatgggtatacaaacagatttggttggggaagtgcgaaaagacagtcgatttgaaaatgaggggttcagttttattgaccctaaaaggagacgggtagaaggaaactcaaatatgggctaggaaaaagaacaagttatgggccgagcccaaataattgttagtgatgaggttgttggtgagagtggagggaagacgcctgatgaaggaaaagaaatgcgccttattgaagatgaagctgaagtgaatttgggtaataataaaaataatcatgaggcaattgtggaagatggcatttttataaaaaaaaaaatgagttattggcgggtaccaacgtttggggccgccaaggattatgagtctcttaagtaggaattggcaagggcttgggaacccctgggtaattcaatttctgaaggaaattgtgttccaaaagaagcctaatgtcatattcttgtgtgaaactattagtaaaaaataaaaagttgagtttgttaaaagtcgtttggggtatgaagcaagttttgtggttgatgcggttggtcacagtggcggattagctatgatttggaaaacccaagacgaaaggaaactttttaattttagctccaatcacattgacatggtgttcaacctcgatggtcatccggaatttcgcctaaccggtttctatggagagactcaaagaagcttgcgacagaatacatggaggaaaatcagtcaacttgctggggaatctactttgccttggtgtattctttgagatcttaacaatactctttctcaaagtgataagcatggggagcgcccctacccatccaaacttattaatgagtttcaagacgtagttgatgagtgtgagcttttggatatggaactaattggacatccatttacttgggagaaaggaaaaggcacgttaaactggattgaggttagacttgatcgtgctctaatctcttattcttggaattctattttttcgaatgcaaagctgtttaatatggaggtatctgcttctgaccattcccccatcttgcttgatcttgctttttggaaaattgatatggttattaagaggttccggtttgagaatgcattgactagggagcctatgtgcagacaaattattcatgataactgggagatatttactgatgaatgttacgaattttatgtttactacgcaagtatacgcaatcaagtagtatctcannnnnnnnnnnnnnaaccacagggaattggattaagtaatactaaactatacttatgattcta

SEQ ID NO: 26007 - DNA, 3517 bp, Cannabis sativa
gtaaataaccgcaaactcaattcatataactaaataaccgcaaacttaaatcgtttccccttcattaacgtcaagaaacgttacaatagcaaaactcaattcattcaccaatgaatcagtgtactcttttcaactaactacgaagaaggaagaacattgaacaactcgaattctcaaaacgcataacatgagaaacctaccaattcaaacacaaatacacaaaatgtcttacctcaaacttctaaatagtcgatcataaatatcaagaacacaccaatagaagaacacggaatacatgaaaactcaaaatatacctgcaaataacaaatggtgtttgaagaattgagcttgcgagatttcaagggatcgtccttgtcccgttcctcagccgttctcttgttggacccagaagacttattctccccctccatcggcgctcctctttcgcggcttttcccctctgtgaaactgctactgtttctccggccagggccacgaggagagtggggattgaaacggtgtcgcctattagaagacgaataacaaagaatagtgaacgagggtttaagctagaggaggtttttgttttagaccggaaaaggggttagctaaaagaacaatatttaggttaaatataattattaaatgaggtacaaagtaaaagctggaatagctcagttggttagagcgtgtggctgttaaccacaaggtcggaggttcgacccctccttctagcgtaacttaacttttaattgaaacttttgggccttctaaaaaggccgggtctcttttctctatttcttcatttattttctttctcccactccaaatcagataaggcaaaacaaaaggaaaagaaccaccaatgaaccatgcattcttttctcccacaaatatccaattcacttagcttagcttcacctcatattcttcactgaacattttggtttaaaaaataagaaaaattaaatatggcaactttccaattgggttctacagctttatcttcctcaatttctttaaacttcaatcccattatcaaatcccatataacacacaaattacctaagaccctcagcttctctaggagaagaaaaatcagagctgttagtaccatcccagatactgaatccgaagccacagagcccgaaggacctcccacagttgattttgcttttgttaatgtaagttatacactatatatttaataaaacaacttcactgtataatacttattatattgaccacagtttattcacatgaattatatgttgttttcattttagtctgtgttacttcctgatggaaccccagatgtgcatctccgaacagcaagtggtggacaaaaactaaggaatataatgctggacgcaaacattgatttatatggaccatatgtaacatctcttttatcatagtatttcatgattttgaatattttatattttaaagaaagggatcaattaatgtatgcttttctttttttttatgattgaattttcactcaattaagttcaatttgcagggtaggcctcttttaaattgtgcagggggaggaacttgtgctacctgcatggtggaggtacatataaattattaaatagagattttaccaaatatattacatttaccattaatcattaaaataaggtaaaataaggctgtcatatgaattatatatatgaaaatactttagatggggctttttttattgagacaaataattgatgaaatataatgtactagttcattttggtttttcttattctttttgagaagattttggtcttagtgttaatgaaacattttatgtgttgagttaggttgttgaaggaaaagagctattaaaccctcgaactgacaaagagaaggagaaactaaaaggggtaataatcaagttcacttgatgccatcttctattattgataatatgtgaccactacactacagcaaattacatgatctctttctgatttaaatagctattttatacgactaataagtcttgctggttgaataatttgaagatgaaaatgccacgttatcatcaaattatgccaaaaaaaaaaaaaaagaaatatgatgtttgagaaaaaaagatataaaagaagtaattacgaaaatgagtaatgattttgcctttgtttactgcctatctgagtaaaaatagctaacaatgttttatgggctttgtgcagaaaccaaaaaactggagacttgcatgccaaactacagttggtgaagccgactccataggactggtttgtgattttgcaataataccatcatacttgaatgtttgcgcaaaaaacatatagaattttcaatcccaatcccataaacattaaataaaataattatgcctaaaaattatattgaaattaaaaaagagttttatatgtatcaaccaataaccatttcgatctgattataaataagtaataattttcttttgatgcaggtggttgtccaacaattgcctgagtggaaaattcacgaatggaattatgaaaaagtagaaccttcggagcttagttaattcagacatttttgtcactaataattgtaaattattgaaacaaaattatgtatattgagtgatattgttgacgcaggaaatattcgttacatataatataccaattattgagaaatcggcagctaaaaatactcatttttttattggtaaacattgttatatattgataattaataatatataaccaatccacaaaaaccatcacagcaattataaaaagttaaaacaaatgtaaattacatatatttttttttaaaaaatatcaactaagtacaaagatgatatgtagataatatttagaaaaacatgaacaataccataatttcaaaattaaaacggcatactaaacaagtaataacatgcaaataaaacatatttatgtatagaataatgagaaggagagaaaatgaactaaaccatacacacattaatcagcaccaataaatgtttgatgtcaacaccttataattataaatagttattgattttttataataatgataaaatttaaaatactagtaagacttaatatttaattatactaataacataataatgtgacatcttctaatatgtttagacactctaatagaatttttaataaagttttgtaaaaagttgtttattgttatttttttagcataacttgatagtgaaaattaacattttatggtttttatacaatttgtataaaatattattttttttctttccaaaaatgttattttacgaggaaaattaaaaataaaataatatggaaaattgtgtaaagtaactggttacctacttaccagttaccacttcagttaagtggttatcctaaaccattttgtttatatattttttaatttttcccacaaaataattttttcaataaaatcatactttgttagctttgccaaaaaaaaaaagaagaaaacatgaaaataaaaatatttaaatacgtgttaaatttcacctatactaaaattgtactaa

SEQ ID NO: 26008 - DNA, 2840 bp, Cannabis sativa
  modified_base (2782)..(2807): a, c, t, g, unknown or other
taagtataatcataattgaaaatttaagagattagggataagaaaagaactataatgatgaataattgatgatgtaatctccctctttttgtcgaaatttttttgtcgcgtgtttaaattagtattttggccataacttcttcaatgcaactcaaaattggacgattcgagatgtttcgaaaagttaaaaacgagatctacaacttttatgtttagctccaagtttaattttgcttccaaggttgtcaaaaatcacaattacattatgttttgtcaaactgagctcgccgacctctattattttccacaataatgtactaaaatccttccaaatgactccaaatgcatgattagtctttaaaagagcctaacaaattataatcacactaatcaataatttaaataatcaatttaaaaatattaatacataaattagccatatttataagacaaaatatcgacttatcaaattctcttacacttgactcttgctcatcatcgagtaagttaatgataaaatgtatgatgcttaagcaaattggtctttatgaaaagtaattttagttttaaaaattatatatctacttataattctaaaaaaatctaaacttttcaatcatttaaatttcaactcacgataatcattttttaaactctattcttatacgagtgtgtgatcaatcaactcatcatactgctaatatttaaatcaattcatgcatgtcgacaatcaatatttatctcaaaataaatgtatatttgaatgaaaattcattccaaaacctaattatcgaattattttatactaatgtaaatacacacaatctaaagatcaatgggactttataaagcttataatgtaaggctatggtgaaaagtataatagaaggttaatttaggctcaaatcatactatatcatacatatataatattcgctcaaataattctcatttgtattcctcaatcactcccctcaataatttattattgtatcttttttttccataaagcttattattccccccacatttaaattattgcaaatatttatatatttctcatagaatttctttttaatgaaatacttacaatttacaaacattcattctaagggattagtaattttttttctcatcaccacttatacataaccatgaatatgttctccttaacataactctcgcacatttacaaacataatacatcaatatactctagtgtgaaaaataaaaaagaacaagggattattttgaaggctcaaaaggttcatgtataaggttaaaaagaaagaaaaaaaattaatatttgagctcaaatttggtaactagggaatttacaaaataggataggcttgaaaaattcaatcaatctaaaaaaattatattatctatatatcatcatatctcatctcaaaatcatgtgtaatttattaattttgcctcaaacacttatcaaacaagttttaaagtggttgagattaaatattaacgatcgaacatgcattcatctttccaagcattagcaaatatgatgattcaactttcgtgcaaaaaaaatcaagttttggcaataattaatcatgagaaacacacaaatcatgagagtctattattttcctaaaatcgtatccatcacacgatcaaatattttatcatcaacacaattattttttagaagaccatgcataagaatttaagtaaaggcaagcattaaacacaagcagtcattgtcaaaagaatttcattcaaactatgttcactattttttttaaacaaaactactgtaaactaaaaaaacaataataatacaatggttggcctgatgctggcccaatgctagcccgatagtggtattgatttttatcatgacattgggcaagcatctagccaacatcaggcaagccattttttaaaggaaaatgttgcagtaagttgatgaaaacctactcatgccacaaataataatgttcaacaaagtccaacaagagttcaacaataatatgtaacactacaatacataataatacgatttactaaaattcaacaataatgtttaacctctataggtgcaagactttctattgcgccccttgccatgacacatgctacaggttcattttatcacaatcctttcaccattataagcaatttgatttgatttaattcttccaacattttgtttcttgagttgccctactggttgcttctcaacaggcactccaattgacatgttctttatgtcattagacaatccccaatcattctcatcacaaactggcataattgtaccttcatatgtgctccttcaatattctgtggcgtaatacggcgagcatattgcatacacgctaatacttcgttgttgagttgcagcatatgcatgaggttaagaaagcttcatgatttagaacaagctgcaagtgcaagttgttgggtttggtgcccaaactaaaaccctaaaaaataatatgcttagtacttctagaatatttggcgaatttcaagtaccccaaaatacctcggtatttctaaaatcaacttatctcaataattcaatcaatatttttaactaaaactgttgtgatatttttggcctccaatcagatcttcagggttgtcgaaccttaaaatatttttatttcacaaataactcatttatatccacgtatttcaaataaatcttcgtaattaacaaattatgcttatttatccacttatcagatctttagggtcgcctgatcagaaaatatttttatttcacatatagctcatattacattcnnnnnnnnnnnnnnnnnnnnnnnnnnttataaattacgcttatttactcacttatagca

SEQ ID NO: 26009 - DNA, 8739 bp, Cannabis sativa
  modified_base (843)..(847): a, c, t, g, unknown or other
tggctggccccccatgtcgctggttgccgggatctagctgctctcgccgttagacctttgaggaaatgtttgtcctccccctagcaaggaaaaatctgtcctagttcctgaggaaccaggttggtcagcttgtcgttataccctccctgatttatcaatgagtcttccttaaagtggatttctaaaggagatcctggcctcttctattggatctctggttgaactgccttgtcagattactgacctctctgctacagcgatccaactctgcttagtgagattgaaggatgtactcctgatcatccatcattctcacgaacttgcatctctactgagcgaatacatcgcaatcagcagcgcgtggttcttcaattaggcctccttggcctacaaattctctgagtctggctaacttgagatcctctcccaagtccacatggggctcgccaattgtaggctcaccaactcctggtcttgtctctccattgtaatactgaagacgagatccgacagttgtttctgagggttgttgcccatgagtccttcctttagtgggaggcgccaatggtgggtcttcccttggaggcaaaggccttctattcatatccactgtgatgtttgtatcaatttagccagctgtagtggcgaggctcgtggtacctgtggtggtgacaggatttgtgacatctgcggtgttcatggggattccaattgtgatgtgaacctgagcattcagatctacagtctgtgggtctcgaggaagacccaaagatgcagatggtgcgattagggttcttctcgtgtgaaccatgacatttgatcagatacgatatccacgctctnnnnnaaagcaccaaactgttgacctcgaaaagtgatcaactgacagcggggtcgtatggatctgatgcttgccacatgatacacaaatagaatgaaaaagtaaagaacgcacatatttgttattgaggttcggccccctttgataacgggtaatgacctactccccttttagttgtattaataccgagggttaatactatttagattactataggcgggatctgatatagcacccttaaggatacaaagtatgaatcaagattggcaaatctcatgtgataagagtgcttgtatgggcgtgtgagagaaagtggagaggagaagagttatcagacttaggcttagagcttggaggctagtatcaggctcaaaccgaacttaggttttctaggttagagttaagacctttatataggaagcctaaaaccctaatttacacttgaaatcctagatatttgtatatttaattactttattaaaaaagactaaaatgctcttgaacatagatattatttagctattctattgggcttttaaggcccaatttgcagcccagatgacactgtccatgtgtagaagtgcacagagaaccctatagagcttctcttggccgatcagacccctgtaggaagcaagctggccgaccatggtgcagtctagaggatggttggcccaggggtagccaaccaacttcagtgagaaagctagtctatcacttgatgcctatttgagtgtcggggtctctgttcgcttaggtactgacttggttttttattggtgagttgtactatcacgtggcactaattttgtctacgtaagcgcttccacgttaggaggataaaaatcaagatatcagaatgcttttagtctgatggtgggcccgatagtgaatccgattgtaattccattttttattttattttatcatttgtaattatttttttttttaaatagataaaacaaaaaactaatcaaattgtttttagagttttagaagctcaaaaattacttttaaaagcccaaccaaatagcaccaaaagtccaaataacaataaaattggaattcaacatgtagacaaaatattactaaatttcactttttcttttattgattttataaagtagcatcgttacttattttgagtctagaagaatctatattatattttggtgaactataggccttgagtgagagcaattgcttgcttgatctatatttatatatgtagtataatctaaagacacatcaaaaatattttgagtttctttcaaaaggaaaaagagaaaatcaggtgttgcatgatcaaaaaaacagacaagaatattgggttttgcatgagaacaattattaattgtttttgaaaggagaagaaataaatttcatgtcattaccaaaaaaaaattaaaattaaaattcatgatagaaaataattcattttcctaatttctgttttctactggtaagtataagaaaatgtcattcccatataaaagcctcaacgtgggtatgtaatgtatggaggggtgcatcttatttacatttttcagcaacaaaatgtttctatttccattatgtataaaataaattaaattcatttttaattttttcaaaaaatggaaaccatgacacattccttccagaaataaaaccctaaaaggtcattgcaaggaacaaatccctttcgaataaatccttgccgtcacttattacatccaacggtcgcgattgctacacagctcgtgcttatcactcactccctttttttttctcacttgtactgtctccttccttctttctctttcttctttagctctttctctgtgtaaacatggctgagcctatcaccgatcaccaaagttctgagctttcatcttgatctcaatcctgtttactagattataacctttacaagtacagaatattaatatctaacataatcaaaccgaaaaaaaactgttttttttttcccttaaattttccttggttgggtgaaatttctgagctacgagcttgtagcttttcatttttatcagagaaacccactattgtttaagctgtaggataaagctatttcttggtttgagcaaatttcagctcaaagtttcaatctttacgttctttttttgaggcactctgttatgtgatatggtcaccgatacttattcaaagatgatgtctgagatttcaatgcgatcgatgctcaaaagttctgattatggcgaagatttggggatgttgattcgggagcagaggcggcaacaagaagcgagcgagcgagagaaggagctcaatatctaccgcagtgggtcagcgccgcccaccgtcgagggctcgttgaacgccgtcggtggtttgtttgacgcagccaacgcagcttctgcactttccgggttcaagaaaaatagcggcaaagggttcgtgagcgaagaggagcttcgctccgatcctaactatgttaactactattactcaaacgttaatctcaacccgcggcttcctccgccgatgctttccaaggaggactggcgtttttcgcaacgagttcaggggggcggcgccgttggcggttctgcggtcggaggcattggggatacgaggaaagttggagtgggtggcggcgagggtgggagcccgaataggtcattgttttcggttcagcctgggattggtggggaggagaatgaggttgagtcgaggaaaggtgccgcggagtggggcggtgatgggttgattgggctcactggattgggccttggaagtcggcagaaaagtatctctgagatcattcaggtgagctttcagtgaggattcttggaactacttaagcatttcattttatatatatattttcaaatcttatttgcttggactttcctgccattaattttatgtggttcgtatttaaattataatgtctcgcataagcaaagtaattactatagtcgtttgttgttttgtactcgactagagtatctggtgagatcaaatgattcgctaacgtttctctaaaatagtttctctttgttgtgagaggaagcgaggctcaactatctgttatatgtgacttcattggtggttaatttttttaactttcattataagtttcggttatttttaatgaactccataacagtgaaatactgaaatatgtattttcggtttgtatgaatataggttattcttgagttgtactggtgttctcattttgatggggtggagttcatgagtcgtgtattcttttggtaatttgtgttagatttcattagtttgagacagttactccagtataatggtttaattttattaaattgttttttttttagcttcttgatttccaatttttaagatttgcgagatacgcatccaaatgatgcactgacttttttgagtaatttgttggttttaggttttgggcttcaacatgtttaggattttgagatatgaattcagtggtgctgttaacatggctgtcatgttatagtttttttaacatttgatttcaaatcaatgatgaaatcttttgttcaatacatttttttcctgtaagacctgaataatgcattttcaaattatatgacctatctttctcccaatatcttattaattgcatctgtattctttatgttttatatttgttttcaatgcaggatgatattaatcattcaaaatcggtctcgcggcaaccttctcgtcctgctagtcgtaatgcatttgaggatagtgttgaaacttcggaaacccagtttgctcacatgcatcacgagttagggtctagggatgcaatgcgttctggtggtaacatgcagggtatgtctactgtgcaaaacattggtccatctgcttctcatacctatgcatctgctttaggtgctaccttgtcaagaagcacgacccctgaccctcaacttgtagctcgggctcctagtcctcgcataccaactgctggaggagggagggctaccccaatagatagaagaagtgtcaatggtcaaaactcattcaatggtgtctcatcaaatcttggcgagtctgatgatctagtagctgctttatctggtatgaatctgtcaagtggtatgatggatgaagagaagcatgcacgatcacaaattcaacatgagattgataatcgacatcttttcaatttgcaaaatgatcagaatactagtcagcagccttatttaaataagtctgattctgggcatcttcattcgcattcattttcacagtcgactaaaggctcttatcagaatatgaataaaagtagtgcggggatggatttgagcaattcttcattgatgcccgatgaccaagaatttaataaaactgctgtttcttctgctaattcatttttcagaggaccttctaccccaaatcatggcagaggaagctcttcctctcattatcacaatgtagacaattctaattccacttatccaaactatggcttaagtgggtatgctgttagtcctacatctccatcaatgattgggagtccaatgggaagtggtaatttaccacccttgtttgaaaatgcagctgctgcatctgcaatgggtggccttgattctggggcatttggaggaggtttggctctaggaccaagtatgatggctgtagcagctgagctgcagaatgctggtagattgggaaatcacaatgcaggtggcatgcaagttccaatgatggacccgctgtatcttcagtatttgaggtctaatgaatatgctgctgcacaagcttcttctcttagtgaagccactatggatagggaagggatgggtaatgcgtatatggatttatatggcctccagaaagcttaccttgatgcactgcttcctcaaaaatcccagtttggtgttccgtacatgggtaagtccagcagcttgaatcagggttactatggaaatcccggatatggtcttggcatgtcctatcctggaagcccattggctggtactcttatgccaaactcccctgttggatctggtagtcctgtcaggcatagtgagcggaatttgcgcttttcctctgggatgaggaacatggcaggtggtctcatgggaggttggcacgtggaagctggtgctaacttggatgaaaattttccatcctctttactggatgaatttaaaagcaacaaaactaaatgttttgaactttcagagattgcaggccatgttgtggagttcaggtaggctctattctcttttatctcaaccctgtgcacttcattgatttgacctggctttcagtaatttaaatatctcgtctctttaaaacagtgcggatcagtatgggagtcgattcattcaacagaaacttgagactgccacaacagacgaaaagaacatggtttttgaagaaattatgccacaagccttatctctaatgacagatgtgtttggtaattatgtgattcagaaggtaattactagatttatttgcattttatatgtccaaattgcagtgtaatattcagttattaatgttttgacttccctttatgtggctaacattaactgttgacttagttttttgagcacggaactgcatcacaaattagagaattggccgatcagctcaccgggcatgttctgactctaagccttcaaatgtatggctgtagagtgatccagaaggtatgtttgatgagatgggatatattaaaaggatcattcatattttgctagctgagatttctgacatgatttgtagtggggtcctatttttccatatcaactcccacctggtgatattgagttttttttcctgtctaaattcatctattagaagagcaatgatgttcctcgtatatgtacattccagaaagtggaaatatcatttgtttaggatatatgtaattctagtctttgtaactaagaaaatatgcgataatgttatgcttggagaaatgggttacaccttaatttacatggaaatttggcatcttatcttagtatatgtagctatataaagaattgtatggtttttaagttgaattgttcctgcccgtttctggtggatggtggttgttgaggtaaaagctgtttataaaatatctaatgttgcattaaaattgtgttttgctatatatgttcaggctatagaagttgttgatctggatcagcagacaaaaatggtgtcagaactggatggtcagatcatgcgttgtgtacgtgatcaaaatgggaaccatgtcattcagaagtgtattgaatgtgtacctgaagatgctatacagtttattgtttcaactttttacgatcaagttgtgacactgtcaactcatccatatggttgtcgagttattcaggttaagaacattctctttaattaatttcaaccacacacaaaagtgtatatttatttgtagattctgtatgaatgcatagcagatactttatatggtttttttttgcatgttaaagttgcaaattaataatgattatcgttttgatctaacagagagtcttggaacactgcaatgacgccaaaacacagcggttaatgatggatgagattttacggtctgtttgcatgttggcgcaagaccaatatgggaattatgttgtacaggtttgtttttttttttttcatcgttttattggatgtcttagctctgaaatgtattgcagctgaccctgtttggatatgtgttctttttcttttgggttcatataaccgcacatttcgtagtattaaatatctgctcactagttttgcaaaaatgactagttaatggaacgtggctttatgatttttctcattaataatggctttgctcactagctttttgattgatacatttccatttgcagcatgtcttagagcatggaaagccacatgaacgtacatccataattaaaaaattaactggacaaattgttcaaatgagccaacagaagtttgcttcaaatgtcatagagaagtgtttaacatttggaacacctgttgagcgccaggctcttgtggatgaaatgctgggttccactgatgaaaatgagccccttcaggtttgacaatttttatgttcacaccatctttaatccaaagaatgtgttaattcttatctgggcaaattttgcttttccaaaaataacatgaaaagaaataatgtaaaatgtacaaggcttccttgctttctattagtagcactggttccgtggaatattacatttctcatttttgagtgattgaggatgaaattgaatgattttattctatgttgcacctcctctctcatcttaccctttttttgtaacatttatattgttctacaaggcctttgttttgccatggtttcgagcattcaatttgcgattgttttgagtaatatatttaatttcactgtggccaatcttgttgttgtcttttaacccattcttattttggattttgtttcttgtgactttgttttaggtgatgatgaaggatcagtttgcaaactatgttgtacagaaagtgttggaaacttgtgatgatcaacaactcgaactaatccttaatcgtataaaagttcatctgaatgctctcaaaaagtatacttacgggaagcatatagttgcacgtgtagagaaacttgttgctgctggaggtactttcaccaccctcttgttctttatcatactctttgtttgcatatttcattcacttcaaaaaaataataataagttattattccctttgtccaagttttggttcaaattctttctctccatctttagtctgcagattccttagattttaggcatttgattgatcatggtactttctaaataactgacatggtgatctctaaatcttttgcagagaggaggattagcattctggctccacatgctgctgcagcagctgcagctgccgctgctgccgccgccgctgctgctgctcag

SEQ ID NO: 26010 - DNA, 2577 bp, Cannabis sativa
  modified_base (1247)..(1252): a, c, t, g, unknown or other
ccaagttccatttggttttgggacgagaataggattagatatccacgagggataaaaggcctcgcctataaagttgttaactaacaacttatccgcttcctgcttgagtgtcctttgtctctcagaatccaagggtcgtctcttctgtctcttggctgggtaatttgggtcgacattcaagtggtggcaaattatcttagggtcgatccctatcatatctccgtggctccaagaaaactgatcctggttcgccctcaaaaaacttattagttactatttcaattgttcatccaggttcttcctaatgaacacacactttgaaggatttcctgggtctagaacaacttcttccaattcctcaaagagtttcaataaattcctttcatcttgaatctgaggatcaagatccttatcctgcttctcgccttcctcagtcatgactaccattagctggtgaccgacctttctattctgcagctctatgtggtatcatttgtgagccagcatttggtcacctcgcagcactcccacactagtcggtgtttaaaactttagggataagtgcttaatcgaactaattttccctattccaattaaggctggtcgacccagtaatatgttgtaggctgatgtcaagttgacaacaagaaagtcttgcatgatagtggtggataaaggtgcttcacccacggttaatagaagcttgattattccttcaccggcgacactatcgcctgtaaatctgcatagatttaccatgcaaggttttaatttggctttttcaagtcccattttcttcagtgtgtccttataaaggatgttcaccaaacttccgttgtccaccatcaccctttttatcctcttattggcaagctggatggtaattaccagtgggtcaacgtgaggatatctcacgtgtttttcatattaatccgagaatacaattagaggtttggttgagtttccttgacttgaggtgatttaatttagaaaatttccccatgaagcgtgtgagtcagagcaaagcacgttggaaacacttggattggtccgtgggggccaatcgtcagtcaggaaagcagctagagtgatgcactcgtgtatgagagccatcattccatgggaataagggcccaatggaggcttgaagcggggatgttaccgaggtaacgtataaaagaacgtcaaggagaatagtggtatcactaaggtaaagaagattacctaaattacttaaggtgacacgnnnnnnatggagagtactttataattgactggatattcgatgtggtttataaggagagcattgaaattctaggaaaggattactttattaagcaattatggaaaggcatactcacccagaatggggaaaagcttctgaattgagatgcaatttaatggacatgtatttaagtgattggtgaatgtttgatcacaaagtaggttgtttattaaacaacaagttatataattgagtgtaaaataacttttagagtggttaaccaagtatgaagatagtgatgattgcaagaaagtaatggtagcgtatgaactagggagtgaaactgtggtaatgatggaaaaagaatacgatagtctcagatgttgatgaaacaccatcatcaatgagagactcactataaattggtttggtagttcgtaccaagggattgtcaaaaaaaaaaaaacttaagatatgtatatttttggatgtgtttgaaaagattatcaagatttcaatcaaacacataaaagaaactttaggatcaaggaatgatctttgattaattgttattagttgagaatttgaaaatgggtatttctagtttagttatgggtatctggtatgggaaatgttgcctctaccatatatgttacatcaattcactttataacattagttaactatatgtggttgggaaatttaaaagttgtgtcagttgaagagaaattgatgcaagttaaaatgagtagaactgaacaagattcaagtttacaataagatgggaattcctcaagtttaagtgaacaaaaccgatgaggaattgcaagaggttaatgaggggagtcatggaaattgaattttattaatgaaagaatgaaaacaagaaatacaattgggaatgacaaaaaaacatctactttctgataacccaccatgagcttactttagagttaagcatacttaacttggggtaatctcaagatggaaaatctttcggggagtcatctcgggaagcgtatgagtgaggataaagtacgctagaaagattcataataggatgcagaatcggtagtccttccagagattatcaagaggaagtgatgtgttaataagttgaaatttacaaggtattgagacaagtatatattagtgggtggaaataagaaatgctctaattgaatatctatcagaaatgaatagttaacttgttactaaattaagttagtagaccagcttaatagatctcatagaaggaatagaaagacataattacgaattatgtactatgcgatcttatgattttgactgaatagtaacggttggatatatagagttaatatgttgtctat

SEQ ID NO: 26011 - DNA, 3610 bp, Cannabis sativa
  modified_base (3550)..(3584): a, c, t, g, unknown or other
taaaatatttccaacagtatcatccaacatgtaaccttcttttgggatgctaatgctgggttcctctaagaactgtattggcaccagatttgctttgtcgacaatggagctacttgccagacgggcaagtgcatttgatgtagcgttttgctctctaaggatctgtctaattgtgtagcctttgagatgacttagtctgtctttgatttttctaaagtaggcgacaattttttcacctcaagctatgtattcacctaggacatgattcacaactagttgagaatcgctgaatatgtccaggtggtcagcccgtacttcatgtgccagcttgaggtcagctatcaaggctttatattcagcatcattatttgagtctttgaagctgaatttgattagtctgtgcaattgcttcccccatgtgttataagggcaatgtctacatcagacaattagttagtacaacttccttcaacatggagtttccatgttagatcttcaagatttttctactgctcttactctcgcttattctctagctcttgcttttctcccgagtcttgagagatcttaagagttgcgttggtgcactcagctacgaggtctgcaaggtcttgacccttgatggctgttcttggttggtacgtgatctcgaactggccaagctcaatggcccatttgagtagtcaacctgatgctttatgtttctacaaaacctaccataatggttgatcggtgtgcacctttatgaggtgtgcttagaagtagggtctcatctttttggaagccaagaggagattgtaagcaaccttctccatgagtggataccaactttcagcatcgtcaagccttttattcatgtagtatacaaggtgttgtacactgtcttcttctcttttgaggacaacactcacaacatgttctatgactgctaggtacatgcctagctcttcattgtctaggggtttagacagtataggtggttgagccaattgattatttagctctgtccactcaaattttttgttgcctctgagaatgttgaagaaatgtacacatttgtctatagacttggacaccaatctgcttaatgcactaatgcatcctgttaggctttgcatttccttgatagttatgggcgacttcatgtccaaaagggcttggatcttgtttgggtttgcttctactcccctagcattgactatgaagccaaggaattttcccaagcctacactgaaagagcatttgagggggttaagcttcatgttgtagctgcaaaggatttttaagcattcgttcaggtcacatgcccccaacctttttggacttcacaatcatgctgtccacaaacacctccatgtaacggctgatgagatccttaaacatcatgttcaccagcctttgatatgtggcccctgcatttttcagcctgaagggcatgacattgtagcaatataagcctaggtccatcatgaagctagtgtgctcctgatttgggagatgcttctttatttgattgtaccttgaatatgcatccatgaaactgaggacttcatggccagctattgcatctactagtttgtcaattctaggaagcagaaagtagtcatttggacatgctttgttcaggttggtgaagtcgatgcatactctacactttttgttgggtttgggcaccagtattgggttggatacccattgtggatagaaggcctatattaagaagtcatgggctcgcagcctctcaacctcatatttgagtacttgtgcgcactccttatctagtaattgccttttttgttgaacaagccagatgcttgagtgcatgggtcatcacagtggggtaaatcccgaccatgttcccatgtaaccatgcaaaaaggtctaggttcactcttttaaatattattagtattgatttaatttttgacgctaaacctttaccaatcttcactcttcttgttaggaaactgggatcaaactccacttcttccaactcttctacatgcccaaagcttcttgcaggatccccaaatcgaggatctatatctgtgtccccactttaggctggacttcattgcccttactgggctcatcttatgggcctttgattggaatgttctcctttttggccttagatagggccaggttgtaataatgaggagcaaactgttggtctcccctcacacatgccaccccgtgccttgttggaaatttgaggcataagtggtagatggatgtgaccgccttttggtcattgaggcctggttggcctatcatggcattgaaagccaatggaacgtcgatcaagacaaactgtgccattagagttctagtggttggattttctccaactctgaggggtaatgtaatatattcgacaagtgcgatgccttggccaaagaagccatacatcacttgattggagggtgccaggttggtgagctggagccccatctttttcatatattgactagaaaagaatcttggaggaggctccaaagtccaccatccatcttgctacggtcatgtttccgatttatacagttatgacggtcattgtacggaaagctgacctgaacagcgtcttcttcggtgaaggagatcgtggtctctatatgcttttgttgcttagagctcttgtcttcaatgactaggatatcgcttttaggctcatgatggagtgtccgagcatagggctccctagctttacttgtctctcctgcaatatggggcccaccgatgatgacccctaaatgccctgccagtagtggtgccattggatctccgccttgggcaccttgtgcgtgagattgctcgttttacacacaacaatgaaggtggggattattacgccttataaggtattcaatctccctcttcaaattttgacattcattggtgtcatggccaaagtcattgtagtatcggcacaactttgacatgtccctcttctccatctcctttttgataggaaaggaatttttgtatgggactgttccctaagtggccataaagatggcattaggcttctctgtcaggagggtgaagtaggtgtacttctcctccttactcttctgtggcgtgggagaagtgttaaacattccctttttgctagtgttcctcccggagttattggtgttgcgcttatttctagtatttttaccactacaagtctaggcagagttgttggtgtctgatgttgccccttgtatgccttgagactgtatgatgtctcccagctgcctgttgttgacatgccccgtctgggcatgtcatatggcttcttcaagtttgataaagccatcatctctatcaaggaagtccttcatgtttttggtagacatctcccatatatctttcgagaagtcactcaatgagaatatgcccctcagtatggacgtatattggccttcttctgtaaggcctttactttggtagccttggccatgaacctctggatgtaatccttcaatggttctccttatcgcttgttgacttcgactaggtgttctagcttcgatggtataagtttttgttggaattattttannnnnnnnnnnnnnnnnnnnnnnnnnnnnnnnnnnaacaccctaaatatgaatttctaaaa

SEQ ID NO: 26012 - DNA, 2552 bp, Cannabis sativa
tctcaattacttgagagaatatctcaacaaccttgaaatatctttaacaactttttaaattagatatttaccttattgagctaattaaataattaattaaccctaaaagataaatccaatagggacaggaacaagtttggtgcctaccactaattttaggacaaggttggtgtcttttgtcctgacaaatcttgtctcgacaaattttgtcttaacaatttttatctttttccctatttaattaatttgaaaaaattatttatttattacaaaaataaaattactatttttcctattcaaaatagattttcttcaaatatctttatacaactctttattccttcccttgaaagtgtttcaaggtggaaattcggggatcatagacctataattctaaggtccaataaactagattatttattgagtctcatcaaccaaataatcccttgtttattaattccatgattactcaactataaatatgttgcactcttagtaattatagaactatatttactgagtttaactggagtgtccaatccattgatataatcaattctagtgatcagtcctccatgtgctggttcgtaattacttttggtcaaaataccgttttatctttctaattacttccttatctttagttctattaattcactagtggaagtctaattcaagatcccatctaaatttgtgcacaacattctagttccagaattaacatttaaagggaaccaacattcgaccagttaggaaagttaggattccataattgtacctcatgttcccagccatccatgttattagattcctgaaacagaagttgtgagaatcatcttccctaagaacatttaacgagtgaatcaaagaaactaacaacatgaacaagagttcatgataactcaagatttagactgatctattattgatcatttttatgatatgaattaggtctttataataaacgacatgttaataaagataactttattcatattggtccttgtcatatgtaatctctattatatacagtatcttcactttaatgtctcactacattcgtaatccgaaccaagattacttgcaccgaagaacggacatcagtaaaccgtactagcaaccataaactaaagattccgtaactttaatatgttgatgactgttttattcatagctaagtggtcttagttctctaaacatctacaagccacaacctcatatatgaataaagaattttttgatatttaatataaattattcaattaaatattaataatttaacagtcacacatatatcaaatatttaactctttatttaataaaaaaaaaatgtctttataggcttttcagggcataaaccctaacaatctcccactttccctaaaagtaaattgggcatctcctttagtccatattagcaatatgatcccataaaagattttgctggtagcatctttatgaatggatctgccaggttatgttccgaaatgatctttaagaccatgacatcacctctctccactatattccttagtagatggtactttctctcaaaattcttgcctctcttctggctccttggttctttggagttagccaccgctccactgttgtcacagtagagcactagtggttttttacttccagaactacttccagagccgtgtagaatttcttcaatcaaaccgcttccttagctacttcacaagctgctatatattcaggttccatggttgaatctgcaatactagtttgcttaatgcttcttcagactacaactcctccactaagagtgaaaactgactcagatgtcaacttttgactatatttgtctgattgaaaatcagaatcaatatatccagtatattttaactctcttccaaaaaatacaagcatgatatctctcgttcttggaagatacttgagaatgtaatttacagcaatccagtgttccaaacctgggtttgattgataacgactaacagtctctacaacgtagcatatgttaggccttgtacacaatattgtatatattaagctcccaactgttgatgcataagggtactttctcatgtcctcttcctcttgaggagtttttggacattgatccttgcatagagtaattccatgtctaggtggtagttgtcctttcttggaattctccattgagaatctttctcacaccttatctatataagttgtttgagaaagtgctaatgttctcctctttctgtctctatagatttttatcctaagaacatagcttgcttctcgcaaattcttcatttgaaatttatcggctaaccacttctttacatctgataacctttttacattattctcaataagtagactgtcatcaacataaagaataggaataccactacattatacaaagatctagatttactaacatgttcaataacatcctaaatatgaatatctctaaaacaatgatattaaacacgtaagggtttaagaaaatcttacattgattgcagcgggatataatgactccttctgctcagatctctaacccttgttcctttatg

SEQ ID NO: 26013 - DNA, 2534 bp, Cannabis sativa
  modified_base (2458)..(2496): a, c, t, g, unknown or other
attgggccctaaaagcccaacaaaatgctaattaatatctagaatcaagggaacttttgtatttgataaatatctaagaaactatgcaagcattaagggattgacctgtaaacctagggttttaggactcctatataaaggccttaaccttagcctagaaacctaagttgcctctaagcttgaaacctgcttctaaactctaagtgtctaatacctaacttcctctctctcacgcgcctaccctagaaacatctcaacagttgagttttttcattcttgattcataacttgtaatcctatgagtgctatagcagatcctacccatagtgatgtggatagtatttccctcggtataaatataacaaaaaggggagtaggtcattacccgctgtcacaagatggtcgaacatctacaataaatcttgttgtttattgcttttcattcttgtttgtgcaaacacgtgccaagcatcaaatctaaatgaccctactgtcggttgctcactttttgaggtcaacatggatgtttcgagtactacttgtgagatggggtccaccaaagatcgttgcaatgtggctgtccataggcagcacagcgagtccaagaggatacagggttcccaaacccaaggcaaataattccaccccatctggggttgacagagtagggaggcttatgaatgatgttcttagagattgaaggtgtcatacctctgtagagaatttatggcgctctactttcctgaaactatcatgtgcccatgcgtaaaccctatttgggatagatgataagaatacggactcacactcccaaatgtcgtgcttggactagcattttaacgtcatccttcaaataatcacactcgctggttgtgttacccttctctccgtgatactttctctctttactttggtcatgcctattccttcttacatgcaacatgcgtagaggctttctataatggaccatattgtaggtcatttaatagacattttcccgagtatctatgaagctttcatactcaatatattttgaatcatttcccttcctcgacctttttgaagaattattgcagttgtggttcataccccttctttttctccgagagtgtcttgggttagaatctaggacatcacttgctcttaccttggagccacactgcatcctatctatgccgccttatacttggaaaatttggtctatgtaggggcaagactagacgtagtaggtccatagacggtcggggaaaattgagatccgagaatagacagggcaggagatagaacttggggagagaagttaggaacagtcacagaaggagttggagtaggtgggactctgaaagcctatatataggcatcctccaagttgatgatggcatgtgcttttgccataaattcgcttaaagtctctgccctctttctctgcatttgtccccatagtagagaaccaacaaccaatccggattggagggccatcaactttatatcatcactgactttggtttcggtgatcgtctgcatcattctttaaataaaggcctttaggctttcattatatttcttttttaacgttggtgaggaaaccaacctctatgtccttgtctcacacaataatgaactgcttatagagggctgagtgcaggtttttccaactgtcaattaatcttggggctaaccgcttccaccaatcctctacaaacttagtcaaggtcaagaaaaagcatagacatttggcatcatcacttacccgagcaacctgcatcatcttgttttatttgaccaaacacgcttgtggatcagttctcccttcgtacaacttgatatggagcacctaaaagtcatcttgttatattttgccaaacatgctcgtggagtttttgcaatccttcttacccaaggtttcagatcctcatcttttgaatctaatagtcctccactttttttcttgacaactcagtcaaagtagcagctgtctcttccatccgtttggtgtcgttgttaggcagatcacgtcccctcatcttatcactcaaatggttcctaagatcacccccacgtggcatttctttctcacttttgtacttttgtacttggcatctaatccccatcagaggtctgcagtggactagctatcctcgaaatgccccactgctgtccttccatcttggttaaccgaatcgctggggtggtttctttgttttttaggtgtgggtaccttcgcaccttgtccttgcgacacggtttttcctctagggttagaagggtgcccatgttcgaaagcatcagtggccttttacatctggagggctagccaaccgtatttgaatcccttaaaggatgtctaggtgcgggcttttgtgtgggctcgcccaccctacccatgcccttatccgtacgaggatatgaggtctcaccctctgtttatttttgtgcatgtgttgggttttatgccctnnnnnnnnnnnnnnnnnnnnnnnnnnnnnnnnnnnnnnnataaagatcataaataacattttaagatcggaagagcg

SEQ ID NO: 26014 - DNA, 5092 bp, Cannabis sativa
tttgtgaaattaaccctaatttaaatcctaaaccatagttgaaatactataaatggaataagatggctctcattctcatccaactcaaaaataaattctttgttagaccattagaaaattgagagcctccttcctttgtattttgatttccttcttcttcttgatcaaatttgaagcctttagtgatagagtatcatccgcactcatatcaagtcaagtactcaatcatagtgtagaagattgtgaagaatctaaccaaactgaaaaagagaagatccgagtccgatcttgataatgctttgctatagaaaggatcaaggcctagaaatatgaatggaatgagtcattattattcagctgtcattaatgtaaatttttttaaactttatatgtgtttatttcatcgtattaggaaattcatatttaaggtgttagattatagttaataatcaaacatacatgctagtaaatccagatccttgtaaaacaactgccaacaataacaagttatgagttgatatgtgtagatcatgctatttttaaatgagaagcatgaggtcctgaagcgataagaggatgagttaatagaaactcttaatgagatctatactctatgtggagtgcaataccgatttacaggagtactcttgatagactcacatatgtgaatgtaaaattagagccgcttcctatggaattgggacaaaatttctagagcgttcattatactggaatagacatgcatgaccattaatgcacgagcttttttaaatacatccttgaaagattggtgtgtagtacgatgttagatagaattcaagatttcgagtcactctagtaaaatctaaattgtaatttactatgcaaatattcaaattgaaatatatctttattcaagcactatcttatagttttttgatattactcgagaattttttttttaaaatttcgaggggattgttgtaagttagttaaaattttatataaaaaaaaatgagagtggagtgtgtgatagtgctttgagtcctacatgggataggaacacttctttggaagtatatataagtcgtatcaaaacaacggaagaacatatctcttcaacacagaaaaaatttattctcttcaaaacttctatcgaatttcttagagcaatttgttggggtgtaatagagcgatatcgttcggttgagaatgattcgtccagagactatattatcttggggatgttgcggtttctagattgtcgtgcacacttaaggcagagtcgcaaaacgtcttaaagaaagcgacatagttcgcaactcacccagaattttcattcggtaattcgttccagttttattttttaattcggaataacaagactaaattatttacagtccaatagttattaatcgaaagaagaccaagatgatctatctactaagtactacctactgcagaagttcatggcttttttttttttttttaaaataagcattcattcatgattcgtgtcttgaccaaatcttctccgatgagtatgcgatgattctaaggacgccgtacgtagatcttctttattttttttttaccaactgtaatatttctttgttacaaagatcaatgaaagaagcatggccaaatattaggtcttttacttttgcttttttttttctttcacagtagaggagaattggttaaagacttaaagcaaagcaacccatcatgtatatcgtatgttttttcaaatgagacatacccagatgctgttgttcaacttcgatacagtcactttaaacttagattaccccttttaactcaaggttttttttttttttttttttttttatgattctttaaaaaagagatactgttcattatcctaggcacctagctaggagctattttgtacacggatgttttctttttttctttagttttgtttacgtataaagttttccctttagtcttaacatctgtacactaatatattcttcgattcacacccaccaccaatatggccgacttgccctttttatttatttttttaaaaaataggagtatccatattattacttaagaaattaacttcaaagttcaaacaaattgtaattacctcgtatctcttattaataagattaagactacatacatcattttacttataagtatttttttcgtactatatatattttttgcttaagtcttactatatatattatgaacctatataaacttttttattttttattctcagaattttttttaatttatatatttttaccaaggtttcggtactatatgtggtataatttaactgtggagatcaaaatttgtgttgctagtcaacttttaattctgtctcgacccaaaatagaaaaatgacaaacccattttacatgagacgtatggttataaaatatatttatagcaaatacttaacgttgtttcttaattaaataaagagaagtttataagaatatatattttttatttaatttataataataattttactgttattattgacgtactacgtcagttaaatttaatgcatatgacgttttttaacgtttttcaatttttttttttttagtatttttatgtaacattttagttactaatagtactattaagaaactaattagttatatttttataaaaaattttatttttatatcatataatttgagatacattttggttatctctaaaacttatttgtatacattttaataattaattagtaatttttaagttatactatgataaattataatttaaaatacatttaagtaaccttaaaaaatatttatattaagtagaggataaggcagaatcgtattctatccattgaaacaaatgagggggaaagctgaacagactcaaatgttgctacatagtttttccaaagaggaggtgaagaaagctgcatttagtattgctgggaataaatccccaggtcctgatggattctccagcagtttcttccatgacaactgggagagcattggtgatgacatatgtgatgctgtggtggattttctagaatcaagtaaaatacttaaagaaataaattctacgattattactctggttccaaagattaaatgtcctaacactgtaaaagattttagacctatagcttgttgtaatgttatttataaaattgcaactaagctattgagttctagaatcaagaatatccttcctgaaataatttctccttctcaaggatgatttattaagggcaggtatatagggcataacatcatgatttgtcaggacttggtgagacattataacaggaaagctaacaagccaagttgtttgatcaagcttgatctgcagaaggcctatgacaccattgagtgggaatttttagaagaaatattggatggattgaattttccgaggaagttcattcagctagtaatgaattgcatcacaactcctaaattctctcttatgttcaatggatccttacatagattctttgaagctaggagaggacttagtcaaggagaccccatgtcacccctgttgtttgtcttgggaatggagtatctatctagacttatgaagaagataggtgagaaggaggattttagattccatgagagatgcttgggactcatcaaattgaaccatttggcatttgcagatgatgttttgctattttgctatggagataacaaaagtgtttcttacttgctacaggcaatcaaactattttcactcacttctggattgcatcctaatgcaaataaaattgctatgtattgtagtaatatgcaggaagatagtgtgaaaaggctgatccaaatctctggattctcgagacaggaattccctttcacttacttggggattcctatttgtgcgaagaaattttttggcaaagaatgtgagctgttagctgagagaatgacagctaggattaagagttggaggtctcgaaacctctcttttgcaggtagaatcactttgatcaattcggttttaattgccattcaagcatattggagccagattttggtactaccaaagaaagtaattaaatccatagaagccatttgtagagcttttttgtggaaaggccaagctatgtttcatgggggtggggctgttgcttgggaaagtgtatgtcagcccaaaagtgcaagtggtttgggaataaaaaagattgaggaatggaacaaggctgctatatgcaagtacatttgggccattgcgaataaacaagatagtctttggctaagatggattcaaagtgtctacatcaaaaactaggaatggtggagttacaatgcttccatacatgctagttggtattggaagaaggttgtagctataaaaaccaactgaaaaccttgtgtaatgtgactgattttcagagggacaaatacactattgcaacaggttattgcttgttctctcctactccaaccaagctgaattggtgcaaggaagtatggggtagattgaatactccgaaacactgcataatcctttggttagcaatgctaaataggttgaaaaccagggatcgtttgctgaaaatcggattgcaaatagaaggcagctgttatctttgtgaaacacagcaagaaactggccagcatcttttctttgaatgtttttttttcttgtagcaggttggtggaaatcaaacaatggctgggctggaatgctacttctaacagcctccgtagactactgagatggatacaaagggccaagctctccaagtttcgaaagctagtataccaagctgcaattgcagcccttgtttacacattgtggaagctgaggaatgcaaagatttggcagagttcttctccgaacagtaacaaccttagtgaggaaataaaatggagtgtaaaaatgagatgtaatatgtttttaccaaaaaagatgcaagataaggatagagattggtttagtgctttgtaatgtgtacatacaaagaagatttgattgtgtatagattgaaaatagattgggcccgatggggtgctattagtttgtaaatattgattggtgcaatacaacttcttgatttatcaaaaaaaaaaattatttttaaaactgttaattccatttttgg

SEQ ID NO: 26015 - DNA, 3359 bp, Cannabis sativa
cattgtaaaaactgaaacaacaatttgttgtaaatgagttatttagaagcacacaagttaatgcagaaaatgtatctgtgcagatattggcggcacatcgataaggcatcaaaagagttatcctaccgaagagaaaatctgaaagacttggttgaagtaccaccagcagtgctagccaggtaattgttttcattataccaattaaaatctctgaaaaaaaatgtaatggaacctttgtcattttattttttacttttattttatttttttttaacacatatagatagataatttgttctctttgacacattcataggctatgggggttaaggttacagtgataagtacctctcctgataagaaggaagaagctattgataatcttggtgctgactcatttttggtcaatcgtgaccaaaatcaaatgtaggtactaattcatttagttattaaaaggttttttaaatttcaattaatgggttatgcatgttttttaattaaaaattattatgaagggtgccatgagtacaatggatggaattatcgacacaatctctgcagtgtacccatttatgcctttgattggtctataaaagtctcaagaaaagttgattatagttggagcaccaaacaagcctaccaatttttccattattgttgggtatgtgtatttctcacctttgctctatataggcaaatttaatataccataaaagatgacatactatgtgaattaattgtgtgaattatagtgcaaatttaatataccataattcttttttcaatttgtatttgcattaatattatagtgcaagtttttttgagatttatattcaagagagactattttgaatgtttatttgttacaataacattaattttagaaattatgaaatgtacgtatattttaagttttataatgatagagtattgacattgttttccagtcttttcttaatttttaaagatttagagtatattttctttaaatttttagaattcgaaacaatatttttttttaaaaaaattcaaaatgtgattgtttttaacttattttataaacattttgcatctaatttactattcttaaaactttatgtattttcaattaactatttcaaattaagcatataactaagtatacgtgtattgtacgtaacttttgcctagtatatatataagtgtctacgatatgaaagaatggtgtatatttataagttttattggctacttaatgctttaagcttaacttttaacggtaaaattctttaaaatattaaattatcagcaaatttaaagtgacatatttttttacagttaaaggctaatgaacggcttatgtattactcttgtacatatgacaagtttatattagtacatctaatattattttttaaaaattattttaaaatttataacattttttattttttaaatatttaattttaaaattataatattaagtgtataaatataaatttatcatgtgtacaagagtgtacacataaacagtccatgatgaccgttaactggatcatgacaccttaaatttattaacatttcagtaatttggaagatttttaccgtcaaaatatgagcatgaaaaattaagtacaagagaaatcacagttggtagggtttagctgcaaaaacaaaaaatgaatcttctatatatataagttttcaaaaaaaaaaaataataataaatcccattacttttcaatttcaaatataatatttggatggtgttttgcattattaaaaaaaaaaaaaaaaaaaaaactctggcttcattttaaatatgtagtttcaataattgattatttttttaaaatcaataatttaattttcttaaagaatgtacgttatgacttagtaactaacaatgaacaaaaaaaaatattcggaaaatagagtaataatctcatcatatactaataatcaatcgttttagcatcaaagaatttagcttttaagaatctaatttttgatgttaaaagtcaattatcttttttctttaatatttgcatatctcatattcgtagagatgcaaatcaagccgctcatggcttggctaagcaagctttaacgttggataataattgtgagagtgttgctccttccattatctctgttattgtaaaagactctttaaatttataatatcagatcttttctcataaaaaagttgccaccactctcatgaatattctctagcatatattatggtatagggtttcatctatttcctaattatacactctatataacaaaaatttattggaaaaatcaaaagtatactcatccaaaacaccatttggtacattttttattgttaatatttaggagagttttgtttttttttttttccataattacgtagtaaatttttgaaaaattaaaaatataatttatagtattaaaataaaattttaaaattacttactacaggtataaaaaaaaatgtgtaaaataaaatatttaaactttattttaaacactataaaatacttaaaattttataaaactttacatttaaataactataatatacaccataaaaaaatgttaaaaattccaaaataatagaatctgttataaaaccaccatttaaggagaaatgtattataaaattcctaaactaagtaatgaaaaaaaaaattgtaattgtggttaatttattaattgagccacatcgaaacttccattatgcctactgatatttatatataacgtatgctccaaagactatacaaaaggacataaaatagactttgcttttataatctatatataataatctactataataatagtctattaggccaattaattaggtatacgtaccctatcatatagatagtatagttccatttcattgactcattatattaatctagtccttaagaaattagtaatttaaataataataataaaagtaattatccatatctacatgcaattaactcagacattccattattatgtatctcaaattatacacaatgacactgtaattaatcaaaatcaaattataataataaaagtttcattatatctaattttttggaacattactttcttatataaatctcaacattgttgtgatttatgaattggtatagcacgttcttcaaataaacaataaaattttttggatgaaatcaattttactttttataaacattttattttctaacctataacgactaccttaaaaaaatctaaatcatacaattaaagtaagtctcatttaaaaatataaatagctaatatttaatatatatatctataacctctataaaaatgagaataattttgggctttccactaaataaattacacaattagcctttact

SEQ ID NO: 26016 - DNA, 3613 bp, Cannabis sativa
cctgctactatgccagttgtgaaggagttttgtggactggacattgtggagaggtacttggaatggaaaaaatgcagaaactgaagacactacagatgattctgaagcattgtttatagttcatacataaggttcatgcctcgtctctaagataaatactcattagttttaagtataaccatttcgtttttcttctttttcattcttggttataaattcttacactattaaaaacagaataagtgtatactctgtacacaaacaaataagcattctgcaaaagggaaacgtagtagtagtgctttaagtttgatgatattttcatcgttcaataaaatgttgctataaattcccaaataatatcatgtcatcgtgttgttttaagaggactcgtttgtcatgcttgaagcagttaatattattctccagtttttaccaactttatcttcttcttctttgtaactgttttctcggatttactcagaatccatcttcttctgggttttgaatttcactttctttgtatcaagtttctactacttcattggtaattgtttcctttttttcttaaaaatgtctccccctcttatcaggtcttgttcttagtacatatttggcattgtaactaaataaaattgtgtttgaagaataattaagtgtgtttggccatgtctcttttcaaaaaacaaaaattttgaaataaatgttgttttttattttaaaaaataattgattttaatcaatattttttttctattttatctcatgcggtattcattgtgtgtgaatacattcagcaacacataaatataattttttgttggcagctatccaaataatagtctccaaacaatatcataataacaaaaagtgacaattattcaatacacttagatgaataacaacttgacaacaacacaacaacaactaaataacttttatctgttccaaggagggatcagtttcaaaagatgttattttggttgatactggcactttgacaacagaatcaatcatggagcaacaagaaaacaaccaaaagcaaacccctgaagaagttgaatattgaaaaatctataattatttattcatcaataaatattgttttggttgaaaacaacaaaaacaaaactacacaatatctacaaaagaataattaagttgttttgatgttattgtgaagattcttttgtgttatttttacaacatcttattttaacctaaaaataaagtcaagttgttttcatgttgttgtaaaatttgttatgaattgtttatacactacactggttgttcaacaattagagaaatagagttttacatgttaaaacaaaaatttatcttatcttatacattcagacatggaaaataataagagaacacgcattatgttgattttaaatcaagtgggggcgtttattataaatatgaagaaaaaaataacttatattagtaataacattatttgttgtttacagttgttttaaagttgtaaacacgtttaattttgttactttttaaacatattattttcacgtcgtttgtacgttgaattttagtggttaaaatttgtaaatttcttaaattatatatacatttatttttatatttttatatcattgttaaataattgttaacagataaaaaaattactaaaaactattgtcttttttcttaaaaaaaaatataattataccaatacttgatgtagaaattaaaaatataataatagttgtatctcactttactaaaagattaaacaaattaaagaaaaaaattataatatttaatatcccgtgcaagatacatgtaaaattaactagaaaaaagtttaaaaaaaatatgaaagtaaagtttcttaaaaaaatgttgctcttcagcactacaactaaaactaaatacatttctcaatcattaaatccatgcacagtagcttcaatattcttggaagacttcggtatattttcttgtacactttcaatgtatgcaactcacttcattccaccaaaagaatagaaataggcaacaagcttattctggtcaactttgaagttcataataaacattaggtttatgccacttacaaaccttaaactttaagtacttatgcgttacatttttcttaataaatataatgtagatatacgtagaaaaaaagggcaagggaatttgaaatgtgaaagcatcttaacaaatttattctatttaactactatatatataaacaacaattatatattaatatattgggtaaatagcgaactaagtatctaaaattttaagtttgtaagcggtataaagccaaatatttatttttagcggtatattaatacagagactgtactgataaaattagagaaaaattataattttacaaacattggatacttatactgctaaaataaatattgggtttatgctaattataaaacttattttagatacttatgtcgctatttatcttaatatattttcaaatctcagggtgggcttgagctctccctcaacacccttaggtctgcctatgtcgccaataatactacatgtgttattatcgttattgagttaattaagtattaggtctatatagtttaatataataacttttagagagtattactagtcaattgtaaaacgacatgtctagagatgttagacaccattgaatactctaataaaattgcattgaaaataatgaccacattgtatatatggcaaaaacaattttatgagcaacctctattagaaatgctctaaataaatcaataaaaatagttagtatatttaatataaattaagttaattcacttgtgagaatttgattagacactactttttaataaagaatcttaatttctcaaagtgacgtgaagttttacctaacaccccataaagttagtcacttttttaatacttttaacaaaatcattaattaaacattaaatttttgcacgtggttgttttagtaaggtacaaatagcagatcttctatgacaaagaaaggtttttctccttcggtaaaccaaaccaaaaaccatatcactaatcagtgaaacattacaaaacagaaacttgtgatattaagatacatcattttcttctttatcctatctttgaattttaatacgacctgtctcaatcaatcttagaaattaatatgctagttttcttcttctcctttctatctatatattttgctgaaaatgagagcctaacattcataaacagaaaaacaagaagaagaagaaaaagaagataaatctttgtctctgaagcaatggcggtgacaaaaacaagaaatggaagtttggttttcgccattaatggccagaggttcgagcttccaacggttgatccttcaactactttgctccatttcttgcggactcagacacgttttaagagtgttaagctcagttgtggcgaaggtttttttcattcttcacttcctctatagttttcaatctcttaatgtttgtaaaatttgagagtttaattacaaatgatatgataatttctttattcttctgttctgtctgtctgtctatctctctttttctttgtttaatggctaaaaaagtaggctgtgttagaagaagataggcaaccagag

SEQ ID NO: 26017 - DNA, 3910 bp, Cannabis sativa
aaattagttaaatgtatagatgataattaaatgtaataatatatttatatattactaataattaattagcgttttgtgtaataacatagtaactatataattattaagtacacatgaaaaaataatttaagtattaataaataattttttttacaagtatataatgctaattaagtgcatgtacttggagtaatataaattaaaataattaaaatgtaaaaattttatatatttatgcacatgcatgcttttttcttttgaggaataattaatgtataatatatagatatgtgaaagctgaattattaattgcatgcgcaaacaaattaataattattcagtcataatcaaatcaattaattaattatatgaatagtaaagtggaaactacgtactaatgattgctactaattgttctctcaaaaaaggtttaattaattatgatcatgaaatgaacttaatgatctaattattatcaaaaatgtatatatgaatatgaattaattaatatatatatggatgtaatcatatcaatatgatgacaaaaatggggacacaaccttgatccatctgcattgatcattagaagggtgtgcatatattcattataatttatataaaaatataacataaattaataaatatacaccaaaataaggaaattttgggtttaatgatgagactttaattagcaaatagtactactaagtatttttttttctttctgtttttatagtacttactagatttggggtatagtgaattttagttcctaattcatggaacagtattaggacggtttgataaaataataaaatatttattataaatatataaaagagatagttgcatgtgatatttagatatggatatttttccaaaaatctctagttaattattttattaattatatttgtgtgctaattagttatgagtaaaaagtgttgattgggaataatcatgaaacatggtatctacataacatgaacatacatatttatcatggcctgtattatgatatagtacctgtaatttatatgtttatatatttatatatatatatatatattaatctctacaaaaatgcattctattccggtaaaaatggttttttcaggtgacgattactcacatatagacatgtgtaaagagagaatttatatattttaaatttagtaaaataaaatacttttttatacttttttgacaagtactgtgtttatgaaagctatttagtaaaagttgttgttatacaaatcaagtgattattaaaaatgtgttgttcactcaattatataaaagttcaaagagttcatgttgagtttggaaccaacaacctttttgcttttgacactcaggaaagaaatatggggggccaaaatgtaattaaactagaaataaaaaaacttacaaaattataagtcaaaaaattgattcagggtcataaacaagctgataggaaaaagagcaatttgattcctagaagtgatgagaaaaaactactaaaaaactatgtgatcatgtcaatataacacaagtaattaattcttacttaaataaacttttgatgataatcatattcacttatttgtattgtaattgggttctgcaattttgataacatagggaatttctctgttttggcaagtaaaattccaaatgacagtaatcaataaaactgtatttttttatgcataattttgatctctccaagtaaaaataacattatacagcgcaccagaaatgttattccaaaaagctatttatgacatattttccaccaaagatataatataaaaaaaaaaaaaaatggcaaaatattttttttccttcttttcattttcataattattcataaaaataacctctatgtctcgtacaattcaataaaaattctgaataccctacatgtacattatttcatattgaaaaagttatatattttacaacgtgatattaaaagtacttttcaccaaatataaaaatatgtaaatgagagagaggttgatgaatatgatgatcagatgagtagtgcagggtccagttatggttcatgatcaatatatatttagggaattaattaattaatattaattaaagaatcaaaaaaggtgaaatatatatatatagtagtataggacatatgacatttggactactcatataaaagtatatattagattttgaagatgtgtgtctatatataagtcatactaaaagactcttatttaaagagactcacatgcaactcccaatacacaaacacaaacacacacatatatatattactactacacattgaccatttacaccaaccatatatataattatatataaaacacacacacaaatacactactactatatacatataagatgaataataataatttgatcaagagcaacaagaaggcaatgaagaagcaagcaggcacaacagcagcagccgggcagggcggggggcagggcgggcagcagggcgaaggagcccggtttttgggggttaggagaaggccatggggaagatatgcagctgaaattagagacccttctactaaagaaaggcattggttgggaacattcgacacagccgaagaagccgccttagcctatgaccgggccgctcggtccatgagaggctcccgcgctcgcaccaactttctctactccgacatgccagctggctctgctctcaccaccattctctccccggacgaccccaacaacaacaccattatggttaacaataacaacaatctcaatttctcgtcttcttctgtttcttctgctgctgttactgctgctagttatcagtatcatcatcagcagtatcagcagtatcagcagcagaatacgagtgcaacagactgtttgaacattattaataataatactgctgaccatgaccatcacaaccgacgacaacaggaacaacaaccgtcgtcgttgttgatgatggcggccgataagcaattggatttgattaataataatcaaaatcaacaacaatattatgattataatttattgttctcatcttcttctaattcatctaattcttcttcttcaccacatgatcaacaacaacaacaatattttcatcatagctattatgatgatcatcatcaggagaataaagaagcagccataatgttcaacactactacttcttcatcattttcggcggctcttggttcgggttcgggtttgggttcgggtgagcttccaccatttccggagtctgagattagtagttattattataataataatgacgtttatggaatgcaacagagtcctctgtttagcactatgccatcagtttccgatgctctctccggcgccggcgccggccttgacccttttgatttgggctctgcttcttcttcctcttttttcttctgatcatatatcaaaggccattataatttattaatatattaattactatctaatatgtttttttttgtttgttttgttttaatttgagagatttttgtacttctgcgtgtaatttgtgattatataatatatttttaatttatattaatggtaatggattggaaatgataccttttatatataatacataaattaatgtaaaagtaatggaattttcagatttaagtaatgattcatcatatcatactcatatgatatatataccttagcacattttttggcaattttatgagtggctgagatgacaagaattaacaatcaaggtttttagttatgttaatgagtgtagttaagtaattatccaattcttcaaaacttttcgaatttcttttagaggatatactgtacaatttttcttttttttagttttgtttttaataaaataataatgaaaatttagttattagaaatttacggcataactatttaggtttcactttcgattgta

SEQ ID NO: 26018 - DNA, 2466 bp, Cannabis sativa
atgtttcgccgagtacatgtatatttcggggagtgctccctccaatgtcttaatataagcttgtagagcataccaaatctctacaaacttaagctcgatagacaaaatctcccagcttcttcaatgttataggttgctaaagaatcgatttttgccccatttcgtcaaattatcaattgcgtgacattgttatgatctttggggagctcgcaaatgagatctaaagacttattgtttaagttgatacacacctcttaacatatggagcttgtttgctgccctaatagtaatatcacaaggctttcttcataaatcaacctttagaatactttttttttttacgaatagattagaaatactcgtgaatttacggcgcagatatctacaattggtgctgaaacttccttgaaccaggatagctcatcgtctaaccgtagagcatgctttgccaaactatgggccgctaaattctcaaagcgaactacataggacaaagttgcttccaaaaatttagacaataaagttatatcatcttcaaataacgcttttagctcattaaaatacacttgaaaaatagcagaaaaccataataaaacttttattagaaaattatcaaattaaccagaatctaccaaacaataagaactaagtaaccagaaccccactaaaaattactagaactaaccaaagggaatccctttggctagtagcaactgaattatagcactctacttcataaccttcttaaagttactattccttactaagaccatatcatctaaaataaatttgagaatgtgatttagtaaaaagtaatgaacataaaccctaccatatgtgtataatgaaactaccacttgatctatttctattataccaatcatagaagttgactgccttgtttagtaaatatcctctaaaacaaccttggaaaaatctaagctttcttaattgacattaccaacaagataaacactattatttgtctctattggagttgaatgcattttaaataaattataatatactactagtagtattaagatagatagacaacagaggaaaacagtaatgtatatcttaatactttcctaatattataggaaaattctacaatgtactcctttaaaagagaaacattgatacacccttatccagtgacggagccagaaattcggttgagtgagggcttgaatattttctttttgaagggcttgaataaaaattgaaatgaaataaaaaaaaaaacatgttaaatagagtgttacatatgtgcttagaaaaaaaagagttttgattgttttttttttttttttttgaattaatttgctattaaattttagtggtattacctttaaaattgggtaggaataaattgagtgaagacttaatacacatttataataaacaaaaatttagatacatatatgtaacataaatttttttttatatattataaaattgagtaagggcttaagcccacacaatggcttaagtcccccgtccctgcccctatctgtttttatattcgagaaattttttgtctaattttttttatgaccgtgtacattataattatttaagttattctacaaaatttagagaaattcgaaaaaaatttaacatgtcaaaaataaagtttaaattgtttgttgcatgcgtgactcttttattatatacgcgtgtaaaataaaccgtttgaacattgctttttatgttgtaaattattccaaattttacaaaatttcttaaataactataacgtatagaactatgaaaaaaattagactaatttttttttttaaaatgtcgaaataaaaaagggtgcatcaatgcaccaattttaagcacccaatactatatgtagctattcatattagtatatttcaatacaatgaaaaataataaaactcatacttattaagctttattgtccatttatttcaatatcttataggataaaatcaaaattttccaatttattattaatgtcccctatctccttttgacgaaatcctcacatttataatttatacaataaagcaatattattttatatatctatttatggtaaaaatcatatttatagtcaatataaattaattaaaattaactaatataatcacaatccaattcgacttaattatttcttatttattatctatataaatgggttggaatatcaacatcataaccaatactaaaaccttttaattattttagccatttaatttattaaaaaaccattcatattggaatctatctgtaaaataaaaaaaaaaaaaaaaacaataaattcaatagtcattaacctttactatctatttatttcattatcttcccaataatagaataaaattaaaaatatttccaattcactattaatgttcccacctcccattgattacaaaatctccacatttatagttttggcaccaaaataatattatgttatatatatatata

SEQ ID NO: 26019 - DNA, 2670 bp, Cannabis sativa
ggcataaaacccaacataaggtacatccttcatttcttttgtctctttcacattgttaggacattgttcctttgataaaagaaattgtccccttaatagaatagatgtactctttgcatcttccatgttaaatttctaaataatttcttgatgtacccgaactgctttaggttaatagttccttccttctggtttcgtgagactttgatgccaagtatcttttggaatggtccaactttcatcttaaattctctcttgagcttggctttgatatttttgatcactgatttatctttgctcatgatgagcatatcatctacatagagcaattagaacacgactatagattgctccagaatcttaaaatataagcagtgatcgtaagtggatcatttgaacctgatttgatgcatatacgtatcaaatcttttattccaattgtcttggggactgtttcaaaccaaacaaagatctgttaagcttgcaaactaattcaactcctttcccttcaacctgaagcccaggtggttgcttcataaagacctcttcatccaaaaatctattcaaaataggagtcttaacattaagttgttcaacttcaaactccagatgtgttgccaaggacatcaccagccttatcatcatgtattttaccacacgtgagaagatttatgtgtagttaatacattccatctgagtaaaacccttagccactaacctgactttgaatctcactggttcattctcattgattctctctttcaccttgagaatccatttgcactctacaatcttattattctcaaacttcggcataactacccaagtcttattctttcgtaaagaattcatctcctcatcaatggtgttgagccatttagacttatttccacctaaaatttcctcttcatagcttttgggctcttcaattttagtctattgaactatcgccagtgcaaatgctatcatgtctacttctatgaaccttactataggttggatctctctttgggttctatcatgagccaactaataacctttcagacctatctagctgaatccttccggcacctctgtttggtcttcattatcttgttcttttggctccacaatagcttcaggctgtgcatagtcttccggttccacactacctttcacttgtgaaccttcttctaagagcttcgtttcgtactccacttccacacttgtagtgtctttgtttcctatttttcctgtaacacatagagacacaccacccttcctagaggtcaagtgaggatattctaactcattaaaaataacatttctagcaatcacaacctttggtttacccttattagaaatgtagattctttaccccttggttcctaaggcatatcctaaggaagttcctttcacggatctgggttccagcttgtcaatggatttgtgtacatatgcaatacatccaaatgttcttagatgtattagattgggagttctgttgtaccacatttcataaggtgtcttaagttctataactctattcaagctcctattaataaggtaggttgtggttgctaaggcttccccccaaaataattttctaacccataactgaacagtatacatctaactttgttcaataaggttcggttcatcgtttcagtaacaccattttgctcaggggtcttcactacagttctatgcctactgattccaaactcttgatatatcttgtcaaagtctgagttaaaaaactccaacccattatcagtcctaaggttcttaattttaagctcagtttggtttttcacctgagttttctaatttcaaaattgttccagacactaatcctttgtggttaacaagtaggtccaaacacaccgactattatcatcaactattgaaagaaagtattgcttaccggagtgagtaggcaccttgtatggtccccaaagattagtgtgcacatatttaagtatattttagttatgtgcctttatggagtaaacttcagcttatgttgtttccctaaaacacaagcttcacaaatagtaaggcataagaatttaaattttcaattatgccttgtttgtgtagttaaggcattgttcactgatatgtccaagtctgtgatgccacaacttcatgtctgattcaagtcctttcaccatacttgcctctctagcttggactgtttctccttggagaacgtacaacctatttatctttgcacctttcatcattaccaaagaatctttggtgatcctcaagcttgagtgcatggacttgtatctgtatccttcatcctcaagcacacccaaggatttgaggttttgtctaaggtctgggatgtgccttacttttgtcaacaccctgattctgccatcatactatttgatggccacctttctggttctaatgacctgcatgtatgatcattacacattaggattttaccttcatcaactgacttataatcaagaaatgactattgttatatccaaaattcggctgccacctcaatgaaggacacgtgtcattgataaatggaatgtgaatcgatgccattgcttttatggaataaatcattaagtacgtaagtatcagagtatatttgtaacccaggtcttaggcgaggaatcaatgtacaaattggtactaagtatattaacgagaaaccatatg

SEQ ID NO: 26020 - DNA, 3827 bp, Cannabis sativa
tttgttgtctaagttgttttttgagtgagatgtgagtgtagtgccggcagattgtgtgagtgcaagtataatccaacccaaatgttcaattctagtttctatgcctagaatactaagatcatgatggcccttctcaagggatgactcgtgaatttacgaacaactttattcttttaaatattaaaaattataattattatgtaataatgcatggtccctaattatactatttgtgtaatatatatcatttaagcacttacatttaggggttttaatattttaactttagtataaaatttgatattaatttaaaatcacacaatgtcgcgtcacgtatcaagccctgccctgttgagagcatatgaactcccgttagcagtgttatattcttcctatttaaggtcaagaaaaatctaaattgtacggacatgtttgtttgcctaaaatattcaagatattttattggtagccaaaagtaccttttataaaaggaccagatagattaatttcttcttcattgggtaacaatagtattggtccaattacgtaatatcactaatttaaaatccaaatttgaaaagaaatacttgaaattagatgagtaaaataagaaagatattttttagaggagaaacacaggttagtaagtgtgcagaaaccacaattattatattcctatttttgtcagcaaatgggttttggttgataataaggtatttatcatgcacatgatgctagctgacaaccaaaaacaaagtgcaatattaggtaatgggaatttggcaccaatgcagtgcccatgttactttgctttttatatttttcttttttctttttcttctttagatcaaccaatacatatatatattttttatatatacacgaatgttgtagttgacgtcaatttattatatattttttatttgtatataggtcaatttattatattattacttttttttttgctgaaatttttattatattattaattaatgctgcatgaaagacgaaaactgatatcactaacaatatttatgtaattctagttccttgatttcaaaataatactaaaacagatgcatgcatgccgtattgaacttcttgcattgcattttcatgcattaaagactcttaaaaatacccaaagaaacgtaaaaaatgtggagagagaatctgaaattcacactatcttaatcaatatatggttgccatttaaatgaaaaattacaagtattattacatctatgctattaggttgttatatacacataatgttaaaaatatatatataagaaaaatgttaacggacatattattagtgcattttaatatttgatcctacatagtttgatttaatataaataacataaaaaactactaactaattaattataaaatatcgaggtggtgttaactatatatattacatacaatttaaaacactatgagtaattaaatagcatagaaaacatatatatatatacttgatcactctatagaaataattgaaaaataacatagattggtatagctatactaatcaaataaaggttccattaataattgtcttttaaaaaatattaggctactaactatatgagctaaaaaattatttgtcaacccataatttaataaaataattaaaatattaataatataagcttaagataaaatcgttagacataagtgaacagtgcagtgccacgtcaagtgaaaaacctgactgggaccgatctaaccatatacccctctcacgtcttaacaaatcaacaaattaaaattacatgtgcactttatatatacattaattaccaataccatgtgtaaatatattatcaactacatctaaaactatataggccggctatatatataaagattatgatatatgtaaagaaataataactcaattttttatatgagaatgtgaacatatatattataattattttattaatttttttcaagaaaaaaatatattgaataattacacagtgccaatcacaaactgtacaaataatttgtttaattaatttcactcgtgtgtaataatgcatgctttaaattacacaacttactttgtcttttcaatatatatatttatggataaattataatttctttagttttatatatagatgtacacagagtttttagaaaatgtgtgattaatttaggtttattatgaaacaaattatttttaaatattatgttataatttattgtcgtgccaaaattaaagtctcgattattgatcccacaatttttttttttttttaaaaaaaaaagaaattctgattaattttcatttatatatatgatttgtacacatgtaagagctagttattattaaccaggtaaaggaaaatagagcactatgtacttgatattacttattagaagacgtgtgaatatttatatataaaaattaattatgaatgcatgtctttgtctctccaattcctttcctgtttcgtgcggctccctgtaatgaagaaactgtggcggacttaagatttaaagtgaggaaagtgtaattttttttttttttttttttgtaaggaagggcaaataaagtaaattggtgggattagaactcttatatatatcctctaatttgtgaagtagtttaacaattacactaaagttaatattatacttattatatcttttattacaaatatatgttgtaatgtatatatatatttttttttaattttttaggagggcgcaactgcccctcctcgcttataggtaggtccgccccctcaccatcatcttttaatgttgcctgctcttttataagttgtgtaaggctttaattattagaagcaaattttcttcttttcatgcatagctaatatcatataattacaataagtccaattatatatgtattaatataagtcagaagaataaaatataaactgaaaaacaaatctttttgtttgataccttataattaagttattacgataagctggagactataataattttggtaaagctaataatttctagttgtcatggatttcgatcggtacacatatatatggatcattaattactatttgtttttatgtatatatataattacttataataacatgaattgataataaccactagctcattcacaaaggtatatatagtttatgaattgacgaagacgttagagattaccatatatgtaaatggaacaaactaatcatgcatgtacatttgtaaaataaataaactggtttccgcgttttcaaaagctttcagtacaaaaaatagtgttctgttgtggtaccacacgtctactagagaacgtgatcctcatatatatgtgttaattgttcactcaatgatcagtagtagtcttataatatattatatataaatacatgatcatatctctagtaggatcatgaccaacaagctctcattaaaatcaacatgtagcagtagtacgtacgtaccaggcgcactcgcatagatttttctttttcttttgtagaatgacatatatatatatatatacatataatattctcacaataataacccaaaaacaaagtagtgacacgtttcgaccagtaaacgtaaaagataatgtggtttgttcaaaactagctaggggatagtgatgagggtgtggtgggaaatagagcactagacatgttaggcattagaaaacgccaagaggaatatatagattttgagaaatgaatattactttttgagtactctaatattatatgctcttttcttctttccaggctatacgatatatgttcttatattaattcattcattggagatagtgagataccaatcactca

SEQ ID NO: 26021 - DNA, 1820 bp, Cannabis sativa
agagagagagagagagagggagacctcaaggggagaatgtacatgggacttgtgtgttccattcagtaacttgacttctctatcataagaatttgcgagaactgagatcatcctgcgcaaaagatttctacgaaagagaaagattgcagtaacacctcgactttcaaaatacttcactatttccttgtgatgctgcattaaaccctgcaaatatttttcaattaggccaaaatctcttcttctatgcagaacaaaaccttacattcagttgtgagctcatgaaacgcaagtgtaaaggagtcctcacagaatgatgccagaacgtgcactagtattaagagtatggttttccaaacttttttatttttaaatcattttttcttttctatcaataaattgataccttaacgtttatgcatttaatgatttagaacttctcagacacgaagacctatttggtacaggataagggtccttttggtgcgccataatacaccatattgtataatattaaatataattgtgttatatgtcatatttttataaagtactatatttgatattgacttgtatgttcatatatatataaatcaaaatttaacaatattattgtataaaaatataatatacaagacagtttaatataatattatataatataacacgatctaatacaccgtgccaaatgaaccctccagtgaacacaaggtcataataggaacttgaagtgggtcggacaagatgcttattattctacacaaagttgcagttgtttaacttaagggttggttcctaaatttaaattgttagggatcagagagcagaaatgaatagaacttatagcggggtctaatcaaatttgtaaggaaaaagtattgttagtttctcatataaccaaaagcattgaattacatccacttccaaaaaattcaaaacaacacaagatgaaatcgatttgatatgtcatgtagccagccacattttccctacagacaaaccgagaaaaaccaatctaacatgtcctggttattcagacaacagctatctataaactaggcatgcatgtcaaagcaggtgaaaaacacaaatgtctcaagcttcttcaacgtacagtgtcagaaaattagatatgatgtacatttgctactagttgcactaaaatctaatgctttgttttttaaacaaactaaataattgtgcaaccaaggcaaatagcacatggtaaataagaaatcaaatttctagagcatatattcacctgattaaggatccactttaaccctactgtagctgtacactcattctttgaggcactactaaaccagtctagattgtaaattctatccaaagtctccacagtggttgagatgttactcctcaactttgacggagaatacctccccatttgagctaatgttagtatggttattcaacaatgtttcaaaccacccacttccagacctctgcattgataaaatggtgaaatatcgcacaggattgcatgcgcattcagccctaaaatacatgacaaatcatgaaattgtctttcaaatgaaatcaagcccaaaaaccaaaactaataaacagctttatacctgctataatttttgggtttggggtagtgcacaagaggagtttccaaggaatcaatattcggttcttgacaaggcttttcaatcacttggagatttaaatatccaaccttgttccgggtgctaccttgcttcagacaaatggagcatatatatacaccacacaccaattgcaaataccaatacaatcatcctcaacaccaatggagatttcttgggcgcctttat

SEQ ID NO: 26022 - DNA, 3968 bp, Cannabis sativa
ttttatttagggcacaaaacccaacagaaggactctggcacctctcagagggcctctgaggctgctactttgggagagcagtcttcacaggtcattccccttcgaggaggaacaatccaagacacctcactaaacacggtgggctctaacgacaacttggacggacttatctttcccctaaaagggactcttgttaactccaaatgcaagggatcacagacttccccaggtcttaacacgaagagggtcaaaccttcaattccagacttgggggcatttggcgtaccatcggctaacccaccattacaacaacaacaaccacaataaccacaacaactaagacaacaaccacagcagcggcaacaacgacaacaaatgcaaaaacaacaacaactgcaaaaacaactacaacaacaacaacctgggcaagtgcctctgctccagtagcagcaaactttatccccttgttagttgcagattgtgtcgtcacagtccactccatgcccctctcagtctcctacactttaacaccttcatgggcgcacaactcctaagccaactttcacttatccatctcagcacgtcgtagggggtaagttccttcattaggattctgcttacccatgaggttgcctattctcggccatgattacctcacaaagttaggcgagtctgctgccattttgaaaaggcgtcatgagcaggaacaaataaatcttcagaagtaagctacccaactatcttctatcaagatagttgagatttagagggagtccgccagccttaatccttcggtcctgtgttggatctgagtgcagtgagccagaatctgatgcctaaggtgggcagagtcatttccccttatactgtagaaatgttggacatcatgagccttagtgtgagcaaacttacgtcagagaagtaggtcgtgagcagaagtgttgatccatacacattatcagtggctgccaaacaataggtcatgggggtaagtctcaattttcagaaccattcttccttatgatttaatttttattaccaaagtggatgtatgacattttccttttatctccctttctctagatggcattgtttgcagagaggaccaccaaagaagtgggcaacatgaccattgaattgagccaactttgtgctagagttaaatccttgataaccgagaatggggccttacgtgcataagttgagcaggtcaagacccaggccgcctccagcacacaaaaggcccaggaagactaggaggccaagttggcagtcgaggagagaaagtgggacaccaaatactagaagatgtacttagatcacaaggccaaaactgagcaagaggtcgagggaactgtacgctcccttcaagagaacttaaacaaggccagggaggagaaagatagagccgaggctgcttggtgctttagtctgagactatctccacccagatccaaaaagtcaacaccatccaagagcaaatccattaaaaggaccaactcattcaaagcattcgtgtcaaacacaaaaaggagaagaaacggacggagtcctggatatcctaacacgacaatctgaacattctgtgtagacctcatcgctcatatatttgatagttggtaccctaaacaccacgtccagttgagctgtaatagttcttattttgggatcactagtcaatacaacactaactttgatagggctagatgttcttattgggacatgactccacttaatccatttgaccttttcacgactactagttctagggaatttattaattattatagcacttcttcctcgtctgatgattatggtaatatgcttaagtgggagattaactcaccctatttttttttctgttttatttatacaagtgttgatgtttcatgtcttgtctcgcagatatggacttcaaagatctcttttgcagcccttcaggttctaataagaaaagcaagaaacgtactgccacgtcggaaactgcctctgggtcaaacccagaacatttgaagaggataaaaaagtctgccagcaagaaatgtgcctcgactcaacttgtaattgagcaagagaagaccccagacacttcctcgacacctgttgctgcgagcactggtgaacaagctttagggtgagttcatcaagttaaattctctggatctcaaaccaagatggtactcttggagccctcttgccccctaccaacctttgcaggtattgagggttcgcaaatatgctcgtagtacgctaccacttgtttgcgccactataagtcctttcaataggatgattaagagccgatcaacagaggcaacttctaaagtcttacaccgaggagtgttgatctcttacttttggttagtcggcctccctttttcttgtttttttttacttggaatttgtttatcttacatatatccttctcttatataccctctcttttgacttcgttcttcgcatgcttcttttctatcccacgcggctcaacaaaggggcctctagactgtcaaccaacttagcatcaaactttgcaggtctaatgaacaacgcgaagcttttgcaaagcaatggaatgactcccagtcagagatttctttgttgaaaaagaaggctgaagaacaagagaaagctcataaggctaaacttgaggctgcctagaataaagccaaggatctcctcgagactaaccagaagacccaagaagcgcttgatgaagctaacaagaaactcaaagaagtcgaggctaatgctaaggctagagtaaacttgattgccaagcaatcaatttatcgagcttggatgacaaatcctaatatggatctaagcttcttgggtgctggagccgatgagatgcttgctttctgagagcaaataaaaaaggatgaagttgaggatgctgaagaggttgaagtcgaagaagaagaagtactcactaagtctccaaccatgtaggcttagtttttatcattttaacttacaatcaatggccattaggccgagacaatattttgccccttgtggcagttttgtaatataaatttaaacttgctttgttggatggccaacatagctatatatatatattttcttttatgccattttatcgtgcttttcttgagttgccaatgtttatttattgtgtttttttttcacaacaaaacatttttctcgattgaacttggaatatatctcaggtttacatgttcacttagctaagtgcatgtttgttcatgaacaattaatatcctgtcatttcatatgcgagcagttctgccatgttattcgcgagcagttaatattcttccatgttattcacgagcagttaatattctgccatgttaagagcaaactttacatattttgaacagcttgttttaaaactgttttgaatatttcttgattgctcatatgagtagttaatcttctattcatactttagcttgcatatttatttttaagacacactggtatctcgtttataatgcaagctataatatgcgagctgttagttattcaaatcgcacttagctttatgttgttttatgagaaaaatctcacttacaacagctattttaatttctacttaaagaaaggtttcaaaatatttgattttatactgtcctagaatagctgtcaatcatcctttatttttgtaaaaaaaaaatattttctaggtttgaacctagttcttttttgcatatacctctaggtagaatctagttattgtatatgtaaaaaattacaaagatgaactttaatattacaaaataaattacgggtaatatggccgtaaatgtgccttgttccaatggttctttattaccaagccattgagacaagctaatttgtaagcttcgattccaactacagcttcgataatatacgggccttcccaatttggattaaacaccccagctgctggatcttgcgtatttgcaaaaacacatcttaacaccaaatctctt

SEQ ID NO: 26023 - DNA, 3824 bp, Cannabis sativa
  modified_base (3572)..(3597): a, c, t, g, unknown or other
attgatttaatcacataagtaaagtaacatttatttaattacaaaaaccctaattatgttgtaatatttgtatatttgtctctattttgtagtttcttacttatttgtattctgttgtattaattacatgattttgagtggtgtttagatttgttgaaccccgttcttcttatttgttattacctcatcttaactcgcacagtaatataatattatttaagtcctgacggttttatttttgggcacattcccaaaataccttatacttatggaataagtagaacacttatgttcaaagaaactcttgtctactgatcttccgatctgggacttagattgataccctaataagatttgtagatctattaattaaggggaggtattgttggttcctttatgtttggtttcgtttttctttctttttgaagagcttcaaacacacttccctcgaaggtgtaccaatgatgtactatcaacaaagcatatattaaagataaacactaattaaaagagttatgcaatggataaaaatatgtttaaaggtggttgtaaataaaattggagattgttaaaataaatccccacatacactgtacagatcagcacttaacaaagattacaaagcagaaaatattctaggtggccttcggcctctaacaacctacagacagaccacaaagttagttgcaaagtttgttaaaactgttgcaactaactctcagatctctctactaatctgcaagctatatatacatgcaaatcaactaaaatagagaagaacagatcagaaaattgggagggagagacttacagtggttaagtcttggagccttaggtttagggctcggagatccaaaccaacagaaggacatacacaaagaaagaagaagaacaaaaagaagtacaatattcagagagagagagagagagaaataaacactgtaaaacaacaaggattaccaatcgtacctgtgtgatttggaatccaactttgtaacgctttgatcttgaagatccaatagtagaaagagcttttctgaggcgagcttgaagaggatgtacccataaattattgggaaacctctataaaatcctggtgcactctttcttatttttcttttttgcttttattactgtgtttatgtgtttgtgtgtgttcgtggggtttaatctgatctgggattgttgtgtttttctgagttgaatgcagcctttgagtttcttgagaagaaactcgaagctctgctagggttttcaatctgaaaatgtgcgtgtgtgtgtgaaatgaaatgattctagagtattctggggttattagggttaagcaaaatggcttgtactctaagattgatgactgtcgtttgctctataacacaaagggagtcaaccggggtttgactcagggtgaaaggtatgttttgaccttgagaaatattgattcctttacttttgtgtgtagggtaaaagggtaataaattcctacagagatcattaaatatgttataatataacgaatttaagataaatagttttgactataaaataaaataggtgtttgtaccgtgactataataaattgtttgaattttatttttggtatgataattttttttttttaattttttaaaaatttatttaatacattaaataactatattgtatactgttataaaacaaaaacagaaattaaaactataattatgaagataatgaaaaggaatcgtagaatttccaaataaaatttgtaagattgagcaagtgaaaaaaaaaagggacaatatttagtggctaaattaacaatttggtggcgtgtgtcgtatatttcttctaataaaattaatattgtaagctatataatcattagtaatgtttaattttattttttttaaaatgagtaattaatatattaattattggttggtccatatatgactcaaccttcccaagaagagatatgtaataaacaatggatttggacaagttcaatttagcattgaatgctacttacataaaattaaacaaaattacaattgacttcacttgtaacaattaaataatatatatagctataatttatagtattattattattattatttattattattaaatgacactattttagtataacaatatcttgtagttggatttagtttgaaaactacagattccttccactaatttttatttatttatttattattattattattttaaggtcacactgtaatgataatatcttcactatgagttttggaatacgacaaatctcaagttaaatttctctgaagttgatcacatgaggaaaaaaaaaaaatctgttgttgataacaaaaaatagccatgaccaagtgaatagaatagtattactaagggaaaattacaaaaaatcttcctattaccattttcaaatttatttgttgcattttcctaaaatacaaaaaaatatcatccctagacaaaagcatctgtttaagatgtaatttaagatgtcactttgtttgtatttttagtttgtaaaataacatagtctaatattttgtttataaatacatatattctatatctaatgtttatcttcttgagaccgactttgaaggtaggcgaactagacgtgtgctttaagttccaaacgctcatcctgaaattataaaagaaaaaattattagtatataaataaaatattaaataataaaaaaaatataataaatactgtttagtgttgtgaaatttttttacagatcagtggatcaatttctaattttattagtactggccttatcctattatcgtacagagtttcacctactaatactgtttttttttaccatttggaattagttatttttgcatttacctattgaagatgtaaattataatgtgtgtgagggtctatacaactagatagtgaccaaattaatagcctcctttaatatccattttttcttgtaaaattaccctaataaagagaactagagaattattcttcaaattcgatttcaagtagtgaattaataaatatataaaatattctctttagtgtcttacaaataattagtcagccaaataattcatatgacatcatgaagacaatggtactagtactttattttattaattataaatattttattttattaattattaattattttcttataaaagggaaattattttgtaatgcaacaattttttatatagttagcattaaaataaaaaataaaaaatcaacatatgttccttaatttcaagggtaaagtaaaatttaagactaatttgtggtacaaaatatttaagtttaatttttagttgcaaataaatacctatgttaaatttttgacgatctatagtgggcaagaaaataacacgtttgatcgagtatgctaccaatcaaaatttaccgctcattctagtgtgtgcttccgaagaagcgcacatgcaagaaggaaatttgagcttaatgcgaattgctaaactatcttatgctttatatgattatcaatcaactaaaaataataatacttaaccgttaagtgttaagttattattcacgtgtcattttcttattagtnnnnnnnnnnnnnnnnnnnnnnnnnnaataaaaatttaatgatttgaactgattagagattgtaacgtggaacattgacttgacacttaacggttagctaagtacctacggaagttctacaaatataacttagatattattatactgacaaaaattaaatttaaatatctgcaactaaataagtatttatgcctcaaattaatcaaaaatttaacttttttggactctgttttcatctactatatattcataa

SEQ ID NO: 26024 - DNA, 3486 bp, Cannabis sativa
agttcggagggaatttttaacggccaaaaaaattcaaggggcacgatttactacatgtcaaagttcagaagaaaaaattactaattagtcttaaatttttcttgtggtatttaactgtatatatgtacatatattttgtagtgtatttatagattttattttttaataaaaaaaaaaagcttagattttttttaaaaaaatcttttgaggttgatggctgaattttttttgaaagagatttctttgttggtttggttgttgagggaagagtgattatgttagttgggctagttaattcatgttagagcacttctactaatttttaataattttttactatatatttttttttaaagtatattaattggatgctgcatttttttaattcaatcttttttattattagttagtaatttttttttaaaaaaactattatattaaattatatgagattcgacttaaagaacattattagtaccttttagtaattctctttttaaaacatatcgccaaaatcccattttatttattttactttaaatttttatattacaccatacatcaatttatgtattttttttcttatatcattttaacggtataaaaataaattatattaccataaatatattaaaaagttaagaaaatgataaatatatttatttttatctttacattcagttaaatattatttattaagctaaaaaaatatataatatagctaaaatttagctcacttaattaaaaattcaattttgtaatttaaatgttgaaccatcttagctcatttattgaaagtactgttatgtcagatcagattgtcacctgtcagtaattgtcattgtagtcttttttttttcgaggaaacattgtagagtcttctttatctatggttaaattattcttttttatttattttactctaaacttttggtaattattattatatatttttgaaagtattttttttatcactagaaaaaaaaaagttgcacttgaccgactttaatttaataaatataaattatattatagtatagggtaaatagtgacataaaagtactcatagttttggatttgtaatcagcataaactcaatgattttttttagcggacccaaattctagattatttggtctggacgagaatatgtagtatcagttacttctaaatctttttttaataaatttaaaacggagcctgtactgacgaaaaatagagaaaatttacagttttacaaacattaggtacttatgtcactaaaaaaaatcattgggtttatgctgcttacaaactcaaaactttaggtacttatgccgctatttacctataatatatatagagatgtacatgagagaacattgttattagatatatatttcttaaaataatataaaatataatatttaattatactaataacagtataatattaagtagagtgttaaccactcataatattttttaacaattatcggatggtaaatgaccattttaatcaatgtatcatataatattatacacattactaaaattttccaaaacaaattaaacaagaaaatgccttataacactaaaaacatattaaaaagcaatgacaaagaataatactaaataaaatgagtaaacaaatatcaaaattagtaatgtacttagtgtactcatatggattttatcatactattataataataaacccccttctaaaaatatattttattttgaataataattaattaatcttcaagttaaccacttattatttcttaaaaaaataaaatcattattactaacaaactaataacaaaataagcaaataaccactcctataatattttgaaaaaaaaaaaaattagttttttatctcatttttttcatatataaaactacaaaatagatagatttcaaaaaaaaaaaactacaaaatagatatgtattttaatgaaattcctagctagttaattaacttgaaaaagaaaatggaaagaaaaaacactaacacaaaagtcatccctagaaaaattcacacgacacactcatataattataagaaattaacatgtttaataataagatataattattaagagaagtagtagtaataataataaaattattatatattgcgtatttaattagttaattaattaataaataattaccgcgatagagccagtgtcatcaagaatgccagaaccaccagaagcaaaactaacaccatgaacaattctccttcctttagtggagggatcggcgaaagccgggatgaaaggaagccgaagcttttctccgatgagatcgatgacatttttgccgttggtgaatcttccggaaggcccaagaggaaaatccaagccataaggcaagtaatttgctttggccaaagagttgtttatgaagttattgttgccattatccactaaagaacttccaaacacaaacatgcctttcataatcaacattttatttttatttttatcatcaaaattattattgttacatttggaagaataagggaataaggagattgtgatgaggaataatattagtattgatgatgatgataatgaaagagccattattttttagtggaataatatgatgatgatgatcataataattttttagagggaaaaagtctttatgtatttatagaattttttaaaaaaaacaaaaggttacctaactcatttaacactattaattagataggtctgattttctctgcatttttcttttattattattatttgtacctatgactagtatatgcatttatgtaattagggttagtggactggagtgcatgcagtgaaggttttcaatattttttaggtatacattgtttttattattattattattgtttaatttgataagtaatttttttatttgggagagattagaaagttttcttcatcgttaaagaatttatgaagtttacaccagtcatcgaattaaaatagctcattatttaactaatagatatgctttgccaaattataaactgtaaaagttagaaaactatataaaaattactctaaaaaatttaaacaataaagttataacgttatcaaacaacactagaagagctagagttataaattgtaacacttaaaaattatttgaaacatcagaacataaacactaaaaaaaaaattgtattagaatgaaaatctacaaacaaaacaataaaatactaaattcacatttgagctttattgttaaacaataatgtgtcacattgctattacaataaaataaattatattagattatattagaatgataatctataaataaaatgaaaaacttaaaaataaatatcaaatcaaatgtaatacattttggctagtattgttagacacatgcaagtatttaatttatacttaaatatttaaattgagcattattaggcactagtaatgctaagtatattttagaagtattgtcgtaggattggttagtgatattctttaaaagtta

SEQ ID NO: 26025 - DNA, 1267 bp, Cannabis sativa
catcatcctcatggatcttataattcgaacatggtattagagcaaaaacaaaaaacctctaatgacaatctaatccaaaaaaataaaaaagtcgatcgaaataaaagtaaaaccataaaaaaaattcaaaaagacaatccaaaaagtagagtcaaagttaaaaagagtcacttgtgattcaagggataatgaaccataaaagagctgcttaagatggtgagcaaaaaacaactaccatcttaagggagaatgttagagaattttatactgctaatgtgtagaaagataacaatatacaaaatacataagctactcctctcattattaattagttttgagatagaacccatgcattttacaattctaacaaaatacgcaaaaagacaaaccagcaaacgacacaatcaagaatacaacataaaacacgcaaaacgacacaattcaaaaaacacaacaagaaacttggtagtgtttggtttacatgaatgagtgtaggaatggaattgctattcctaaagaaagatcattcaagtgtttggtttgtttattgtcattgaaaaactcattccataggaatagtaattcatgtaaactaaagaattttcctaaataaaatgacttgaaaagtcatttcatttcataccaactaaaaaaggaaaataagataaacgacaaacttcataaaaacgacaatgaaaacgaaaaacgacattaactaaaatttatacgaatcaaatcaggaaatttgggttttatgagttaaaattggaaacttttgaagtgtcaagtaagaattggtaaaaggtgacatcagcaatgccagacagaggccctgccggctgctcccaccgaccataacgaagaagctcatttacacacgccaaaaaaccaattctttaatgacccaaaagatcaaagcttggaacccatgtcactacattgaagtatccgcccatcaaaggtaagatagacattctaattatatttcgatttgattaggtggggaagtagattacccaacttaaagatttgaactttaatgatttttcatagaattctatatttggaaatggtgattgaatgagaaactataatacccatgttgttaaattttatgtaaatggtgttatagaagtttaagtttttgtcaaatggtggttgggttttgatttttttgtggaaaacccaacttcaattcttgctctttttgagttttttaggttgatttttttttttttttttattttaggtgaaaaagtttgaagtg

SEQ ID NO: 26026 - DNA, 3631 bp, Cannabis sativa
ctggtaaaataaatattccaacacgtcttcactggtaaggaggagaagactgtcgttcctccttttgtcataagaatggttgacaaccttctattcttctacgagtacatgtggggaaagaatttgtacaacaagttgatgaaaacttgtaataaacacttcatagatgtgaagaataggatgcataagaagattgaaaatggagttagtcagaaggaggttaaatactcatcttatggttatactgcagtgttgcattattgagcatatgaggtcatcctagagctgggcaacgaggatgcagaagatgtcgcatcacttttcaagaatgctgaactgggagagtaagccaaaaacgacactcggcaaggacaaagtgatacgattgtttgctagaaatgtaagtttcttacactttacatttatttaatgttaatttccatctattaatatatttgttttaattttcaattgacaatgtactctatgttatgtccctgagcgaattagattgagtttgtgagttgcatcactggcggtgaggcgcctttatttattgacttggaggaactggtgttaggtgacgatgggcaatcgacacatgatgctttgtgaagctaggcccaaaagcttgcctcgacattggaagaacgagcggatgcaacccgactctttagagaatctacacaacctgcaccgtctccaccacttgcactatcttcactaccatatgagtctagtgttgtcccttatgcatctattcccatcacttcagagccttgggaatcagtatcctctgtcatgatggcaaggttggtgattgtggaaagggaacaacttgctctaaagcaaggtcaggctgctcttttgaaaggacagaacaagactatgggtcatttgaagacaataatgagactcctgcaagatcctggaaggccgacaccagatgcacaaccacaaccacaaccacaacaagagccccaatcaccgaaaaatgaaattattctcccaaatgattatagaccagatgatgatgatatgttttgtacacctgacaacacgaagatcaccagcatcgaggatactcaggattttgagatacaagtcttggagacagctccagaactagtggagatccagagacagagaaaatgacttaggtgatttgatgagtatactgaaatgaagaagaagtctggggcatcgaaggcacgtgtgaatgtggacccacttagagtcgttgatcgaaagttgctctcgacttttcacagttgggttctcgactagattgggaacaagtacccgagggagttttactctgatagacacgatttggcttggttcctccaactacatactccgaagacatggcttggagatgatgtatgttgttaagactttgtctaactttttatttatttaatctttgacataatttattttcatgttttattatttaaatgcggtatttcatttgatgaggaggcgacaacacttttatttggaggtgtacccaaatacatgtgtcgtcatgcctcacattttcccatcaggagttactggtcggtggaaagctgcgggtaatgaccactctaacttttagtgggaagacgacatactggatttgattggaggggatgatgtccaatacttgcagagttggaagaatacgaagagaatatatatggccctcttcttcgacagtgcaaagcattgggtgactttagaggcagaccttgattgttggatgttgaccatatttgactcgagccttggattgattcccctgcatgaattgaagagtcacttgacattatgtgaagtgttgttcccaactttgttgttgtattctggcctattcgagaatcatgaaatggtcgccatgcttcaattgatagtctcagagagccaggttagaaatttcagttcagaaatcatcgatgagaagattgtacgacagatggaatcaagttaacttatttacaattgattttttaataattaacatgatttaatttgtatacttgtatttaaatattttttattgtctcatacagtggtgattgccggatgtatgtaatagagtacatcgagcataaaatgctggaactttcgtttgataatgtaaatgatgataatatgaagaaatttagagagcggtggtgtgtagatttgttctaccaaaatttagcatgaacttctatattttttccttatatatttatctacacatatgtatttatggagataacaatgtaactagttttttttattggtatgattatgttcataacaatttagcttaaattttttgaattcttttgttttaaacatatgtttctgtaaaaggacgatagtggacaatacatgggttgatagtttccgatggtggtgtattagtttaggtctctgtatgggactattggattcggtggggtccgatagtactcgattgtgtctgatggtggcatcagataacatcggaacccatcgggtcatcactgtttgttctgctaaatatatacatcataccagcatcgagcccccatcggactagcatcggacctgcatcggactagtggtttttttacaaaggaatttttgcaattagtaaaatagcctgtttcatgctacaaataataataattatcaattaataaaacaccacaaattttaatgtttaacaaagtccaacataaattcaataacaattgataatagtacaacacatcataatacaactgaattcaacattcatttttaaccttggtaggtgtaagtgcttttgttgtgccccttggcaccacacttgccacaatttcgtgatatcacaatcctttcaccattacaagcagttcgatttgacttaattcttccaactttttgcttatggggtcgccctactggttgtttctcaataggcactccaactctcatgttctttacgtcatcaggcaattcccaatcatcctcatcacaaactggcataattttgccttcatatgtggttctccaatattctgctgtgtaatatagtgagcatagtgcgtacatgctaatacttcgttgctgagctgcagcacatgcatgaggataaggaaacttcatgatttggaacaagccgcaagtgcaagtatgttcttgcaagtccactacgtcaccagtctcaactgatcctcagggtgaaccaacatgtaaggtctacatgtgtcaatgttcaaataccgagatttctcaaactacaatgccaagtcctcctccattttttgtgctagggtcttcgtccaattgtcagctttttcttttcgcgtagcaaaccactgttggactttggacctcaggaatgctatagcagcagtgattgaaagcctcttgcatccttagttgtgttgttgaagctctcaacccagttactcgtcattacattgtaacatacccctgggaagtacgaccaaacccatttctcaaatccaatttccttaagatattgtgcaaccgcaacatttattgcccgaatattcttaaattctctgtgaaactctctttttgaatacgtgtaggcacattcgtaaatatgattcgtgaagacgtcagtcttgaacttgtagttgacgttcataataatgtggtg

SEQ ID NO: 26027 - DNA, 1810 bp, Cannabis sativa
tcccttcaggttattatttactgagccagtgaacctgaacgcagtgagtgagtgggtcccatttagactttcctttggttttttcttttcttttcttttttagtatgtagtttttgtattttaatttgactactttctatgctgaagagccatttcaacaagtctgaatagatttttattttgtattttactgttatagatatatatattatgttttccttactacgcacgtacgaaatcgctagtgggtgtgggggcccaccactcgggaaaaattaacggctctgattcattattgatgaagataaatcaatctttcaaatccattttttttaatcaccaaagaaatattatttttaagttcaaatttagtaattaattactaactataatataaattcaatccatattgtcaacggttagcacctaatcaatcacctattattatcaattttaatttttaatttggacactccaaaaaactttcaattttttgaaaaatttctacctttgaaatttatagaatatacataaactactatttttttatacattaacatttttataattagagatttttttttatatatttttactgtattaaaaaaataacaagaaaatcatataaaaataataaaattacaacattcaaattccaaacaatctcaaaacattaaaaaaaaaaataatacataaataataaaaaattagcaacaaaaaaaaaaaaaaaaaaaaagtaccacataaaaatatattaaaaaatcaaattctaaataaaatcttaaaatttttaaaaatatttaaaattccgtacaaccgtatttttatatattttaaaataattcttttctgcttttgattttaatttttcaaaaaaaaaaaattagagaaaagctactaaacatgattttattataaaataaaattttatagctaaagctaaaacttatagattactcaaacagtagtagaaatacttttggagcttcggacgctcaaatataatttttaaaaatcgaaccaactagggtcaatgtctctatttaaatgaattacatttattttttattattagaccaaagttctttaaataaaattaaagaacttaatagttaaactgggaaaaacaatgaaaaggagaataataaaaaaagacttacatttatttattattataccaaaatgaattctttaaataaagtgatatttgtttcaatttttttcttaaaaaagaaatattaatagttaactagactgtaagaacaatgagaattaaagaaaataataataatttcatcatctaatgggattttgatactgaaaacaaactataatttcaatcttttattggtaaagatcattcactctaatgtttagttcatttgaatccgtattctaagagcatttcaaggtaaaatagctcattagattactcgcaataacttctttattttattttttaaaatacattattaaaattttattttctctattttacttatatatttacattatatatcaatttttatatatatataaatatatttttatattatttaaatataatatatttacatgtattttattaattaaaacatgaaaaatacaaaaaagggtaaaaagaacaataaaaaatcaattaaaagaaaaaaaagagaaaaaaaatatataaaatatgttttactttttcactattcattgagctaatatagctaattagtaatttttcccccaaactttgacatatactaaattgtgcctcctgaacttttttggtcgttagaaattccccctgaactattgagattgt

SEQ ID NO: 26028 - DNA, 3502 bp, Cannabis sativa
  modified_base (3418)..(3418): a, c, t, g, unknown or other
tcatcttatcacatcgataagaaattttacaataaaaatctaataatggctcaagattgttaaagaaatataatccaaacattgtattcaaaataatttaatatattacatatgattgaacattataaattaactatgagaagaattttttggttcttcaataaaatatagtcaaatcatttgataatttattgcgtataattgatcatgttaactcaattcatgaacttcaagttcactataatttgtatttgaataaaactttggtaggataatttgtaaaatcactataacatataagtaatcattacacgttttatttttatatacacgaataaaataattatattattcttcaaaacatatatactctttaggagtcactattatgtttatcaaactttatgtttcttcaggaatcaagttcatcaattcaatgatgtgtataatttaaaaggtacaagaaaacttcatatgttgttgtaatggtcaaatagatataatcataatataaatttttttttccttatatctttctaacaagtcgtctaatttattaatagactattcaacagtctaattatcatgaggagttggacttctttccaagtcacagagaaagtttatctcatgaggagtcgggataggccagtttctaaggcggtaaaatatgaaaaaggtggctagaatcctataaccattggggtttatctagtaagggcaaacatcgaagaagtcagctatggatataaactatcgatgcaagggcaagtaagcacctgcattcatgtagaatcttgaccaggcactacagtaagtattctaggaactcttgggagcaccatgtccaggcttctaaacaatagtttgtggaagacactaatcatcctgaattgtttgagcatgaagctcgataagggtactagacacaagaggcctaagcttaaaggctcgatctctcatatcatcactctcaatagcaactctgagaagctcagttgccatcacttttccaccacgtgccttgtccaagttcttaaacttacgcattgtcaacttaggtctaatgaactgagcagcatggggattatattcatcaggtaatcttctgcttctcttcatcctagccatctcaagttcaacaattcaagttgcttacaacttaagaaaagtcaaacttggttggaaaaagtctaagtagcttggaagaattttccaaggcacaagaaaggtgttttggatttttaggaggtttgaaaaaattatttcgatgtttttttagagttcaggagtccttggaataagatcaacaaaagaagagaagaagaaaaaataaaaaaattggcgtcaagatggaaagaaaaaaaaaagaatgtggttttctaccttagagtgaagaaggattgatgaagatgaaatctcaaggtgatcattaaatgctataggcgtgtggagtgaagaaggaattgtgaaaaaattggttctcaactcacttatttataatttagtccaatttcttaatcctaaagctaattggagtcttttaaatttaaaacttcctaaggaacaggtaaatgataagtagaagctaattatttattttccttctcctttgtcaagctaattttgaatttctatccaactaggaatagaaatacgaatttaaaaggtaacaacaatttctaatgttattgggatttaagaaaaaatagagaaactaaaggaaataaataaatgataagcaaaaggctaaatgtcttttctcttcttcctttctctctctaatttcgaatgtcatattcaacaaagattaggattccaattcaagtaatcctaatgtcataacaaaaaatgagaaaatttcaaattttcaaagaaagagataaaagataagtgaaaaaaaaaaagataagattttttcctctttttctttgttaatgaatttttaaaattttcaaggactaatgaaaagtattaaaagttctaattcagatgggaatacttgaagaacaaatacaagtgcctaagaatgtcaaaatttatacctatatggtagttttaagcaaaacgggtttggttcacgtcatctagtcagctctacacaagtgtgaaattgacttggaggcaaatgttgacccaaaaactttatttggtgatgtggacatcaatgtttgacatgtggcatgaaggatgacgtcacaaaattgagtagacccgagtcatggtagtcaacctgggaggggaacctagccctgtgcccaagttgactatgggatctccaagatggaagttcagacctcaataacttgaatccgacccactatctttaagtattatgtgccataaagacatggagtaacctaatccaaggttcaagagctaaaattacacacacatgcaacacagaagtcaacttggacacctagagctttcactcggtgcccatgttgacatcatcaactatggttacagtttctaggaccgtcttagtgtaaagtggccaaaacttgtattggaacatcaactatacataccatagacatgtttgaggtatcaaaatcaaattcagagcaagttaatttttgagcacccggggcctcggggtcccgagaacctagcgcccaagttaacaatttgtcaatttaagctccttccaagtgtccgatcgaagatccgactttcgcattgaatctatcttcataaaaaatttggaaatagatccttttggaggaaaagaataattcctaagcataaaaacagggtccatcccccaggttgacacctggggctggccctacgcccaagttgacaatttgccaacctgggcaacaaaaaatagagtttttcaagatttttttttagcatcatctccgtcttcaaacatattgagattcaactatttttggggaccaaaaaaaaattttaaaaggcaaaaaaagggactcagagctcaggttgacacctagggctgggccttgcgccccggctgacattttgtcaaactaggctgtttccaattcagttcagcaaaaattgctttcaacatttttactgtcatcagaaataaaaaatattcaagtaaactcgaggagaaaaccacaaacccaagtccctggaaacagggcccatcgcccaagttgacaaggtactgaaccaggcacccaggttgacaatcaacctaggatgctatctttaattactcaaatgccaaatccaatgtgaccattgaatctgacatggtcaaaaataggaagagagaccccgtcctcaagttcagaagccttggaagtatcaaaaacagaatcctgaaagctgggtttaaagggcctagtgcctaggtcaacaaataacctggttcgttggtttctgcttatctgaatctaatgtcgttttgacttgttgggattttatgccctanataaaatccatttcaatataatctgatttgttaccaatagaattttagaagtcatttatgtttacatgtatttttcatgtttat

SEQ ID NO: 26029 - DNA, 2948 bp, Cannabis sativa
  modified_base (1149)..(1167): a, c, t, g, unknown or other
cagtttcttgccatgccgaaagatgattccataacttctctttaatctccccaaataggacttttttatccctcccagagtacgaaggaagtcctagatagcgttcatgacaaggcttgataggcatctgaagagtttgttgtatgttgagttgaattgcagaagatgtgtttggcgagaaggagagcattgatttttctgcatttaagtgttggcctgaagcatgacaatagaagtccagagagcgcttaacaacatcaatagatcttttattggcacggctaagaacaaggctgtcatcagcaaaaaaaataggtgcgacactgacggagcacctcgagcaactctcaacccttgaagattgcctcgactttcctcatattgtagaagtcttgagagaccctcatcacaaatgataagaagataaggtgataagggatcaccttggaaaatacctcgactaggggtaacatgtccttgaattgagccatttatcaaaaaagagaaagaaacactgttgagacatcgctgaatgagctcaaccactgagggagcaaatcctaaggcaatcatcatgcttcgtaggaagtgccactccactctgtcaaatgctttactcatgtcaagcttcatggctgcataaccttcttttcctctttttaaatgtttgagagagtgtaataattcaaaagcaactaacacattgtcagtgataagtcgagattgcaaaaaaccactttgagattctgagatgaccattgaaagaagaggcttcaagcgaatcacaatagattttgagaccaatttgtaaagcacattgcaaagacttatgaggcgcaattgagagacattccttagtttcttaaatttgggaatcaaagtgattagagtcttgttgaaagcagacggatcagctccattattaagaatatcgaggactgttttagtgaccaaatctcccactatatgccaatagttagtgtagaacataaccgacattccatcaagacccggactgctatcctcatccatagatttgagagcaaagaagacatcatctgctgtgtatggctgagtcaagatgtcattaattagagcaggtgttaaatgaagatactatagctcttctaatttattattattattatnnnnnnnnnnnnnnnnnnnattattattattattattagaagcggttatttaaatttttttactcataacattaataaaaatcaaatataaaataaataaataaaaattaccaatatatcaatacgatcatcactgtatctcaattacggtcatcatttaaaattggtgtcatcactatatatctcacttatagtaatcactacattaataggtattatccatgaatgagtaatatgaataatttatgctaataaataaataataaataatctgaaattatcgatggctatgaagttgtcgatatagaaaaaaaaattgtgtgtctctaaattattgaaaaataatttgatgagtgagataaagatttaggatattgatatacctgaaatttggctagcacttcagagaaggacacgtgtcaaactggaaagaatacgaatcaacaaatgtaatgataattatatttaaaaattgaataactcattaaatatggaattgacatagtatatttacaacttactgactgtaaggtcttacgcaagataaaggtatacaaactgttgtctcgtgtattaacgagaaaccatacgacaccagatgtgcaaggcgaggcatcaacctcgatacgcatgaagagacgtagacgagacatgatgactgttaggacacttagcgtataatacacattatacaaactaagtataacagtcgagtaaatccaagcaactaatagcgagatatccatctcgctataggaaggcgtgctcatggtacctttactaatcagctccagacatctttcaatgagattcacagctccgtcgagtcagttctctcagatagaagttgacattcaaatgatgttgactgctgaagttcaccttgtcaccaagaattgcgattgtcaaatgaagtgttatgtctttaagcacggaaacaacgagatttacattatcaacctcgaaaagacatgggaaaagttccagctcgctgccagggttattgttgctatgttccctgcgagatgtcccaaaacaatacgtgctacaatgtatttaatacacgtttacattgacccggtaaaagcggaccaatcacaactgtgtgattttcaaatattaaccgcatttattttacgtgggatgtaatccaatcccacaatttcagggacaaaaaattcattagagaaagagccctaaaactgtatcagaaatataatatgattgactcgtggactatgcaaaattttaactgtaaaaccacgtaaaaaacctttgtgttcttattttttctttattgcttttgttttctgtgcaaacctatcacaatttaggctcaaatatagttaagaaaaatctacgttaacagtttggtgctttcattgagagccttcgtgaaaaaagctcagaaaaaaccctccttatatacgtataaaaaaaacaactttctccatggccggtaatggagaaaacatcaaaacacctcataaagaaaccactcactgtcctagaaaagagccaatgggctcccggaggcctcatgattcacgatctaaacggaccactcgttctcaacttgacgttggcccaagtacgcggaccacttgttccaggaggacccaacctgagggtggcccaagtacacggaccacacgttcaaggagaacctagaatatgggaacaaggtatgaagaacttaaaatgaatagtggtagaccccatcccaatccagttggtgaggatggcgcctaagtattggaatatattttaccagcatctagatttactatcatgtatgtt

SEQ ID NO: 26030 - DNA, 1711 bp, Cannabis sativa
tataatttcatttacgttccttaattttttctcaacagccagtaaaaagaaaacctccgaataacttcatggacttaattaacaatcatttattctcaatttatgactatagtttcatacacacaatgatagtattcaaatccattaaaatttaaaaaattcctctagattgtaaggccaagtgacatcagagcccccagtccaaaacatctgtgataattgcttgcatgccttctcagatggatgaagagaatcaaagaaaaaataatcaccaacattatcacacaactcaaactctgtctctcctctcttcccaccacagctataaactcctctgtacggaccactcccacaacatgccgtactggcatatttgaaaccttaaagacatataaaagaaaaacatttattcaacaaataatatgtacaaaaaacaaaggaagaattataaattaaagacagaggagctagctagcattattaccatattttgacgggtggtccattactttactcacagaagtaaaaaaatcaaacgttgtgtagttgaaaccatcaagttcaatctgtatatttcttaggactttgggaagtaataggttgtgtagtttagatagagatgtaaattcatcaaagcaggcaccattgttttctggtttaagcatttttatccctggaagacaacctattgggggaatgtttacaaaaccaaatttccttcctccaatatcgtataattcctgattaaaaattatgcatcacgattcacttcattaattaaccaatcatgaataaattaaattcaatgagttaaagaagaatatactatattcattacttgaaggacttgagtcaaattgcctaacaccatgccaacactttctttcttataacgagacatgtaatcgttgcttcccacactaaacaagaaaacagctttagagatcaatttctgtgctttcgaagggcctagtgtttgacacaactgtttctttactttcttgaaatagcttacttgagtgtgaaggtctaccacctaatcaaaacagaggatttaaagttaagcttaagaagaatttaatattttggttgatgaagtaattaatacataggactacttacaaaaccttgatgagtctcaacaagggctccagctccaccagatgcaaagttcactccatatgcatagtcggtaaccccaggctttaaatatgggggaatcaagggaagcctcgcatattcacctaaatacattagaaatcaaaacaattagaaacccatctgctaaataaggtgatgtattgatattatacacatttttttgtagaaatcttactgataaaatcagggattaaacgaccgtcggagaatctaccggggggaaaacttgaaaaagtctttccataaggagggaagttggcttggtattcaggaatggtgttgatgaaattgttgttaccaggatcgtatagtgaatcgccgaagacgaagagggccacgtgtttgacagctggcagccgtatataggtgtcgccggagactgttgaagtaagaatgagtaaagagactaaccagagaaacgttatgggtgcaaaccccacacttgccatgtttcaatttggatcactgctgttgttttgttttgtataaaacgctctaaaatgtaaagtatgagtagtgaggatagctctgattcattcagagaccattc

SEQ ID NO: 26031 - DNA, 1449 bp, Cannabis sativa
aaagttaacaaataaagttgggtcacaattttttcataaatgtagctaatggcaggggacaaaagtgtatcaatgaaaatcataaaaaacaaaagtaaaaaaaaaaaaaaaatgtccataatgagagagagaacgagaggaatccttgtagcctactctaagcttttgaagtaaaaactgtacaacaacattagctatagttttgtttttccaattgttctattgatttttgttccctattaaaaaacaaattaagatgccaaagcaaaaagattaggtttcaatatcttaaaagtgatttcgattcctcagttcatggattttggaaaatcatagacattgagtgatgattctcgtatctcaattctttaatttgtaatcaaaagaaaaaatcaacaaactgatcatggcttttctataactagattttttataaatttataataatcaataaccttataataataaattagaaagaagtcaggaataaacctttgcaaccctttccataaaaatttaaaatgactaattaatcatcaacaaatggatagtgaattggaaaggcattttatattgtaaaatattttttattttcaaccaccatggaagattgtgattctttggcacaaatataaaatgaataagaattaaattatatacctaaatatttgtttttatgataaattgtataatctattttatataaaatgtggctatgtaatataatttttagtttaacgttaatttttagttttttttattaactttaacagaatatacgattacttaatacaatattgttaattaattttatattattatatatatatctaaaaaattaatataaatatttttatataagtaaatttaaacttaaaaaagtggaatacaactaaatgaacatgtcatacgcttgaagacttgtatcttttttttttttttttttgaggagacagagcagtacaacgaaaactaggggaaggccaaattatcaaccaacaaggttgaaaaggcaacaggaggcacacctccatcccacacaatggaatccttaacaactaaggcattctttgctaaacaatcagccaaggaattacaagatcttggcacaaaatatactcctagacaattacaagacaagaggcctttcttaatatcctccaacagaaattcaacatcactgtccaaaacaaatctagaattgattgcttttactgcattaaggcaatcagactggatataaaaatctctaagattacgattaccggcaatgcggatcgcctccttgatggctttgagttctgctatgaacggactgtatggggaatgccagtattgttggaaggagatgacacagtttccggaatgatcgcgaagcactcctcccgcgctactgctcttgttggtggtggcgatcgccgcattcacattgaaaagtaaagagcctct

SEQ ID NO: 26032 - DNA, 1791 bp, Cannabis sativa
atattaatatactaaaaaaatacaaacataaattataaattataaaatattactagaaatataagataaaatactaaacgagtccccgtcagggcggcggggagtgtgatcctcgttcccgtctcatttaacatttggggataaaaagtaatctccgtccccactccattccccatttatacggggaatcttcgcctcattaggggcgggtccccacgggtgtcatccccgtgggagaaatgtgcatcccaattggaagactccaataatgttctttttcatatatctttatcttttatgttcttaattgaatcttttttattaaagatgacttttatgagctaattttcttttaaggattattatgtgaaccacttgagtttattttatagattaatgtagttattcaatttcatcctgtgctcttattttaattacatgcaatatgatttagatttgcaattattggctgatcacttataattgttatttatgaattcaaatcaaaattctgaaaagtaatatttaaatatgctttgattgttatagatgcgaatttatttaggacgaaagtatttagattatttgtataattttataagttactatgtttaatgctttatttgtgattaaattttatatatagagtttttacataaattgggtttgtaagtcacattatgaattacttgattcaatttgtcaattgaataagaagaatataattagataattgcattaagaagtaaaataaaaaataattaaggatcataacaatcattgcttatttctttaatttttaattatttgttttgctttatttatttatttttctaaaccctttttagtaattagaaacaaaaaattaattaattggcaaattaataatcagtcatctagaaataatactatattttattattatattacttaatttaattacgtatacttatatatcaatttttgaatatgatatataaactattaggtacgatcatgccaaaatattatagacaatgaaaataaaatgataattcaacaaaaaattatacatttaataagtttataaattcacaattgcacatccaaaactgaaaaatatacatctttttccatgtctttttgtgagatttattcttctcaaggcaaccaattattaatgaaactattcttataaaaaaaatgaaattatagaattaatatatgaattaggccctataatgatatatggttattaataattgaaaaaaaattataatgagatagttctcgtacatcttttatatatagcaattgcaatatataatttttcagtctatttttttttttttttttataattttgtatgttatacttatttaagatcacttgtaaattttgaaaaattatttaataattttcattgatgaaaataaggttcaaacatatgtttacaacaaatataaaaaaaaaatcaggcggataaatttttttttaaacattacttttcatattgtatattatttaaaaacttacatttaatcataaataattatatacacaatgaaaaaaattaaattaaaaaactcttttaagatctaaaataaattaaaaaagtatgtttttttaggagatcacttactttttcacaatttattttttactttacattttcttcctcagtgtgattattatatcccaatataatttatgtttgtcattttttttaggattttttcttattttttttaattttacattttaaaatagttttttttttttattttgtatttttacactttaaaatagttt

SEQ ID NO: 26033 - DNA, 4361 bp, Cannabis sativa
cggttaaaaccgccattgaacgatcaatttttttttgggtaataaattaattgaaaaaatcaaattctatcgttatacaaatatattaatttattaaattttttatttgctttatgtattgtagttactaataatatattattattttattaaattaaagttaattaaaagaataagataattagtttttgaacaattaatttatatgtttgtagttgtaaaatgtagaataatgtgtttatagaataaattggatcatatttttaagaaaaaaaaaagtggtttaaaccgaccaaactgaggttcaaacggacagttttaagacatgtatcagattggtcagttggttttcagattgcaccaatctagactgaaaactcgaattctaaattttttatatagaaaaaaatcgaccaaaccgaccgatgcttagccctacttccattaataatgggagattcaccattttcagtaactcaaatgtaagaattttagtgctagactttccctcggtatataacatgataatgggtcatcatggtttaactggaatggggaaataagctccataaaacatctatttttgaaattcctatctcattaatgaattggcactattaaaggggatcaagtaacaatgaggcagtggtatagctaaggcatgcagtgaagaagaaattgaagatcttgatccaagacttgttgatgaacaatcataacttggaccagtggaggagttagaggaagtgaatatagatcccagcgaccctactaaagttgtaaaaattggtaaagggttaggggaagaattaaagtaagattagttttcttttaaaagcaaaccatgatcaattttcctgaagccattctaacatggttgggattgacctgaatgtcatttgccaccacctcaatataaatccacattatcagccaaaaacacagaagagatgtcttcttgacttcgagagacaaaatgctttaaaagaaaaagttaagaaactgttgactaacaacttcattagagagacattttatccagtctaggtttcaaatccattcctggacccaaaactgaatggcatgtggaaaaattgtataaacttctccgacctaaatgaagcatgcacaagggattattttcctttgcccaaaattgattagtcgttgatgccacgacggggcatgacctcatgtcttttatggacccatattctggatataactatataaaaatgtacatcctagattaagaacacatgatctttattactagcacgagactttattgttatatagtcatgccatttggacagaagaatgcaggagctacataccaacatcttgtaattggaatattcaaactcaaataggccgcaacatgaaggtctgcgtagatgacatgctactaaattcagtaaaaaatgatgaccatataaatgatctcgcagaatgtttctcaatcttgagaaaaatcataatgaaattaaatctcataaagtgttcattgggtatctttagggagattccttggtttcacagtaaacacaagaggaattaaggaaaatcctaagaagataaaggctttactcgagatgccatctcccaagaaactgaaggaagccaatcattaatggggaaaatggcagcaataaatagatttatctcaatgtcaacagattagtgcttgccattttttaacatattgtgaggcaataagaagttcaaatggtcagaggaatgtgagcatgcctttcaaaccatcaaaaaacacttatcgaccccatctgtgttatcaaaattgatgaatggggagatcttttttttttctctatacatgtctgtattagaaaattccattagcgcaactttaatacgagaagagggaaaggcccaacaagcagtttattatgtaagtaaacatttactaggggtagagtccagatatccaccttttgataaactcacactgagtttaattcacggttcaaggaaactacaaccatatttccaagcgcacccaattaaagttttgacaaattatccgttgaggaaagtcctctcaaaacccaacacatcagggaaattgataaaatggtctactaaattgggatagtttgagatatcttgtcaccctcgagcaacaattaaagggcgagccttgaaattaatcagtgctcgaatcaaagatgaaaaacttccacaactctaaatctgtctccaaagccacccaatgttgttgtttctacaaaaagatgctcatgtatatggatttctctttctcccaagatggcaggaattagactagatccccccaaactaacttcaataaatactcatcccaaatgaagctagagtggtcaacaattccttcccaagaatcccatcaacccattaaagatgcatgaatcctgagtatctctaatggacgtaatatgcatattcttaggtgtacagagaatatcatctagatcatcagttctataatcatttagaagaataaaatcatctccgggagacttgggctgtggatgtggatttacctctgtatttgtccttttatgttcttccacgagtgccattagggtcttcaaatgacccataatctcagttcgccctttcaaaagagcattctaaccctgcttcagagcaatctgatccttctcaatattctctaaccttgccaaaatggcagaatattctggtacttgagtctttgaggtgctgggatacactgttgatgggggaacaaaacgttcctctagtggtggagatagtgaaggtggtgtagcatatctaaagatttgggttgccttcacccggtcttctaactttttttcaagattttctgcttggctatgcatagcttcttgagtaggttgtccatcattacccaacactagttcctccaagtccacaaataatgacgcctcacctctaatgacggtcatcacaaattattcttcattaggtcgaggacataaaacggagtaaactgtcaactacaaataaaaacaaaaatattattaaattaaaatttaaacaaaataaatgtaataaaaaacaaaataaaaaatgaaatcaattttaaagcagcaaaaaacatacatttctagcgaacgatttaataattttgttcttgctggtgtccaccttcggcttactctcccagttgaccattcttggaaagcgatgcgactttttgatagcaaattcattacccaactccaagatagactcataagcccaataatagaacactgcagtataaacatgcagagtactttccctcattctgagtagactcctttgcaatcttcttatccatatgcttcttcatttttataaagtctttattacaaggttccatcagtttgttgaaagaaatctttccccatgggtactagtagaagaagtcaaggtcgtcaactattctaatcacaaaaggcagaagaacaatcttctcctctttactagtgagaacacacataacaaacaaggtgatccctaacttgtacacaccatcgactttcgtgaaactctcaaaaactctgtgcagttgaccaaaggtgatggattgatcaccattgaagtactccacaattaactggatcgaagttgctttctcttcaatatctttcacaatcgatttgggtaacaagttcaatccagtcactacagcgaactcagatcgactgaatttgcatctcttcttcgcaatgtaaaagtagacttcgtcttccatcttagatttgatcttgtgcaagaatagatgatggacacccaaatagtttaattgctcgaaaaattgtttggaaggagattccttcaccttttataataattaaaattcctcaaattagttttttatctttgaaaagtaaaaactaccgtcacgccaagtgatatgtcctgtgtaatggtctaatattagaactataaggcgtggaggtcttgaattttgaaaaaaaaataatgtaaaaattaaagttagacattttgtatataagcatcgggctgatatcaggtgggcatcggacccgcatcagacacagacacatgaacaaacattgaaaagcttgctaaacatatcgggccaaatatcagacccgcatcgtaccatatcgtacacatacaaacacaaataaaaaaattagaccattattggacaagcaccataccccatcaggcatagacaaccaaaattaaatttaaaagacacactattactatcaaacccaaactggatcgacattgtaccatattagactcgattttaaaaaactaaagtcctaaactatcgaacccatatcaaactaagatcgtaccctatcggatcgaagctataattaatttcatta

SEQ ID NO: 26034 - DNA, 1908 bp, Cannabis sativa
catcctcctcaacctctcctccaccacctccgccgccattaacagcactctgcttcaactgttccttgactatcccctcaacaaattcagacacagccgccttctgcctatccctctctttctcttcctcagcagtcgattcacgacgatgtcgctttctggaatcaggagacggtgtccggttgtggtgacggtggcgacgacggtgggagcggtcgtcgaccggggaacgtgagcgagaacgatcgggagagcgtgcgtggcgggatctgctacgctcgggtgtacgagaccttttgctgcggccaactcggtcccgatcgcgttcacggtcatccctatctcgccgccgttcccgttctcggtcacggtcacggtcacggtcacggtcccggtctttgtcacgggttcggtcacggtcacggtcacggtcacggtctcggtctcggtctcggtcacggtcacccatttttagggtatgtgggaagaagagtgggaatgagactccatggcttaatgagaagaaggggtttttaaaccaaaattttcaaaatatatatattaatgtaaacgacgtcgtacttttccctccaaaaaacaaacgacgtcgtattattgctagttctttaaaaattattataattgtcttggtcgtttcacattttatgttgttttcaatatcgtggtaggtttttttcttttcaatgttttggagtcctcttagtcctatcccttctcaactgatagtttgtaaggtcctcttcggtgccttcatccttgatctcttgttgagtatcagttccttccccttgaccattgttatcgggctgctagttttggtttggtttcacttgaaactttttcagtgtgtttccattttgttccacctgatttgaacatgttttaacttttaggtttgtacctacaaggttagtatcttccatttctgtactagactttttattatataaacaaaaaaaaaatattttcttgaaatataacatctatactatttatattttaagtctctcttttttctttacccaaagtcattagctttttactctttcaaggtactctaagaaaatacactttaaagccctaggttcaagttttcctatactctgatgtgcatcagcacatccaaaaaaatttaaatgagaaaggtctggaggtttacataactatttttcattgagagttttacctttagttgctcttgatggacttctattaattaggtaaatcgctgtcaaggcagcttctccccaaaattcttgagataatcctgactgaagtagcatacatctcactttgttaagtatggtgagataatcctgctgaggtgttgaagaagagagggattaaatatgatggattgggcttatatatccatccatagcccatgtttgtttggtgtggagaaaagaattaagaaaaggatggatgtgtggataccaaattcatgagggcccatcaaaattagtcttctctttggatggatggtaagaaatgaacatacttttccttcctcttaatttaccaaacaacttataagtatgcatcaaatccatctactattttctatattccacactttatatacaatccattcttaccattttccattcaccattcaatattagactttctagatgtgtcctacatgttgttacatagtttcacatcaatagtgtatgcaaggtcaactctaaaatttaatgggacatagaaaaaaaaaattatttttaggcctttagaaaaaaatatagtattattcaaaattaataaaaaattatatatttttaaaaggaaaaaaaatggagctcttaggttaggtgggccctaagcacaggtctagcccgcctataccaaggtcggccctgagtgtgtggaattaatattatt

SEQ ID NO: 26035 - DNA, 2118 bp, Cannabis sativa
cacttgcgtgagtttactacttgattgtgtgcacttgcgtagtaattattaattttcgtaacaacagattaccaactagagaatctttgagagtatgaagtctcaagcttgttttctaaggagagcaatattaaaattgtgcaaatgatgaaaccccattccaccttgatctttagcaacacacatacaattccaattcatttagtgtataccagttccttgcttagaggtagacttacaccgaaacttgcacatcttcctctcaagctccttacaaatgccctttggggctaaaaagatgctcatagcgtaattagagagagattgggcaaccaatttcaaaaggacttctttacctggtccagataagaatttactatcccaactctcaacttttttcctcatcttctctttgagaaaatccaacaaatgcaagaattttacaataatcttttataataacctcaaaagaagaaagtataggtaaagaatttcgaatttcgaatagcttggactgctaccaagtaatctgactctagctccacttcccatcatggttgagttttaatctagcttagctctttctttataccaattgctttaactaaatttggagcgcctataccatatatttttttttatcaattttctatacgtattataacgttttctttaaagtaatttttgtgtaaacttttatatttttttttatgttttattgttaattgatattaatttggaaattttattttccattcttaaaaaaatatctcatataaaaaattagacttcccactaatttatacaaaataattattttttttacatattctccctacccttgtttaattaaaaaaaaattaacaacaacaactaatggataatttccctctctctctctcaaacgcatctctctctctcaaacacatctctctctcaaacgcaactcttaacacgaaaacacatttgaatggaatgaaatcttgtattgacttgaatgaataagatacaaaggtattacaaaggtatttatacagagctaaaacagagtaaagggaacaatcgacaaaacagcctgtaaggactaaactacccttaacagaataaactacctaacaaactcaactaattagacaccagctaggagaaacaggaggcgaaaaaataggtaatcttgttaccccaccccccccctctcaagatggactgtagaggttgtgtaaagccatctttctagtgtgagccgagagaattgaagcaggtaatggctttgtgaaggcatctgcaagctgtaaattgcttggaacaggtattagtcgaattgcagattggttgattttgtcacggacaaagtggcaatccaattcgatgtgtttggtgcattcgtgaaatgtcaggttgttggcaatgtgaatcgcagactgattgtcgcaatagatgaaagcggggtttggttgctgaatatgtaagtcgttgagtaagtattgcaaccaagttatttcacttgtcgtggcagcaagtgccctgtattcagcctctgctgaacttctcgatattgttggttgttttttggttttccaggagatgagacaatctcctaagaaaatgcagaaccctgttgttgaccgtcttgttataggacatgaagcccagtctgaatccgaaaaacccctgagatgaagagaggacttggcggagtatagaataccttgaccaggactgcctttgaggtattgaatgagatgttgcaaggcttgcaagtgaggtgttcatggagaggccataaattggctgagaacattgacagcataagtgatatcgggcctagacaatgtcaaatagagcagtttgcctatgagttgtcggtaggttgttggatttgtcaagggttcaccttgttggtcattaattttgtgtctaggatccatgggagccttagcaggcttgctgcctatgtaaccactttcttcaagaagttggagggtatatttccgttgggtgagaaacatactatctttggttctagctatctcaaagccgagaaagtattttagttttccaagagtcttgagtttgaatttgtcatgtagggattcttgaagttgttggagaattgtg

SEQ ID NO: 26036 - DNA, 2167 bp, Cannabis sativa
tatttaaaaaaaatgaaaagaaatagaaaaaaaaaaaaaagaaaaaaagagagaaaaatgatggatggttgtttgataggggtcatgagagcatgtgtaccgatgctttgaatgagtgtgcatgtgctaaaatagtaataaaataaagaagaagagtaaaaaagttgatatagccgtgtagtgatattagtgtaataaaaattgcattttgtatttttgatgtaaaaatttcttattattaggatattttttattttaagatatataaatgaatattttatattcattaaatctagacacaattaattagttgatatttatatatggttaaattatgatttatcaaatatttaatttctcgatttaatttttgaaattaattgtcaaaatattgtgacaattaattatgactgagactttgatggaaggtctctcacctatataaatatagggtctcagttcccgagctgagtactcaatctgtaaaaatagtagagagagctggaagcctgattaaccacactaataaatttttttttgttattttgcatatcaaagcaattatgtggaattaaagctcaaaaaaaattaatagcacgctagaggtatttcaatcatttagttatgtcgtgtatatgtttaatttaatttcacatatttatacatgattatatatacttcatattttcatataaaaattttaatagttggtatcagcgcaaactatatatctcagtcttcattaagtatatgtttgtttttaattttatgcgtatacatgtggatatatatacatcatcggttctctacgctaattgaacaaaacttttgttttaatagtttttgtacatattattattaagactgttgtatacattcaatttttatattttatatgcattaaaataatactttatatatatacatttatatttgtattcataccgtattgttgtatatacataaatttttgcctatatatttatatataatactcaatattttcataattttattacatatatttaattaaaatgttctactctatacatttatgatatttttaagctatataaacattctatatgtgtatataacatatatgtgaaattttggttcacgattaattttgttcaaaaagctttcattttcatttttctatatgtttttcaaatctttttacattaatacattcacataatacgatacatttattttgttcatgaaaaagataagaaaatttatggaaacctaaaaaaatgtggaaaaacttgttcagacccgagaatactctttgaaataaaagtccaattttcatttgttttttatgcataaaataatcatggatctcttgtttattggattgagattgtttcaagattattttgggctcttctggacgttagaatacattttttctgatcgggtatcaaatcgtgtcctgtcaacctgcgtgtagggataaaggtcaaatcgacccggctaactgaagaagaggacccaaaaaaacaagtcgtttttgcagtaaagggaaaaatgacccaaggcaaattcaaagaaaaaatataaaatttttataaaattttatttatttagaataataattaatctctttatttgtattaatttagtcaataaattatatttaaattttttctatttttatttaatatatattatttagtatcaattaaaagtagaaaaaattgttttggtaatttattatatgatttatttatacatgtaataattatgctaattgttataattgtgcaattaaatatttattatcaaatttaagtaatttattgtctaaattaattaaatttggagaaacctgccattagttacatattaacaacgattttgcatttgatttactatcatataataattatattattttgtatttattttataaatttattataagtgtagttgattaagatttgtatgatttaaatgctatatatataaattccctaataatgctagatatttaaaaaatatttaaaaaatattcaaacattaagataggttgaatattatatttagtataaagttttatgaaactttataaaaaaaatccctaaattgaatgaaatatgaataaactgtaagtaattttgtagtttgacataagaaaacatgaaactggaataaatgt

SEQ ID NO: 26037 - DNA, 1756 bp, Cannabis sativa
  modified_base (726)..(733): a, c, t, g, unknown or other
taaacaaatatcattgttatattagtggtgtcttgcaccatttagagatgacgttttatgattgattagtgatattttataataactattaaattaaattatgtgggatctaatacttaattttatcagtaataatattacacattaaaatgtattaaacaccactaatacacatttagcatttcttataagcaaaagagcatacactcaagcagtaacgaacttaggatataaagtgagaggacgtaatttcttttgtaaaatatggacaaaaataaatttaaaaagaaaaaaaaatatttttggtgaaattggagtttgaaccattgataatctagcttaaccagtataccaatgctaatagtatatctataaatatcatactttattataagtatatgtcgtaacaaattaaaatacatacacattttttcctgattatctttttagagagtgactgttttctctcgtttttatgtgggtccgcccatgcactcaagtctttttgttttaggaaaaatagtcacaagtactaataaagatgtggttggtcttcgttttacttaagaggaaattgaggaatatataataccaaaacaaactttgcaatttaatttaagattgttaatttaagagaaatgctaaagggcacgtgattaacacctttctatgtgtcaatattgctattagttcaattaagtatcgaatcccatataatttaatatnnnnnnnnttagggagtatcgctagtcaattgtaacgcaatatgtcgagaaggtacttagctccactgatacttaatagcaatgttcttatttaaagtaataaaatataatcactagtgctcataatgctgtatttatatatatatatatatatatatgataatttccattcaatgttgaagtgccttggagtttgagacaatgaaaaatatgtatatagtttgaagtgtattgcattgcactcataatttgtctccacgttgaattaattttctttaagtgaattcgtgattaggtttattattaattaattaagatgatatcttatctattgacatctaaattgataaaaataatgttaacaacaatctgattttatttaaagaggataagttattaaagtcaagagtaattagcttcattggtaggtataatattatattttttaaaaaaacaataaaaaacatattacttattatatatcatggtcatggatacgttggagttggatctatatgtaaacatgtacagattttcatacacattggatttgaatatatgatattattattatattgtattatgatgaattgtattgtatctaatatatttaatataatattatttttagtattgacttatattaataaattgtgtaaaattgtatatttttttttactataaactctacctaacctttctagagtgcggacaggaaccacaaaccatttcaaaatattataacataaattaatacgaattatttgctatgtattaaataatacgattcgtatagtatattaaaatttatcgtcgtaattaattaatataatatatattattactttttatttaatacaatataaacatgccctataatacaatataaacacagtattatttaatattactcattcataggtattacccattcagggctggccctgaaaatatatgggcccaagacgaattaaattttgagggcctcaaaaatacataaaaaaaatatcaaccaactaagttatgaatat

SEQ ID NO: 26038 - DNA, 2288 bp, Cannabis sativa
gaatatgaattgaaagaaaaaagttaaaagaacttaatacaagtaaagatataaattttatataaaataaaaattattaaaatagggtatctccaaaaatttttggagtgtagataaaattttcaaaataaatttacatttcaaaatgtcaaaaagaattatgttcttataaagtaactaaaacagaagctataaaagtcaaaaaaaaaaaagcattaggcgattaagcctcttattatatataataaaatatatagattttatgttataaatatatatagatttttttataaaagaaaaatcacgtttaatttttaaaaattattaattaatataaaataataaaaaaaaatataagaaaataaatatatgtagatttttttatgaaaaaaaaagctacgtaaattattaattaatataattattaataataaaataataaaaaatatagaaaataactaaatatttatcaacataataaaaaattaaaaaaatagaaatttaaggaaaaaagatataaaactatttggagttatattaggatttctcatactatatatatagattaataaatgagtaatcaaagaaaagaaaataataaccctacactactcttcaccattttcactctgtcgagcctccagatttctccttacaggttctctctgcaaaatccggtgtcatctccgacggccacggtgaaagacggttcttcacctctctctcgctctgtcgttctttttgcaggttttcacacttttgcttagaaatttattttttcagtatattttctctttaatgggaaatttgtttggttttgttttctttaatagttcttcttctaaagtttgaattaaagcttaatttttgacttgagaatgtttaatttgtgctgttttgaattttagaatccaaatctgatataaaaatgagtgttctcgagttgttttttagttttttgatttcgtttaactaatcaattaattgttattgtgtaatattggttttaatttgattatttttatagtttaaatgtgagtttgaaagtttaagtaatatgattttgttgatagtttaaattacaatttttgttggaagttctcataagtcacaagatattttcttttgataagtgataaaaagaaagaggggtttccattgcaagtagataagttgcttcacttgtccacataatatagacaacacttcattactgcttatatacatagttcttccagatatttctttgggatcgtgtgcccttttctgtagtttgacattgatattgacttcaacccaattgctcaaatttccaacctttgctttgcaaaacacacacacacacacacatatatatatatatctcaaaaaggataaaggaaactgttgtgtatgtatgtgtagttttaatatttttggactttattaggtaagatggggttctattgcaagttgtttttaaagtaaaataaaatgaaaagatttgattggtttgtttaggtacagctttcttaaatttgaatgattattcgtatgacttgattggtagtttgaatgattttgagtgtataatttttgttcttgcaatctaatttagaaaacaatttttttccaccaacaattgataggtcaaatgaaaagagaaggtgttagttctatttctaaatttataaagatatatgtaattttaatggttatgttattgattttatcatgtctgaattgctttgcatcttaataatggcaattgatgatctttaacaaattggtcattgtgtgtgtgtatcattttttgtactttaatattttttattattggattataagaggcagtgattaaaaaaaagtagaatcactcatatactacgcaccgaaataactgtagataccatttatcttaattggctttttagtactttaaactttgatgtcgtttttacattctctgttctctttcattgttgttttgaaatttggtttggtttttgattctcaatgatgagaataagcagacgggcggtctgaactgatgtcatgttgattgtctgcgtcttccaacttttggaatgtctctgagcctttataatataccacttattttgtgtataatttttagttttatggtttgcttattttgaacttgttttgtttgtgttcattgtcattcatgtgatatggtgaagtttgttatcaaaatttttattatttatttcattgagattccttttcttagtttttcttttcctcttaaattaaatttctgctgttccccatattcttttgcagtt

SEQ ID NO: 26039 - DNA, 6595 bp, Cannabis sativa
cttctcattcttggcaaacaggttcggttttcttttgttcattgggatatttgcagtataaatttcaaagttttgtgtttgtaactgtaaccggcataaatttgatgatttttttagtagcataagtatctgatgttaataaaactataattttttgtgtagtttatttggtacaaacattagtgtcttaaagaggacacattttagacctagattctaaatcattcggtctagatagaaacatgttcaacaaatttgaaaactaagtctgattacaaatttaagacactaatgcagtccatactgacggtggacaaaaattataattgttgcggcataagttccaaagttttgtgtttgtaattgtaatcggcataatttgataatttttgttagtggtataagtatctgatcttaataaaactgtaatttttcgtctagtttcgttggtacaaactttgatgttagacctaaattctagtcgttcggtctaagatagaaacatgttcaacaaattcgaaaactaagttttgttacaaatttaggatactaatgcagtattccatactgatggagaactcgacaaaaaaattacagttttactaatgagtacctatgcataaattatcgtttgttcattcttttggctgcgttcattaacttattctttgttggagaaagctaatttggtatttaatgggttttatttaggcaattgatgatgattgcaatcaaactggacaaatggttgcagggctcctaaattggccacaagggacttttgcttctaaggttagttttctgataaaatgtatgcacttgtattgagtttcctgttttgtttgaattttaggatgtaatcatatgattttgacatgtttgttacttagcttaaaaccgaaaatgataaggcttctttgatagttagaatgagaatatgttgagatgttaatacgaaattgtaattgttaagactgatgattcgtatatgagttcatacaagtctgcgtttttatggatatttcctatgaactaactgcttgtttccagtaggttgtgctcgataaggagaagcaagtactgaccgtcgatagagaggtagatggcggtcttgagactttgtttttagacttaccagccgtaatcacgtaagtattgcgtctctctcgtgttttgtctttcgctgtttacaaaataagttgttgttatgaataggctgagcctaactaacttttgtaagacagttctaagcttaccatacttttggttcaagtccttatcgagtctggctctaatcgaactaggcttaaatactgttcggtttagatcagttggtaccaatttggcacttaagaacctattaaggtagaggttaagggttcaaactagggatgcacaatacataagcatagcgaatttgtgtttacgagccacaagtgtgtgggctaggccgaatagaggctttgaagcggggtcgttacaataagagtataaacaccataggaaacagtttcaacagcttttaactaaaataacagaattcgaacgattatccaagtcttaactacctagcaaagcaaatgactgatcctttgtactaggccggtccaggactaaggtgggctaggactgtgtataggaatcgaagatttcaacttgtctaacctttgagtctgtgtcataatccatggttccatgatcataactttgacaaggcttttttcgctttacctatcataactcacctcttttcctgttgcagcaccgatttgaggctgaaccagccgaggtacgccacactccccaacataatgaaagccaaatcgaaaaccatcaagaagtacactccaaaggatttaaacgtcgaaatcaagccagacttcgaggttgttcaagtgaccgagcctccaaagagaaagggcgggattattgtctcttcagtcgacgagctaatcgacaagctaaaaaacgaagctcgtgtcatttagttttaaccaaaaaaaaaatccatcttccctaacccatcccacctactcttttgctcaaaataaaagcctttgtgtacttaattatcattcaataatcaccattgaattgaataataataatagtattaatacaatttagcatcttaatcatagtgacatcttcaatatgtaattttcttatggttgaaaatctaatctcagactcagacagagtcagcaaagttgagcatctaaatcttcatatagtatataccatgtagtagtggttgattattattcaaatttaattaatctttttaaataatggtttcttgattataattaattagtcatattataagtgtgattttcataaattagttcatgaattctaataaattattttttgatgcaaataattattttaaaaaaaagagagattttaatccaataatcgataaaataaaaaaaaaaaatttcaaggggttgttcagtgcagtgcttatcataattaaaaaattaaataaataaaaattaattaaccacaagcgtcatagaaatttcaaataagaaattgtatatatatttatatatgaatgatgatatgaggtaatgaaaatgaaggaagggaaagaaaataatattaataacttgacaattatatttaagtcacactagttatttatatacaaagttaattttagttttggtccctaaacattaatgagtttgggttttaagtcctttttttgtaatgttaaaaaggtctaaggaaaaataagttctaaaattttaggaccaagccaatgtttattctttaataaaagttgaatttttattttatttattagtatcttcttgactaaagaaacatataagataataaatgaaagaaaataatagtgatatggagtgttactgttaatcttctattataattttttagtcaatttttgtgttcgaaaatacatgttaaatatttttttattaaactttttatggcagcgtatgttatgcttacaacatgtaaatttttaaaaaaattcgaatagtttacagtgcagaaaatatatttgaagttttttgaatacacgtaaaaattgaaatatcaggaactctgtttttggtacgataaactatttagaatttttcaaaaatttatagggatgatactataactatgacaaatatcgctatgaaaaaaaatttaaaataaagtatttcggcatgtgatttcggacgtagaggttgactaaaaaattataattagccatcctcagtaatcgtttatgttaattatagcgcttcacataggagttatttccaatggagtgccaaataagtagtgcaatgctatattttaatatttttgttctctaatagtgtgctaaaacttgtgctaaatttaatacatgctaaaagttaaaccaaatttgacacaagatataacgctatgtataattttttaatttacattattaatactcattttttaatttacattgttgcaatttagcattaatgacttactttaattttttttaattataatattgctattaattttttaaaaaacgtatttaatttattaattatcattagtgataatgtcaatttgcatcttaattgtcatgcacaattacaaaaaaaatgtgctatatagtatttactaatttttttgtgctaaatttaacatattttttactcctacgagatggtctaagcttcttgcccttagttttttacttttctcactaatcactttataatttcatactaaaaaagacaataaaatagagcataaaagtttaagtaccaacaattttattgatggaaattgtcccatttgatgtgaaaaaaaataccacatcaattttgtacaaatttatatcatccataccattttataaaatgtttctaggtatctcacatctcattaggttatactttaatttgtaaatttctttcacatattaaaatatttagattcttcattgttctttatgtcataggttatttatttcaagaaaaattcttgaaccttcggatatacatatctaaacataagaatattcttaccgtaataaatgaaatactttcaagaagtgcagaatggagaagaaaaagaaagtaagaatgatgagtataactcatgaaaattgtaataaactaagcaacatatcccattttcatgcgtcaaagatgaacttatttatacaagcctaaatgaatacacaactttatcatgaatctcaaatcttgcaaaagttgaattaaccttgagtaaagtattgtatttatagcaaagtattacagaaaaggagaaatggagaaaaactagctataatagaaaattacaactaactacaagtggctcattaaatatttacaacaactaataatcaagtaactaaccaactaataaaaaatagtttattggttttcatcccccgacacacacacaattgaaagggtgaggagcacactctgtgcttgcattttaagtagagaaacaaattagtgttaatgatttggtcaagatatcattggtttgatcaactgatggtacatatttgacttctaattatttggccaaaagttgatctcgaacaaagtgaaaatcaatttcgatatgcttggatcgagcgtaaaaaactggattggtagctagggaagctgctcctttattgtccacccaaattattggagttgttggaagagaaatgtgaagttcacgcaagacaaaagatagccactttactttagccacaatatttgctaaggcacgaaattcactctatgtgctagagcaagcaacaacttgttgtttctttgttgaccttgagataacattgtcacctaaaaagacatcataactttcagttgagcgtctgtcatcagggaagcttgcccaatcagtatacgaatatgcttggagatccaatcagacagttggtttaatgaacaaaccatcatgaatggttccttttaaatatttgaagagtcgcttggaagcatcccaatgtgttttgtaaggagcacgaatgaattggttggacttgttaaccatgaatgctacatcaggccgagttaggatgaggtattgtaaagcccctaaagtgctcttgtaaagtgtttgatcagaaaatggttcaccattggttggagagatcttgtgtgccgaactggcgagactgggacttggtttaccatctagttgaagttttgagagtaagtcatcaatgtatttagattaagagagatacatgcaagctttcgttcttatgacttcaactcccaaaaaagtaatgaagaggcctaaggtgcttgacatcaaattttatgtttaactcaacaatgagcttggaaatttgaagttgatttggaccaattattaaaatgtcatcgacatatactaacaagataataaggttttcacttgagttatctgatcttgaaaatattgaatccttttttgtataaggtttccttaagcttttcattccatgttcttggagcttgctttaagccataaaaagccttattcatcttacactatcaatttttctctaattttagtaaaaaaaaatctaacatggatgaaaatttaggagacatgatttagtacgtgtcaaaattcgaggggcatgatttggtatatatcaaagtctggggagcatagtacataaacaatcaccaaaatagtaaaattaaatggaattagacaaaagtttttaaatttaacaatctcaatagttcagggggcatttctaacaactttaaaaatttaaaagtataatttaatacatattaaaattcaagaatcaaaaattataattatctttcaattaatttaaaggatatcaatatttttctaataacagaccactttctatataaagaaaaataatgaaataaaacaaaaactctttaaataatatggaataatggtattccacgtttttttgtcatagactgtcattatcattataattattataaaatataaagcatagcactatctatatgacaaaacacgtgctcttcttattaatattttttttttagagaaaagaaaagaaataagaaataaaggtatacttttccaatattatattgttatcggtataattaaatttcgaatttaatataatttaaagtaataatttttaaaaaaatatcattaaccaattgaaaatgtcacctgatcttcaataacaatgctcaaaagaaattttttttgaaaagaaattgattgaaggaaaagttaaagtttcttatccaataattgcctatttactccattacttccttatatatatttccttaatttctctctagctctccacaccatctctcctcatcaatgtcatctaattttcttcacatgcctatgacaatcaccatgtcctctcaaaattttcaacatcatgatcactcatcttattttgcctctataacaaaagatatagaggcccatctcaagcaatccatcattgtcaagcctcctttcacagtctatgagcccatgtacaatttggcctttacaacgccgccaacttcagcacctttgctatgtgtggcggcgtgtgaacttgttgggggccacaggaggcaagccgtggcag

SEQ ID NO: 26040 - DNA, 3527 bp, Cannabis sativa
gtttatcggtttttatgaacactcaattgttaacacaattcaatattacacattttaatttaataagtaatgctaaaacttgctttaatcagctctttagcaagctaattatttaaaattattagtgaactactgtgatactctacttattatatatcgaacattcaatattttatgatatttttgactcgatcgatttatgtgatatattgacttttgagccaaaatcattattgtcaagttcaaattagccatacatgataaattcatatttattattaatactatgatatgatattggtaagtatattggtttcaatacagatcggtcaggcacatctagaactttgtatggcatataatatatatatatatatattttgtctaccactaagctggtttaactaattagttacttattaattatttcatactcaatactccaatatattacacaatcctttcatttcatataataagaccgattcaaaattttctcaaaaagaagaaaaaaaaaatcgatatatcgatctcacttgactctttatttttacttttattttttttgctaaaaaatcacaacccaataaggcaataacaaaaacaacaaatcaagacttggttgttagttaaacaatttatttgataagatttaatttaaaaatgtaggtgacatatcgctctttctatagaaaaataagcacgatttaattaataaatataaagtccaaattaaaatctagttttctcttcaactgggtctactccaagttccaatatgtcacttgcatcattaaaatgggcattgacacctccaaatctgcaatgaaaaatgcttttttttttttttttttataatttcaaaataaatatatttcccatacagtattatttcttatatatatatatatttatcatgtgacagctacgagtcattgaataacaaaaataagatcgaaatcaagtttgctcttcagttgacattatagtgatggtattgggcactctaaagtttttatctattaatttttcttatataataaaagaaaataggactcagaaaaattggtggtgttcaacatttttaagcatatatattttatatctatatacatagctgtgactgtcattgatttgtcggcattaaatgaggtttgaaatttaagagaaatgagtttgaaccgcttaattaaacaaaggaaaattaaggaatcaaatcagggcacagagttgttggaaaataataatgactgaaagagatgatgacttgtgtacatactatgtatacatatatataaaactgaaattacaaagataaattaatatcaagattgctacataagagattcatcatggtcttataagaaaaaatattaatcatctacctatgttttttactactattataattatttagtgtgaaaagcatcatttgttaatcgatcaatcgatctactaattattaattagttttggtgtacgtaataaatcatgtcaaagtggttcatagcgtgcttctctctctatatatatttttatatgtatgtatgtatgtacataatacatatggtcgtgctagctgaatttttttaatcctggctgtcaaattacctaaccagaacaccgattttccacaacatgcaactagccacgtgggttagatcaaatggtcaaaccgaaatccaagtcaactctgtccttttcttctctgttgatttagtttgctgttggggtttgaatatatttgctagtttaacggaaaggttattgacaattcgatttgtctttgtttttttctgtgattaatattaataaccttggatgttacaaacaaacagtaaaaaacaaaactaaatctaacctcacttcttctttcaaaaaaaaaaatctaacctcacttcgacaaaaagttaattacggaaacttaagaaaaaatgactaaatttagctttttttcacaattactaactctcctttaatagagaacgaagtctaattaaattataataaaatgatagaaattttgcacaaaatttgttgggaaatacagcaccatctaacgagtaaattttgaggcctgaaacttctgaattgtggtggtatgtgacacacacttagatgcatcttgaaaatagatttaatttttcacttgaactgcgttatttgaataaaaattgagagagttatgaccattgttttaagcagtgtgtattgtaaaaaaataactgcgagatcaactgaactcttgggctttaggcatattttgagatgctttaatgatgtgataggtatctttagtttgttctttgacatttggtaagttcttctagcaattttattttagtaaacggcttatcggttaaaactttaaacgaatgggcctaaatgtatggccttagtttctgagaggtcaatactaagcattttttcagtttttcaatggatggatacctagactcgaccctttactgacatagtaaactgagtgtatgtttgttaaaaaatataaaatttaagtaatttttctgtcaatatctctattatatatcatccatttttaaatataaactatgagtatatgtgactgactataattataatatatagatttttgcgcaagagcaaattaaaatcttataatattcatatataagctaattaaaaatttaatttttttccaaattggaaatatatgtttcattgtttgcttaattaagggttttgttttttttttggttaaaatatatataagcgagatttgtcaaattaataacgtgaagtattaaaatttgtaaaacaactatatacttaaattactctaagcgatcataatgacacaatataaatttatggtgattttataactataatgcttgttttatggtcacacaaagtaactttaatcgtgtgtaagatcatttgctaataaatttttttattaataaaaaatttcataaaagttatttttacaaaataatatatatataactatactaataaacattgaaaattttcttctcttttttttttaatctggagaaaatgaatgaataatgaacttttgttttttttttttttgaaaagggaaatatttaactatttgaaatatttgtttttcaccctttatgagaagaactatatgaaagttcctatataggataaagttacacaaattttataaaaccttaattacgtccgagttacggaagaatggaatacgcataatgcatgtaattttaattttcataataaaaaatattatatatagcatccactttaataaaaattttacttaaattacttcgactatatatctaaaaatcatttgtttttttagtatggtactgcttaaattacttcgactatatatctaaaaatcatttgtttctatggtactgattttctttggtacttttcttccaatattaacatctatacatacatcggtagcttctatgtatatataaactcgtgcggaaatgagaaaccatatattcattgatatatagcaacaaacaaatgctgta

SEQ ID NO: 26041 - DNA, 1209 bp, Cannabis sativa
ctagttgtttgaaaatatattccaagtttaaagacagcttgaccggtcactttgtctaaaaaaagcctattggccgaatagaaaaaaaaaagatgattaaaaagaaggcacttcaacagcaccagtctcaggctccttgtatgggtcagctagatttgaaagggccgaaggatcgtcattctaggcaacaggagcctcaacactctaatctaatcggtaggggaggtggaagtggtcgcctcgggattcccgtaggtcgcctaagcaacgcagtagttgaggaacatgtctttggaagcacctagataatcaaagtttgcctcgggattggccttccaaaaatcataaaaaattttgagaccagttgtctctaaggcatttaccttttccccgagcctcataactttgctttatgttcctcctccttagcctttttctcatcctctaacctgcgaagaagagtccggagtccctctctttcctcttgaagactggcaacgtccgagataaagaagcaatgtcagcctcgagctgcttggtgaacggcatgtcctgcagatctttggtcagttcggcaactttggtctcaacagtaagaagcctcttattgacttctcccagctttatccgcacaaccccaagttgaacctgagcttcctcgacgtccttcttggccaagttcacttccgttagcattgtgttggaaatggcaagggtcttagcagcagtcgacttagcttgggattaggcataggccatcttcagaccagtctgcgaaaagaagacattacaatccacactagttaaagagaagtgaaagggaaatgttagaaaagacttacccatgaaaggtctttcaaaactcctcccataaccagctccaaagacaagtcattgttcgccccagccaactgctcgttcacctcagggacagagtgactcacatagtgggtgagcatatctctgcctcttttagtctcctggtgcaatactagaggtggggcaggggccttaacctattcagacctgcttctgatcagtttggatccacctttcgcctgtttggatccattcgaacttcctcctcgagaactcttggacttagtaattttgaggcaggagggtccacaacagtttgttcttcagaaaggtcaatgaccacttcagctggtgccttctctttaaacggggtcttaccgcctttggatt

SEQ ID NO: 26042 - DNA, 3840 bp, Cannabis sativa
  modified_base (42)..(46): a, c, t, g, unknown or other
aatatgattgtggcaagatgcatggtggacaatggagcctcnnnnnacattcttttcaaatcaacatatgaaaagataggctctaactcgctgatttggcaacctgcagtcaagtgatgtgtggcatcttttgctaagacatcataccaaccaggtatgttagattacccctgactgttggagaaaatccaaccaccagaaccctgatggcgtattttgtcgtaatcgatgttccctcaacttttaatcctatgataagtcgaacagccctatacgaactgaaggtggtaacatccatctactacctctaccggaaattcccaacaagggattgggtaaatgtttgtgagcagaccaacaacatgcccgtcactgtgacaactgggccttgtccaaagacaagaaagagaagatgcctatcaagagctctgacaaagagcccaataaagggcaatgaagtctagcccaaagcggggatgcagacatagatcctcactttgggaatcctacaaatagcttcaaacctatagaagagttagagggagtggaagttgatcccacttcactagctagaaaactaaatatcgggaaaggtttagtgccagaaataaaataattattgataagatttctaagggaaacctgaacctctttgcatggtcacatggagacatggtttgaattgacctctccgtgatgactcatgctctcaacattgatctaaatatctaacctattcaacaaaagaggagattactggacaacatacgcacctaagtcctcaaagaaaaagtcgagaggctacgagcccatgaactaatagcggaagcattctatccactttgggtatccaaccctatgctagtacctaaacccaacaaaaagtggagagtgtgcatcgacttcaccaacctgaacaaagcatgtccaaaggactgctttctgcttcccagcttgttgatgccacagttggccataaaatcttgagtttcatggacatgtattcaggttacaaccagatagatggatccactagattaggagcatacaagcttcatgacagacataggcctgtattgctacaaagttatgcccttcaagctaaaaatgcaggggtcacatatcgaatggcttgtgaacaaaatgttcaaacatcttatcgaccgaaacatggaggtgtaagtggatgacaggcttgtcaagttcaaaatggttgggggcatgtggaggacctagatgaatgcttcaaaatctttcgcagctacaacatgaagcttaacccgtcaaatattcttttggggtaggcttaagcaaattctttggcttcatagttaatgtcaggggaataaaagcaaactcaaacaagatccaagcccttttcgacatgaagtcgcccacaaccatcaaggatgtacaaagcctaacagaacgcattactgcactaagtagatttgtgtccaagtctatagacaaatgagtacccttctttaacattctcacaggcaacaaaatatttgactggatagagaaatttgtaactatttttaaggagctgaagaaataatcagctcaaccactggagttgtcaaagcccctagacaatgaagagctaggcatgtacctagcagtcacaaaatatgttgtgagtgttgtcctcacaagagaaaaagatgggatacaacactctgtatgctacattaacaagagaccgattgacgctgaaagtcagtacccactcatggagaaactaacctacaacttgctcttggcttccagaaagctaaggtgattcttcaaagcacaccctataaaggtgtacaccgaccaaccattgcgacatcttttacaaaaatttaaagcatcaggctgactactcaagtgggctattaaactttgccagtttgacatcacatatcaaccaagaatggccataaagggtcaaacccttgcagacttcttggctaagtgcacaaaaactcatctcttgaaatatctcaagagccagagaagaagcgagagcaagagcagcagcaaaaacctatagaaccaacatggaaactccatgttgacggaagctacaatgaccaattatttggtgtaggcagtgcccttataacacctggggaaacagttgcacggagcaatcaaatttggattcaaaacctcaaacaacgaggctaaatacaaaacctttatagtcggcctcaagctggcacattatttagtgactctcaattagttatgaatcacctcaaaaaaaaaaccatgactttgttgtcaagaacatcatatgttcattcagacttccacaaaaatttgtttcagaaaatggaaagcaatttgatagtgacatactcactaatttctgttgcagacatggcatcataaaaagcttctgtgccatggcccatcctcaagcaaatgggcaggtaaaagctgtcaacaaaaccgtcgaggacaccctgaagaagtgccttgaggaagcaaaggggaacttacttgaatttcccctagagttcctatggtcgcatatgactaccaagaagacagccaccgagcaaactccattcgctctagcttatggctatgaggcgatgttgcctatagagctggtgccatcgtctcacaggaggagaacctatgaccaggataccaataacatcctactggcagaattccttgacgaagtagaagaaagaatagatcaaggcaacctaatgctgcaggcctaccagcaaaaaatagcaaggcacttcaacaagcaagtgaaggataagaaattcttcataggagacttggtactccgaagagtgttcccaaataccaaagatttagaagcaagagtgtttgaacctaagtgggaaggcccctatacagttacagagataactagtaagggagcctataagttagaaaggtacaacgagaacatggagctcattctcctaccaagatatttgaatggagaacaccttcgcaaatatgatcagtaaccagcttacaaaatactacttagcagtgttagttctatacactcaacattagagtgtaaaagatatagtacccacaaccttttttggcgtggcctcccaccattcttcaatagtggcctctgctatgcaagtcaagcaagggtagcaatttgatatctagaagaaaaactttaaaatgtaagcttgtatattaaatttatgtatgttgcgcagcaacaaagaccaatataaaaataatgtttatgtcgaaattattgtgtctaaaccacttactaaaaagattaactttttaaagttattattttttcagttccacatgcgtatattaggtagcaccctaagaaaattcccaggcaaggtctatgacacttggtgaattgtaagtgatcaagagagcgtaagtctacgagctcacttggagcgcacccacaccgtaaaatggattgaactagagcagagaacttatgcagagaaattttaaagcttaaaataagatactaaacctgcctcaggcatacttcagcttgacataaagaaacgtaaatcttgatattgaccacctggctggtcacacaatccatgataaaaagcagcaaggccaaacaatagtaatgttcaaaaacagagtgcctataggccaagggtacaaacatgaaggccatgaggctaaaattaagtagtgtttaaaaagtaaaaggcccacaggcaacacaaaacataaaatgtctatactataaaaccataatgttgaaaactaataagttgaatctacatgtgtgcatgtgtaggtggggctgaagcagaagctgcaaatttcggatcactggagtgtgggtcggccatagcc

SEQ ID NO: 26043 - DNA, 5484 bp, Cannabis sativa
agtaaattgatagttgagggggttttgccgcaaattactctataaaatccacaatacttttgcataggaacactgaaaatacatacaaaaccccctaattaaaaatataaattattgaaactcatgtaataatatgaacaactgcacatggagtaacctgaaaactaggatagaagaatttggtttcctctgtggagctcaaaggcacacgtaagtaacaatatatgtaattatgattctcaccatacttcatcttaccgtatttagtccgtacagaaacattaaggaccaccgtaacactatacaccccaccacttttctcttcatcataacaactactaaagaacacaccatcccaatcatcaaacgacatcgttttgttccccttaaaaactaccctcaaagcttttgtcgttttgtgtccttggtaaaaggacgccaaattaacgacagcaaacggcgtcgtagcgtagtaggcgcaggctctgacggcgtcgtagtagatggcgatcctagcgttgggatttgtaaagttgatattaaacgacatgtcgtatgagagtgaaaaagtagtagtattggtgtttgtgattggtttgaggtcgaagtcggtgagggagacgtttgtgacggaaacgatcacctcgcggcgggttccgaagaggattgataaaacgacgacgatgatgaggagaagtgagaagcttgctgctacgagaaagaagcagagttggaagagaaagcagcaaaagttgtttccctgcggtggaggaggcggtgggagatttggaccgttggattgggggtggattttaaccatggctcatggttattatcggacggtgaggagaattcttttatttttgttatgtttggccagcatgtggtatattatataataaaatagtttgtatttttgtaagttgtgtttttatattattataactctttaataatatttttaaaaataaaaaggtaaatattattttggacttgttttgtaaaagttattaattggactttctattttgtcaaatgataaaatagagtctttgttttgttaaatggtaaaaatagaacctaaattcaattttcaacaattttatttttaatataatcaactttaagataatttttaataagaacaaaaacagaaaatgtaattagttttgtcataacatgatcggattattattaagttttatttttacaaaaagtcggtttagggtcatatttgtacaattttaaaaaaatacagggtccattttattatttaacaaaacagaaagttcaattggtaatttttacaaaatatagggtctaaaataatatttagccaaaataaaattttataataatatggtctttttatcatattctatttaattttatcataaaacgaatctataaacttaataaataaatgcaaattaaatatcgtttacatttttactttaaaattaaaaatataaattattatataaaatgtattttattctattatttattaatgtcaaaaagataaaaaaaaaatatatatttaatttgtattaatttatcaattattatctacgattttatttatttcataacaaaaaattaaataaaatgtgacggaataactactttactatgaagttatatttcaaaagtattattaacaagcccgtatattataggtacacaatttgagtgtaaaaggtttagaaataaaaaatatgtactaattattttaaggtgcttctacaatacacaataattgcttgaacctatttctagcatattaaatttttttaaaattttcaaaattttacataatattttaaataattacgacgtacataatcataaaaaaatatttaaattattaattatcttgaaaaaaattagaataaaaaaattctcttatacatctaaatacattccttcaaaaaattatagggacattgttgcacttaatgttcttgtaatatatatttttgtaaaattctacaatatgcacctcttgaaaagggtgatcgatgtacttttatttgtttcagtatctagaaaaaaaatctattccaaactttttttatgattatatacgtggtagttatttaaaatatcttccaaaattttgagaaattcaaaaaaatttaacacaccaaaaatatttttctttttgaatgaaaaatcaacactttattaactaatgaacttagttaccaaatgaggtaacaaatcagttgggatattctccaaactgaaacgaaaatcaaggtgttatatagaggcttttacaaaggaatgagcgtccatatttgctgatcgttttacaaaatgaataaaaatatttctcaaagaacataataaaaccttacaatcattaaccaattgaccgaacatgaaaattataacaatagaactacgaatgacttgtatcatcaaaagacaaactatttctaaatcacgtgtgtccaccgacgatctgtaatccaactcaaagcttctctaatccccatcgcttctacaacttcaagtgttaccaaaccataaaacaactttgtgcagccttctaacaacataacacgtgtgcctctagccacatacctaacactatagctctaggcctcgttaaacacaaccgcattaacattaatcttaatactattatcgcttggagctacccattactcagccccttctactgatataaagccaataaacgataatttattacctaaattttgagcaagtctatattgttaagatagttttttgctaatgaaacgatgctatccgcaaccacaactttattttgtcatactctgtcattccttgcattccaaatggtccagcacaaagccaccaacaacttgattcgatcaacgtctagcaccatatgatacaccagttcgaaaatattgtttaaaaaatctattgtatacacatgattttttttttttttgataaatcaatgaattgtattgcataaaacgaatttttttacaacctatgcgcacccaaagagggccgggatctatttacaattgtataaacttttctagccacaaattttgtataagctctacaatgcaaaaaactaatctctatcattgctcttaatccttttgggcaatactctttcaatccaagacttgattgtccactttgtttcttctattattcggtccgagttaacacttgatttttgccaaattacatcatttcgggttaacacttgatttttattattattattttatacgcttatgaaatagacagtttgaacattaaaatttatattgtaaattattttgaattttttaaaattttaataaaatattttaaataactataacatatatactataaaaaaaattagattaatttttttttaaatgatgatacagttaaaaattgtatagtagaaccacccattttatattattttataattaatataataatatgcaggaatgaatttaaatctcatctatactgctctactcttaactagtaaagtccaaattatatgaattttccaaaatgttctaaacattcaatcttatccgttgctgtgactacattaataaatgtatttaacaatgttagctaatttaactcttatactttcaaaaagataaattaattcatgccatgtaaatagcaaacaaattaaaaaaaataattattcattcgaaaaaaaaataaacaaaaaattagcaaacaaattctgtgacagatgtcaactaccaacaaatttttaaagatctcttgaagccaataaatatatattatttacattatgttgtattaatttaataatagcaaaaaaaaagctaaccgtaataatagtaatatataggtgattaaatatattactagtaattaaaaatcggtttaaagaaaaagaaaactaaaaaaaatatcaactttgttatatagaaaagaaaaattccgaaaataactcagataaaactaattaactaaaaaattatgtacacaacattgaatgtggccatcctcaattttccaaatcaaactcctccttggattttccaatgaggaccataacattattattgttcatactcataaacagagccatagtagatgaacttaaattctccatatctatatcctcatcatcttcctcataaaaatcaacataacacagtttaattctctttatcttggatgattttttgatcaacatggagtagatgcttgaccacataattgtgctattgtaaacatccaccgattcaaaattatttgtgttgccaataatattaatattaataagatcactactatcaatctctagagtcttcaatgctcctttacatacaagcttaaaaaactctattgcacaattttttatgtgtagattctctaaacaatcaaccttcgatattataaacttagccatattgatatcttcaacaaagaaattcttcaatgaagggttactcaaatccaactcagtttttttgtcaatatgaagactaacaagaaccaaagtctcaagttttggacatgcagtcaacaaaattagactcaaattcaaaggtgagatagtgacataatttagtgaaagtgacttcaaattatgaaacttgtgatgagaagggttaaaaccaaatatgaagacaaagcttaatactaaatcttctaacttttgtgcactgcataatgtgttgatgaaattcatatttggtgttgttttagcactgtaatgaagttgtctcaatgaatcatgagtatgcatgagacaagcaaccattaattcagaagataagtactcttgatgatcatcatgatcatattccataacaatagacaatgatttcagtcctcttgtttggaatatagtttgggttattataacctcaaatatactagtatggaaattatcacgatacatgtttgaattgaaagaaagggcacaagtgtaatccttccaaacctttctccacattttacaagtggcagatgcaaccaccacatgtcgagcttctccaatctgatcaaagatctttcctacgatttccattggaagattctcaatctgtaatcatttaaattaaaaaaatcagatccaaaacttttagaagaagcatattttttatgtttgttatacatataaaataaataaattacaatcttactttattctccttctccctggcttgttcatatggagagactagtgccgaagaccactgcttattatggttcattggtacacaaatacacctactcactcgatatatgaattcaactcagtcctcactaaaactcaaaaagaaagagactttttcactttgagaactaaaaaaaagtggtaccatgatattaggtatagaaattatagatatttaatgtttagtctccgtaatttgtggaaggaaaaaaattacttaaaaaaaaaatacaatatacattatataattttatgttttaattttctttatatagtcggctagcattagtgta

SEQ ID NO: 26044 - DNA, 3257 bp, Cannabis sativa
tttttttttttttttatatatgtagtgcttttctcatttaatttaatctcccaagtcctcatcactatactttaaaagtgtgtaaaatcaaattttaaataagaataaataagggtgtattgctttggctcgatacttcatataaacaatataaatataaataatataaatggttaataagaaaagaaattataaggaaaaggaggtttggaatatatattggaattaataaaaatagagatctagaaggagaaagaaaggcatgcataggttgcagatcatcacatacattacttacttcgatccaaaggtccaatctctattgatcgatctatatctatacatatacattatatatatcctcaacttgtaatattggatcaatggaagttgattgatcgaaccccactgttttaattgatagtgcaatatttaatatgcctgctgctttcaaaatatgccccacatttaatttatatataatatggcaattagtaaaaaaaaaaaatgaatatattattgtggctattcttttctgagtggatattataatcctaaccaaagaaagtttagagatatcgttgaatcacctggatagtgaccttagtggctcaataatcaacatcatcaatatttctctctctctctcttttacattaatcccaaaaacacacacaaaagttttgcgtgaaccaacaacattttccaggctgcagtaactagctaatattgtatattttcatacattattttaagacgacgtagtacgctgcataattaatgcatgttacaacaatctaagcatatatgcgtgtatatatatatctactcatattgatattgtacctaaagctgaccggtataaggtacgtaattaattataaacactcctactgtttatttaattcaatctgcattattttgattacaatagtaagaatttcacattttggattcaatttaattcgcacaatagttcaaattcaatccgcaaaaatacgaattggatcggttattttaaattagttattttctttatattaaattatttaatatttatgaaaaaaatatgtattagttatgtctccaacaataaattaaaataaataaaataacaaatttaaaagaagaaaaaaatactatcaaaaaatagctacttttagtgacaaacttttagtcacaacataattttttggtgactaaatgtgacgtttcgtcacaataaaaaattacttgtgactaaaacatagtttttagatacaaattgtcactaatttacttttaatcacaacaagtattgtgactaaaagtacatttagtgacaacaaattgtaatttttacgactaataccttcagccacaggctttttagtcacaacataaaattgataatttataattagtcacaatttttacttgagtcacaagttttgttgtgactaaaagtaagattttttgtacgtgaaattatatgtataaagaaatgtttaatttattttttaaattggatgtaaaaaaaaaattatatataagaatagaatagccatttgatctattataagttttgaaatataattgtattatatgtattagacttttaaattgctattttttacattgaaatattaattgtatatataattttttaatttttttataaatatgtatgaattggattggatcgattatttttacacatcaatcactatccaatctgcacaagtgcagattttgaattttccaattcaatccaatccgcacaatgggtggtacttggcactactataatgctttttaaaattaatatagtaaggtacgtatataattaaaacattgaagtggatttgaatattggtagggtcagtttgacataattgtgctaactgtggaaaaaaataattgtaattgtgttgtgagaaaaataactataaatgagtaatggaaaaatgttgtgctaaatgtttagtaaattattaatttaaaagtgttgtaaattattaaaattttaattataataacaatgttataatatttatgataatcacattaaaaatatatatataattctagttaacaatagattcatgcatttggtttgtaattagcataagtttatgaaactaaaaaaatatctaatgatcactataaaatatagttttaaaacaaaatgaaaaattaaatattatttattttattataattaatagtaatttatttcatatagttttatttttaggaatatattatgttttaatcaaatttatcaaaattattttttctaaaaattgggttgtactaattttaatttctccataaatttatcaataagtgatttctaattgtttaccaaacatttttgtaacacaacttcttcagaaaacaatttttaacctttttaaaaattgtgttgaattggctattaattaatgcattataaactattttttcttatatagttttttactatttgaatcctaaattatgcaccgtacgaatttttaaaaaattaaagagaacttgctatgattacaataaagagtactccatcataaaaaaataagccacactaataaaatattttggtatatactttcgttatgttgtttgttaattaaatagtttgctacgtacctataacgtcatagaataattaattttattgtgtgtgccacttaaatttcacattagctaaaatagaaaaaaatatatatatttgtaaataagtaaatacggatctataacaatgggaagggaccttgttcctcccaagtttttctattgataaaaaaaaatagtgtattttttaaataaattttaaagaaaatttacatttatcctctaatgcataataacaatatttttattagtataagaccttttgaagagtgcttaaaaataaatctatgtgaattaaaacaatattttgagataaatattaaatatgatctattgtccaatttcccaacaaatttcatacattagtaagaatcaataaatatatataactataaaaacagattaaatgaaattgtataagaatatgatttagggaatcaaagttacgtgtatatatatattaggtgatataaatattattttgtgtaaataagatatatattatatgagtgagtatacatatatatgggcgggtggacagaaatgaataaaaggagatcatgcatgtcatgtcgttgtcttaagatttactaacatcccatccctgcaggcatatataaaaactcataataaatattacc

SEQ ID NO: 26045 - DNA, 7914 bp, Cannabis sativa
  modified_base (27)..(65): a, c, t, g, unknown or other
aacataaaatgttatttttgatctttnnnnnnnnnnnnnnnnnnnnnnnnnnnnnnnnnnnnnnnttagggcacaaaactcaacagtcttagtttgggtcctgggtgtgggtcctggtttgggtctactttaggatctctgtccggatccctatcttggtccgagtttgtgtttggaattgggtcctagatttaggtccaggttcgggtctcgttctcggtctaggtacacgaccgtgtccaaggccgagtttcggtctcgatttgggaatagggctaggtccgagtttggttttaagtttgggtccaggtcttggtcatggtactagtcttgtcccagggtcctggttcggtagttcttgttcaggtaccagttttgggtctcgggtctaggtttgggtcttggtttgggccctggtctaggtccgggtcctagtctgagtccaagatccaaacaccgactacatgtctattccaaggtccgtttctcggatctcgactcaagattagatccctctcatgggtctagcctagttctggttcaggtcgtgggtcgtaggtccgagtttgggttcgggatcgagactagggtctggtttaaattgcaaccctagttctgtaatcgagtccagttccatgtttgggtttgagttcgggtctgggttcgggtcctgagtccaggtctgggttgggattcgagtctaggtcccagttcgagtctaggtatgagttggactccagatccttttaggttatagtttttggtctaggtccaggtctggttatagttccaggtccaagtcctagtttcggtcccgttcgcaggtgccggtctacttgtaattttggttctaattttgggtcgcagggtacggttctggtctaggtttggatttgggactgggtttaggtccatgtttgggttcaggttcttgtctggtttgggttcggggcccatatccaaagacctagtcctagtctcggttcaggtttgggtatccgtctgggttttgatctgggttcgagtttgggtttaagtcctggtcttagacctagtcctagtccgccggttccaattccagttgttgtgattgtgagttcgagtttgggtttgagtttaggtcggggttcgagtccctatttgagttttggtttgggtccagatttcagtctaggtccgaatcaggctccgggtgtgggtttgagttctgtgtctgggtcaaggtctgagtttgagtcccaagctctgatcccgatctaagactagcttcaattcagggtcgaagtcctgggttctgatcccggtctgggttcgagtttaggtatgggtctaggtctaggtttgggtcttattctaggtctgggtgtgagtttgactccgggtttgtgtctaattttgggtttaggtccaggttcgggttcggtccctgtgtgggtctaggttcttgtcccagttagggtctgggggaggtttcgagtctgggtctaggtctgacttcagattctggagtccaggtcacgtcctggtttggatttgagtcctagattctgatttgggtttaggttttggggcctaggttcctggtctaggtcccccatccaagtctggttcctaggtcctagtctgggtccaagttcgggtttgggtcctgagtcaaggtcccggtccgggtaagggtccaggtttcactcccaatcttggtctgcatttgggtttgggtccctatcagggtgtgaatctgtgtctcgatctcggcaaaggtttaggacgaggtcaggtccaggtcccggtcaaagtttgggtcccaggtctcatgtcctagtcctagttaaggtctcggtccaggttctggtctgagttttggttataatgggttcggttcaggtctcaggttcgggtcctagtcacagttctagttctgattctgggtccaggtttggttccaggttagggtcttggtcaaagttggggtcggggttcgagtcttagtttgagtttgggtacgggttttttagatccatggctgagtccaggtctgagttcaggtcccaggttcaggtcttcgtctgcatctgggtctgagtctacgtctcgtgtttcgttcttggattaggtctagctcggtattttgtttttggtctgggtttgtatcgatgtctagatctgaatcccagtctcggtcaggggctttgtctgggtcttcgatcgagtccagagctcgggttcgggttagggttcgagtctcagtcctagtctagatacaagtctgagtttgggactgggtccgacctcgagttttgcggattggttatggtctagttctaggtgccagtctaggtccaggtcctgttctagggtgctggtgacgttctggttcaagtttaagtttcgggtcccatgtttgggtctgggtctaggtcctggtcttgctttgggtccttgtcctagtcctagatcaagacaccaactatgggtcttgtccaagccctagttcccgaatcccaagacaagatctggatcccaatcacggttcccagtcttgtttcggttcatgtcccaactaccggtcatggtctcaatctaggtctgagatcgagactagggtacagttctaggtctcgatcccaattgtaggtctcgagtcctgttccatgtttgggtctaagttgcggtctaggtttgggtcttgactcccggttcgggtttggattcaggtttgggacccaatccgagggtgcatatgtgtccgagtccagatctgagtttgggttcgggtcctgatttgggactggggtgaggttcaggtccaagtttcgatctcgattaggctgtgaggttgggtccaggtcttggtctcgggtttgggtccaggtctaggtctctgtcccatttcaagttcgggatcaggtcttgagtctcgatttgagtctaggtctcgatttttgttcgtgtctgagttccggtcccaatcccagtcccagtgagggtccaagttttgaatcccaggttcgagtatggtttaggtcccaagtcacaggtcctggtccaggtctaagtcccggtatgggttctggtctgagtttgggtttacgtttgggtcctgttactgtcccaagcgtgggttcttgtccctatcttagtttgatttcgattctagatccaggatcgggtttgagtccaagtcttggtctgggtacagatccgagtttgggtcctggattcaaacactgactacgggtcaggtcaaagcctcaggtccagattcggatcttggtcttggatctctgacttgttccagtttgggtcccggctcttgggccgtgtcctaagtttgggtttgggttcgggttcgaagttgtgtcccagtagtcaggtcctgggttgcgggtcagggtcgggtcccgtgtctcgtgtttggggtcgagttttgggtctcgttcccggttctggggccctgtttcaggtctaagtcccccatctaggtctggatccttcgtccaggactaggtttaggtttgggtttggggcccaggtccccaatctaggtctaaatcctaggtcccagtctgggtcccggtgccggtctgagtccaggtctctgcttgagtctgggtcggggtctcgatccgagtcccagtaatcgcctaggttcgggaccaagttttggtctaggtttttgtctgagttcaagtcttaagtttgggtcaaggttcgggtctggattcgggtccgggtctggattcgggtccgggtctgggtcctgggttccgatgttggtattagtatgggtccaggcctgtgtctaggttggggttttgggttttgtgtttagtgttaagggatttagggtttagggtttagtggtaagtgtaaagagtttaggatttaggatttagggtttaagggtccgcttccagtttcggttccaattttgggtaataaggtacaagttaaggttcggctgtgggtttgggtgcgagtcctggtctgggtttcggtttttgtttgggttcaggtctgagtcttggtcccaaatcaaaacaccaaccacatgtcgactctagttcaagttcctagtacgggttaaggttcttgtctgggtctgggtcagggtcgaggtccaattccaaaatttggacacctactgtgggtggggtccaaggctcgagtcttgggtcatgggtcccgggtccaaatccagatcctagtcgaattctagctcatctcttgggtccaggttcgggtcttaggtccaagtttttgtctaggtttgggtcttgggttctaagtcatgggtccggaacaccaatttaggtcaaggtcctaggtcttggtctgggttagggtcccagtccgagtgtaggtctcgatctgtgtttggtactggtccttgtctcgggtcttggcctggtctatctctaggtcataaatcagttctcaagtccagggtttgagcatcgggtcttgggtctcggtcgcggtcccagtcctagtctaagttctagtcccagtcctggtttaggtctcggtcgtagtttgggtctgggtcctagttttaatcttaatctgagttcgagtcccgggttcgagttcgagttctggtatgagtccgggtctgggtccgggtgttcgtctaggtctgggtataggtctgggtttcagtccatgtgtaggtttgggtcttcgtctggatttgggtctgggtgtgggtccgggttctcgtacggttcttggttctggtccatgtcccgagtcacgggtcattggttccgagtttttggtcgcatgtcctggcgcaagtcaaggtctgggttcaagtcttgatctacatatcgatctcgctcttggttcgagtctgtgttcggttctgcatctagatatggttttgggtcctggtctgattcaagttctagggtcctgattccggttcttgttctaattttgggtcctggtctagaaattgttcgacgttcatgttttggtaccattctaagatctaaacgccgactacgggttgggtcgaagccccgagtcgtgggtaaatatcccgatcccaatattgggtcatagtctcattccaattaggatctggggttccagtccgtgtccgtgtctgggtccgggtctgggaccgagaccgaggttgggtcttggctccagtcccattcatggctcccaattctggttttaattttttttttgggtccccaatctatgtctcggtcctaggtccaggtttgagtctccaatcccagtacgagtccttggtccgggtcttgcctcaagtccgtgtctgggttgtgtgtttagtcccaagttcagtttttatttgggttcgtgtcccggtctgggtctgggtgtgggtcctagttagattccagttctcggactcaaatccagactcagactcggacctaggtctggggtacgagtctaggtctgggtcagggtatgggtctgactctgggtctgggtttgtgtccgcgtatgggtcccaaatcaaaacactggctacgggtcaggtccaagccccgtgtccagatttgataacggtcacgggtcccagtcttgttcctcttcgggtcccaagtcccagtccgggtcctaggtgagggtcagtgtttgggtctgggaccgggtccgagtctaagacacggtcggggttcaagtcctggtttgagttttggtttgggtttcgatctcggtcagggtctgaatctgggatcgagtctaagtccaggttcaggtccgagtctcgagttccgatatgcgtcagggttagaggcccaagtttgggtccccaatctaggtctgagttctaggtcccaatcttggtcctagtcccagtttctatttcgattcagtgtttgggtttgggtttgggtccgggtcttgttcggggcgtgaatcctggtccgtgtcttcgttcagctcaaggtccaagtctgaatcctagtttgggtctaggttcgagtctaggtccaagtttgggtgccgagtgcgggtttagatctgggtccagatcaagctctcggtcaagatataggtcctgagtttcgatcctggtctgggtctaggtttgggttcgagtccaggttcgtatccagatccctatcttggtctgactttgggtctgggatcgagtcctaggtctaggtatgggtccgggtttgggtcagggtctcgctcacgaactagtcacatgaccatgtctggacccaagttcgagtctcggtttgggtatagggcgaggttcgagtttggttctaggtctggctctgggtccttgtcacggtcctagtcttttttgagggtcctggtctggcggttcttgttcacgtttcagtttttggtcccgggtcaggctcagggtccaggtttggatcttggtctgggttggagtcctggtctgagtctcagatctcgatccctgtcacgtgtcccagtctagttctggttcaggtcttgagtcccaggtcaaagttttgattcgagactgagatttgggtgtggttctaggtcccggtcccagttttgtgtcccaagtttggttacatgtttgggtctgagttcgggtgagagtttggatctcgagtcaaggtctgggtagggatccgggtctgggtcctagttcgggtctaggtcttggttagagtctgggtcctggtccgactacgggtccgggtcaaggtccaggtccagttacgtttccaggtccaggtcaaattcctggttcgagtcccattcccaggtcctgctctacttccattttcggttccaatttcgggtcacagggtacgagttcaggtctaggtttaggttttagactgggttcgagtccaggtctaggttcgggtccttgtctgggtcgggtctggggctggtctcaaatctagacaccgactacgggttcagtccaagccctaagcccagattcggatctcgatctcgggtctcggtcatgttccattttgactgccgggtcacgagctgggtcctaggttcaagtcaaggtctgggtcgggtcttgggtctcggtccttgtttcgctacccaagtccctatcctgattctaagtctaggtcctgtctggtctggttttaggtcccgatctagttttgggtttgggtcatagtcacggttccggtttcggtcttggtctgcgtttttatttaggtttgggtcttggtccttgtcctggtcctagtcctggtctggttctagttctagttacgattccgagttcgagtttgggttttagttcgagtcggggttctggttcctagtctagttccacttcgggtcccaagtctcggtctgtgtcttaggtcagggtcagggttcatgtccggggtcaggtctttggtctcggtcccaatttttttgtccgtgtcccgggtccaagtcccccatccaattccgagtcctgggttttggtgcgagtctatgacatggtcggggttcaactcgtggtccaagtttggatttgggttttgatctcggtatgggtcctaatctgggctcgagtcttggtcatgttttgggtccgagtcttgagtttcgatatgcgtctgggtttgaggcccaagtctaggtccctaattcggttctagctcctaggtcccggtctgggtctatgtctaggtttgggtcctattcccaattttgattttgattcagtgtctgggtttgggtttaggtccgggtcttgtttggggtctgtgtcctggtccgagtttgggtttggctctgggtccaagtctatatcccagtttgggtctaggtttaggttaggtccgagtgcaggtccaggtctcggtcagggtcagggtcatggtcttagtctttttcgaggatcctcgtctggcggttcttgttcaggttccaattttgggtcacgggtctaggtcaggg

SEQ ID NO: 26046 - DNA, 7275 bp, Cannabis sativa
  modified_base (1896)..(1901): a, c, t, g, unknown or other
  modified_base (1932)..(1936): a, c, t, g, unknown or other
ttcaatctcctctgtgccagtgatactaggtttttcaaggaattggatggggattagattagccttatcatttatgttgctgctcgcgagtcgggctaatgcaacagtagttgtgttttcttctcctgggatttgcttgagggcatagcttttgaattgtgtgagtaaatcatgtattttgcttaggtaggctatcatcttttctcctcaagctttgtaatccccaaatacatgatttactactaactgcgagtcactacagattgcaatgtgatcgacatgcaattcccgagcaagttttaggccggcaataagggcttcttattcagcttcattgtttgatgccttaaacccgaacttcacttccccgtgtagatgttgccccccaggaatgacaagggcaatccctgcactggacacttgatccgtggctgacccatctacatttaatttccatgttggttcatctttactattgctcggctgaggttcttgtactggctccgagttatttttgaagtgttttcttcttctcaactacaaaatctgctaaggcctgccccttaatcgatttttggggctgaaacatgatttcatactggcccaactccactgcccatttgagcaactatccagaggcatcaagttcttataaaacttggtgcaatggttgggcagtgtacacccaaacaagatgagcctaaaagtaaggccttagctttctagttgccaagattagccaataagtgagcttttctatcaacgggtatcgcccctcagctataatgagtcttttgctgttgtagtaaaccgaatgtttgatattgttctcttctatgatcagtacggtacttacggcatgttctatgacagccaggaatattcctaattcttctctgtccagaggttttgagagtacagggggttttacgagttgcattttaagctcttgaaaggaattctcccattcctccgtccattcaaattgtttgtttcctcagaggatgttgaagaatggaacacacatgttcgttaactttgagacaaatctactgagtgcggcaatttgacgaattaaaatttgaacttccttggtatttgtaggcgatttcatatccaggagggcttgaattttctctagattttcttcaatacgtcgggcattaatgataaagccaagaaacttacctgagctaattctaaaggagaactttaaggtattgagtttcatgtgtatttcttgaggactttgaagcactcatccaggtcatctatatgcccccagccttcctggatttgacgagcatgtcatccacatatactttcatatttcgttcgatctagtctttgaacattttattttccaatctttggtatgtagctccggcgttcttgagaccaaatggcatgaccttataatagtatagacccatatctgttcataaacttgtatgttcatggtccggtggaagcattttgatttgattgtaccctgaataggggtccacgaagctcaatatctcgtgtcctgctcttgcgtcaacaagttgatctattcttggaagtggaaaacagtctttggggcatgccttattgaggtcagtgaagtcaatacatactcacctttttttgttcggcttgggcactagtacggggttagctacccaagccgggtagaaagcctgaattatgaaattattgttgcgtagcttttctacttcttcttttagggttaaggctcgttctttatccaaaagtcttcttttttcttgaacgggccagaagtttggatcgatgttcagggcatgtgaaattatagaaggatcaattccgaccatatcctcatgcgaccaggcaaaaatttctaggtttgctcttagaaattttatcagagcnnnnnntacttcaagcaacaaaccttttccaattttnnnnntcctggtcggaacatttgggtcaatttcaatttcttctaatccttccaccgacccaacatttgtatttggttccccaagtcagggatccacatcttcatccctgcctttggcggttccctatttggcaatgctcttccccttgtctgaattctgacaagaggattcttcctttttagcctctgttagggcaaggttgcaacattctcatgcaactggttgattccctcttaggcaccctaccccgttctttgttgggaacttgacgcacgaatgaaatattgatgtaacagtttttaagtcatataaggctggttggcccaacatgacgttaaacgctgatagaacatccaataccaacaattgtaccatcacagttatgctcttcgaagcttgcccaatagtgaggggtaggaattcaccctaaaggtgcaacactctggccggagaccgtaaacgggctggaggcaagggatcaaatctttgagttggagccccattttttcatatgatgttttgaacaagatattggctgaggcaccattgcctatcatagttcgggccactattttgttagctaactgtacttccataactaatggatcattgtgcgagaagcgaaccttgacagcatcgtcttcattgaacgttatagtgggttcccctacccgtggtatttttggttccctttcttctacggccaggatcacttctttttgctcattttgttaggttcgggcatacctttcccgagctttgctcgaatctccagctatatgcgagccctcgatgatgacttgcaaatgcccgtctactggtggatgcagtaatacatcttggttatattttctgtctgggcaaccctttgactctagtcagtcttaacatatttttgtacatgcggattattttttcttatcgtgaattcaatttcccgcttcaaattgttacattcgttggtgtcatggccataatccccatgaaaacggtaaaacttggacatgtcctgcttagttatgtcctttttcatgggagcaggtttcttgtacgaaactactgactaaatagccatatagatggtctccaaatcgtccgtcaggacaaagaaagcagtgaatttggacgaattctctctagtggtctgttcggctttccctgtaaactttccctttttcccattgccttttctgttgttattgttagatcttttaccgctcgagctttaactactagtgtactgggggttttgaatggatgtctgctcgttgaatggcttcttcaagcttgatgaaaccatttgcacggtcgaggaaatcactcatagaatccaccagaccacttttcttgatgtctttccgtagctctccgagaatctctatgcctcccactatggcggctaatttcccctcttcaattaatcacaccacttttgttgcttccgtcatgaatttacttatataagctcggcgaggctctcttggcctttgcttcactttaaccaggtcttctaaatgtaacgagagttggcgtgaagaagagaattgtgcatgaaattctgaggagaaggccttccaagagttgaaccttcctagtgccaacttgaagtacaattgttgagtggcttctgagagtgtggcaggaaaaactctacaacgcacatctcctcgtaccccttgcaaatccattttcatttcaaaatacttgagatgtgataagggatcttctttcccagtatacatcttctaggtcggcaacttgaacttgtggagtagctctagaacattgatctctggagtaaatggggatccacgtgctcggtataacttgagatcattgagcttttgacccgccaggccttggaacatatttttcagttcattcaactgtgtttgcatagatggatgaacttgttcggcctcttgacagatcagtgtcacgtcaggagagctggatcttgaatgcagcccctgggttgagtggctagttgaacatattgtttgtctaaccctctccttctatttagatcatctctaagatcatgagttattcccagtctattgaatactaaagcaccaggttgcctcagtgtctggttggtttggctgagcacttggccagaaccgctggtctaggcagagttattaggtataaccccacctgacgaattaccagataaggtatggccgcctaccacttggcccacaggtggagtctatgattaaggattggacggctgaccgttcagagtttgggcagtatgcccatctagatttttgtctgagctacccagcaggatgttggatggaggttgctaattagcaacttggtaggctcttcgtatcagtacggtagcctgtcttgttcggtcgtcgatggctgcttgatgagccttcaacgtttccatttctttatctccccattcggcgaacttgcaccttttctcttcgaacacatggttcattgcagcaaggagctcttcctgatcatgatgcaaagtattattatgaccttgcatgagcccaagaccactgcggaagttctggatctcggtatcatctccaatggctgtctggacatttgttgctgaagggatcctagtgctgggagtactcagatcggctgctaaattggtgtttctagtctcttgcacatcgggtgtgattccagccaaaggagacgtcacaccttgacccgtggtgggtggttgcgtgattgggtgtacaagattagtggcttgtgggacccttgcattccctggagtctgtagttcgagatctactgctaatagatccacgtgatcgaccatgcctctatgagtttgtaccaccatcgtgtttatgatcaaacttgaagtaaagagcaagtaaatattattgctctcaatgaaagcaccaaaatgttgacctcgcttttagcaaacgacaatgagactagtaataagcgataagaaatatgattttatgtataatataaaaaaataaataaagaacacaaggtttttaaagaggtttagccccattcagttcggtaatagcctactccccttgatttgtattaacttaagagcaaagaacacaatgtttcctctcttgaagctctcacaatgaaatctccgagtatgctctcttagatttctctagtgtaattttctccacccttttactagtgagaatggatcactatttatagggctacatgcttgagggaaggtttcccttttgcttacaatgtctataattggtaagaacatatactacgtatttagaatacacatattgtgggatttggacagcttgccatatctttgtgacacgatcctagattgatagggattactcttgtgcttcaggatgcaaattttgaaattgctaagtgttgatgtgctgctcggattatccactgctcggctggaaagacatcgtccgtgcaggtgtatgttgtgccctgcccggagcatctctcttgggcggatatggggaatcaggtccacgtgtcaccagcatgtgctgccacatcatagtgcaaaaaatgggataacatttgccccccaagtctgtacgggacttctgaagttgtgtgtagacttcacccgagctaactttacatttgaatgggtgacacatgttaaatgagtccgttcgtgattcgatgtgattctgactaggagtccctttagttttcggctaattaatgctttgattgattcgttctttgagacgggcccttcactcacacgcctttgacgattacccttctctagtacttgattgcttttaatttcccaatatttttctttttgcagggaaatcaaagcgtttgggtttgaattaattacaccctttcacaagttggcttataaatagggctgaaaattctcataaattactcttaccacttttctcactaagtaattttagagcaaaaagagttttctctctcgaatctgtcgtgggattctagcagaaagatctgaacagcttcatccgaacaacaccaaacctataaacagtgagtaagtttctcatttttttctcctttaattttgtgtcttcgattttctgggtttccattgtaggaaatacaattgttcttgatttgttttaggagatatatagaaaatctaggctgagacttcataatttttactatagtagatcatactactttgttgtttgtgacattttgaagttaacctcacaatgttcgatcttcactttgcccactcaaggcttagtgaaaattaacccttaactcaaaaatttcaaacttctgggttacgaacttaatctttacacgtttttcatcattttaatctgccaagtgcacctggttggtatatttgcttgtttttgttcgatatcccacccagatactcatctcatgtattgtcttttatagatgaaccctggtgacttttgggtaggcgaacaccatatcgatcaggatctgcttcagcttctatacgagggagggagtggctcgacctccacgctttggaggatacaatgagtccggggagcctgtatctgagctgggtgacgtcttggtcgagggggaagactatgtcacccaagagtttaccgaggcgatcccccataagaggcaaggtgccttaggggccagatgggtgtgtccttcatccatcgtaactgagggacacttaacaaatttggagaagactggtatctgggcagacttgagtgcttcctcccttctccaaatcatcggccaacaagtcggaaagtagggtactgtgcctggtcgggtgcccacacgaaaaaaatggcgatgctgcctttgcacctgtacttcaggagggttgcagactacttccacctttgtctgacccagttcacacccaagggaatcaagtacttatctgccatgttcgtcctctacgccattcaaggatggggtgtgccgtctctgcacgaaatcaactggctctttgatttgaagtctaccgccaagtagagaaggtcggggtacttttacttctctcagccagatgacaagtggctgacgggcactgtggatacgaaggttagctaaattgggcattttgttaacgagtactactttgtggccggcatggagactgctcatactcggtttcaaagaattctccaactgcaagaggctgctcggaatatcactttgttgaccacagatgccaactttgtgaagtaccagctttacttggtagattttgtacctaagtccgtgaaggagctgaggaaaaagtccaggccgagccaggttgagggagttgagttagagaaggagctcattcaactaaagtgtgaggctaagttgatgttggatatgattttaccaggat

SEQ ID NO: 26047 - DNA, 2698 bp, Cannabis sativa
tcttacagctcagtaattttataagattttattagttgccgaaaatctcggtcaacagttattaatttgattttgagattgacatccaataaccgatcaaatttaattagaatctaatttttagcactcaatccaatccaatccaattataattggatatctattgacgcttcaacatgtacgtcgaaaaaagtactatttgtcgtcaaattaaaccgtcgacaaaagcctaccttcaccgtcatcctatacgacgaacccaaagttttagtagttgtaacgaatttgataaatttcaatattaattattatcacaagtttgtagttaaattgtaatttttgtttcatatttactttttccttttaaaaaaatgtatgattataactaaaattaaaaaaaaaaaaaagaaaaatcaaaaaatttttttaagaaaattattcttgttgatgcttcaacgtgttatgagaaaattattttcgtcgacgattcaacatgtacgttgaaaaaagtaccattttccgatgcagtaagccgtcagcaaaagcctacctccaccatcatcccatgtcaacgaacccaaagttatagtagttgtaaggaattttgtatatttcaatattagttattgtcacaagtttgtagctaaattgtaattttttttcaaatttacttttcattttaaaaatgtttatttgtaccgtatgtccctaaactatataggttttggcaagtttgtccttaaactttattttgtgacagattggtccccaaactatacatattttagcaagtttatcccaaaactatatttttagtaaattggtccccaaacttttttattagcaacattaaccccccacccttaaatatgaatatttttattatatatatatttttaatttatttgactttaatttatttttgtgatatatttaaataatttcatctttttaattttaatactttgataaaataattatattaatattttttttgtaagtattcatataatatataattttttatcaaaatatttaaaatatgcgttattcatatatattattaataagaagattaatttgcggcataaatactgaagtttaacttctagatgcaataaatgcttaagtttaatttttggcgataataatacctattatggagcttctataggtacctagatgttaagcattaagtaaattatcacgtgacaatcattggttggtctaggtctttaatttttttttttaaaaaaatagtctaaatataccaataaaaaattgacacgtggataatgacttgacattcaatggttagatacatacggagttctaaaaatataacttaagcatttatttacaatcaggacttaaacttaggtatttatgtcgtaaattactctaataagaaaaaagagaacaaacactggcagacctatataatgcctagaagaaattctagctccctcttgtttttatattttaacatttatagtatattttattactaatttatgaatatgtagtattataattttaataattttttttgattgtatatatatatttattaattattttaattttgtatcaacgctagtaaaatttcataagttcgttgctgagtataagttaaatatacttttattattttattaatataattaaatataacattaattataaattatttatactttttgttatgttacataataaattaattacagaattattattttttgagcattactcttagatactagagtacctattttacaatatattaaaagttgtagtagaatattaaaagttgatgcacatatattacaaaacaaattgtgtcacatatagcatagttttatatctttcattagaaatagtcttagagacttagagtgtctaagatcttatattgctgcaatagtacaatgtaaataaatactaggcttacatgtttttttttaaaattaatttaattatataaaatatattattttattatactactaacaatattgctatataatatcttattgcaagccgggccaactctctttgtgtttgtgatgtgcacttaatataaaataaattttgagaaatgttaaaaacatttaatattgcactctcttccacattctttttataaatgagtgacatatgtaactttttaaaatatatttaagtataattataattatactcttttttttacttttcattaataatttaatgagtcatctcatttacttatttatttttttttggactattttattaattttttactaaataatatacactatgtttctttcttgtatttttttttaataatatatatgtactatattatgttataaaaaataaaaaacactagctctttcttttttttaacaaattttgtatcagttttttttttcatattgtaatattttttaaattatttttttatttcatgtttgttataatatatatagaagatttataaataacaaaagacaaaaaaaaaaataaactaaatataattatgcctagttattagtatgtgttagatcgatttatttttattttatttttttaattaaaaaaaattcttttcatgaataggcaaaaaactaattgatttaacgtatatatacatatttgattagagataaatttgaaaataatttaagggaatataaaaaaacaaaaaaaa

SEQ ID NO: 26048 - DNA, 2180 bp, Cannabis sativa
  modified_base (341)..(341): a, c, t, g, unknown or other
  modified_base (2151)..(2154): a, c, t, g, unknown or other
ggtaaaagagttaattattaagtgcttcgccttgattacatgcaatagggagattgagataattgactgcttcagctttatctgtgggattaatagtttgattggaaattgaaattttattcattaatatgaattatgaatgattattgagggtgacaaattacctttaactagtttctctagtctcaattttaatttgttattttatttttatttatgctattttactctaaacttcaaaaccttattttcaaacttttgtcactaatttgtgaataattaaataaacatagtcttcttgggatcgacccttacttacaattatactaaaataattggangtattggaaataaatattagtaaatttgttgtgacttacgacatgcatcactagttctttggactggatcaggtccaaggtatctccgttcactagcttcacccaaatgaataggcgaaggacattgtcttccatagagcatttcatacaacgccataccaatagtactctgataactatttttgtttgaaaactcaatcagagaaaggtacttattccacaaaccttcaaagtccaatacacacgccctagcatatcctaaagtatctgaatagtcctttcagactgaccatcagtctgaagatgaaaagttgtactgaactttaatttagtacccattgctcgctataaactctcccaaaacttagatgtaaactttggatctcgatttgagatgatcgactttggagcaccatgaagctgaactatgtccttgacatatagatcagcgtactgatccactgtatacgtagtccacactggtaaaaagtgagctgactttgtatattgatccacaattacccaaatggaatcatagaaccctattatttttggtaatccaaccaaaaaatctatggttttttcctcccatttctactcaggaatcttcaaaggttgaagtagtcctgttcgtctctgatgttctaccttgacttgctgacaagcaaggcattttaacacgtcttccactatatcactcttcatacctggccaccagtatagggctttcatatcttgatacatcttagttgtccccagatgtaattagtatggcgtggtatgagactcgtttagaatctcctgtctgatactatcgtcaactagtacacaaatcttgcctttataccgcaataacccatctgatgagattgagaaatcctttgctgactcaacttcaaaccttttttatactcttgtaatacttgatcactttgttggtttgtcttgattccctccaactaattagactgtaacgtaatattgccaatttcccaactacaaactcaatccttactttggtcatatcctcagccaattttggtgcgatcttctttatttcataaacttgcttcggagctttttgacttagagcatccgctaccacatttgcttttccaagatggtaaaggatctcgcagtcgtagtccttaatcaattccaaccatcgccactacctcatattcaaatctttctgagtgaaaaagtatttgaggctttagtgacatgtgtagattttgcacttttcaccatacaaataatgacgccaaactttcaaagtaacaactaccactaccaattaaatatcgtgtgtgggataccattgttcatactccttcagtttcctggatgcataggcaataactttaccagactgcatcaaaatgcaacctaaccattattttaaagcgtcgagtaaatcacgaatttctcatcactgattggcaaggttagtactggtgcggtaactaacctctgtttaaactcctgaaacctacttttacacttgtcagtccaaaaaaaacttatagttctttcgagttaattctgttaagggtgtagaaatcttggaaaacccttaaacgaaccttctttagtatcctgctaatcccaggaaacttctaacttcagttgtagacttgggtcgaggccaatcctgaactgcctcaatcttcaccagatccatcaggatgccatttttgttaacaacatgccctaagaaacttacttggggcaaccaaaactcgcatttcttgaatttagcattgagtttatgctccttgagacgttgcaactgttgggttttatgccnnnnataaaactctttacaatctgattagt

SEQ ID NO: 26049 - DNA, 2291 bp, Cannabis sativa
aataatattaaatatacaaaaaaagctgatatttattaattgaaaaaccatataataagcaaaatgcatataaaagtttacaataatgcatgaacagaggtgagtaggggtgtacaaaatatgagccaagtgacttacggtgataacaacggataagatacggtgagataacaggtgaaatatgatgatgataacgagtgagatttaataatgacaataacttaaaaagatcgagatataaaaataatacattatgaagaacacttcaatttttccctacaccatcatatttacttatttttataataacaattttttttaaaaaaaaaaataaaataatttaaaattctatagatatatatatggattgattgtaagttttaaactttcttaataaaaataaaaactaataatatagaattagataatataattttattgttactatacattggaaaaatatttttattatcggattaaaaaaatattaaattagtcacgcaaagaggagtaattatcagattaaatggtattagcgaatataataattaccaaaatttctttatttttttcagaaaaaaaaaataaaaataaatttttaacttggagtactaaaattaaatagcaaaatttcaatcaatacactttatttctattttcgttggttacaaatcaaattaattaagcggataatttactagcattcttaatttctaatttatattaattggtcatcataataataaaataatattttagagatatttaatatttaataataaaagtcaatgagtctatataagaaaatataataataccaatatggaagaaatttaataaccatacaagaattagtatcacaatttaattgatacatatcaaataaaaataaaaggacataaataaagaattattaatggggagttctatttacacctaataaaatgataaatatatcccattattaaaaaaatatatatataaacttaaataatttttaaaaattattcttaatattttttaaattttttccttcaaattattttatgttaatttcaatatttattttgagttcattttcatatttttttttaactcatgtatatatattttaattttttcctaaaaaaattttatattaatatttaaaatataatttatttttgtttgataggtatattttttaaaaatatgaattggttagaaaaaaattaaaaaaacttagtacaattaaagatttaaattttatataaaataaaaataaagtgtgtttagaaattttgggggtgtagctaaaatttcctttattaattgatgaaatacaataatgtctgttaaattctctcttcaaaaattaggaaagttatactaactgtattttatatattgagaaagatatatatatcgatcgacaaaaaaaataaaatatacataaagatactacagaattatatttaatgaatatcataattaccaaatttcctttatttctttcagcaagaaagcaagtaataaataagtttctaacatggaataatcatcgtccaaaattaaatgggaatgggccttctctctcgtgtgggccggtttctagtaatatttctaaaaagggtgggcctgatttggggataggaatggataatcctaatcctgcttgtgggctacaggggtcggctttagtggaaaataaattggctaatggggttgggcctatcccatcttctcaaggtaatgatgggcttgtggggacttgttcccctttgccaattgtccctctagaagccgtggacaattccaatgaagaacaagccttggctcaattttttaatgctcaagaaagcttattgtatgacctcaaacattttgggaagctggatttgtatgaaatacggaaaataggtggggacattggggtcccggcctcatctgaagtcaatgagagaacgactccctttaagaaaagaaaatttgaagcgtccgcctcgctttgctctagacctcataaagttcagcgcaagtatccggaagttgttcgtgattttccttgggacacaccgaaaaatgctaatgatgatgatgtggtttatgacgaaccttctgaggatagctctagctccccgagctgttccggaattttgaagaatgccctggttggttcctttgtaattgatgacagtgtatcgagtgggtctgcttattcccacaaccctgtggaggagaatgtcgaatctcctccacaggagccatgagaggtattgcctggaactgtagagggttggggcagacctcta

SEQ ID NO: 26050 - DNA, 4438 bp, Cannabis sativa
tctttattgatattgaataatagagattacattgaaatgtagttttatttagggcataaaacccaacactaggagggtactatccattaagaattgattgcattccaagagataacatgattagtttttttggaaatgctcatatttgctctaccacttgttgaaagaaatgagcttctgaattttgttggctgtgtgttctccaagatctggcaccaaaggaatgctctttgtgtaaggaacactgctgctaatcccttcttaactcttttaagaatcgacaaagcagcctgggaaatgaagaatttgtgtgctacaatgtgggggacaccagagaacatgtttacgaccctgagctagttgctgaccagggagttgtaatgtgcccgcgtgaagaggaggtgaatcacgtcatttttattaatgcgtcctggattaatggagatgctggggttgttgcagttggagtggatcgttaaaatggaagttggttcgtcaatgctcaaaaaaccaattcacactctacacttgaagctgaacttaaagccatttttttggccttgtcttgggctgttgaagttggttggcaagaggtacacatcctttcagactctatgttagcagtcaaagctttagctgatgaaggaaggcctcatgagtggaagtctgctagtattttcttttctatagttaatgtgtcaaaaaaactcttagtgtgtaagttcttttttattaatcgtagtttaaactctttggcggatgggttggctaaaagcgctagagtcgctaatgatcaagccgttttgtatcaaggggagggaatttctcttgtgattcctatctatttttttagttaatgaacttgtggttcctaaaaaaaaaaatacaattagtctcaaaattatattgacattggcatcgagatcacataacaaaccgtttatcggcatgcatgaatgtgcataaattaaaaaaataataaatattatatcatctaacttgtggttgaacaagaaaaatgcttattatttttctttaagtagtaatatatcataataaagaaaattattctatatactatttctttacttttttttttatttttaaatattaatttctctggtagtttttctggtggtttctatgtaaattgctatacgaattttagttgcgatttaggttgctccgttaatttctatggttctatatggaatttcgtaaaaatacaaaaaaaaaaaaaagagaaatgctaaggggcatcagtggtgcttagctccctcctatgtgtcaatatcgctattggtccaactaagtataagaccccatatagtttaatataataacttttagggagtattgctagccaatcgcaacgggatatgtcgagaaggtgctaggcaccactagtgcctaatagcaatgctaaaaaaaaatattttgaaatgtaaaaataaaaaagcccctaataatagtagtaaaccatgtgtaggcatgccaaaaagatccatttagttggagcagggagctctgatctgacggatcactccatctgaaatgttcgaatacttgttggatctcggatcatatttgctccgccacacctaattttttttagattagatctgatcacatacggtttcaatatattaaaaaaacttaattcaagactcggattccgaacccgaactcgaacatgggaccatacctggacccagacccggatccagacccagacccgagatccgagatccgacatctgtgcctggacctagacccagacatgggaccaagacccggacccgaccgggacccgagacccgaactcgagatccagaccgagaccgggacccagacccaggactaaggactcgagactcgaacccgagacccgagacccgaacccgagactcgggacccagactcagacctagacatgagacttgggaccaagactagtacccgagtcccgagacctgagcttgggcctgggacctggacccgagacccgaactcggactcgagacctagacttaggacccgggacccgaactaaggacgcagaccggacccgagacccggaccgaaacctcaacccgaacctaacctgtagttggtgttggggtcgagtttattaaaaatttattatctttacacaatctattaatccaagttaatactaaatataatattgtattaactaataccaatgtaaaatcaaaatggatataaaattataattttagatataaaattaaaattctaaaaaaaaaaaagaagtcgggtcggattagattcgatccgaataaattgggccgaatctgatccgatcacagatcatctctagctgggtggggcgaagcaaatcctcatataatttaaatcaggtcggatcaaattcagcctaatccatttacactcttaatcatgtgtgtattttcaataatcacaattcaattattattcttttaaatgtagaggatcaatcatataagtcggtggtatatactatatattaaaatgcttaaaatttggttgttattagccaattccgtttctaataataatttaattaacaaatagaagaaaaaataatttgtagtatgtttttatgtttttccccaaaagaaggttacccttttttctttttaaggattaatttacctattattctgaaccaaaagacaaaatagcaaaagtttagtagaaagcacacattctgaaatttaattaggtaaatattttggtagacgagggatacctcacaaaggacaaaatcaatcacttttttaatctgtcaaaaaatgtcatcgtcctctacaaaatcaccaccgtgaattccacgatgtcgtatcttatccgtcacatccccacatatatataatgagccttgttattgaaggatttttttttatttaagcgtttatatattatattaacataatttcggactcgaacccaggatttccacttgaactagtcttgttattaaatattaataatgcttaatactttctacacatgtcaccttattattagttaacgataatttataaaattattatattaaattatatgaaatccgatatttaattgtactaatatcgatattaatacgtaggagggtgctacataccaataatatactttagcatttctcatatataatgagcattgcttacgcctaatattatagtaatgtgacgcattatgagtgattagtaattttttatatttttttattaaatcaaaatatataagacttggatggaaattagctaatggggaagagtcattatggacaagagtcttctgtgccaagtattgggagaatggccttaactccttttggaactccgaatctcccaaatccttatcctttggagctcggagtatactagcttcccgagatctcattcgtaaagaatcgtgctttcttattgctaatgggagatctattaatatgtggcatgctccttggattccttggttggagtgggatcaattccgagctgccttcaatcctatgatagtcccgaattccactttggtttcttctctcttcaatgaggatagggagtgggatttccaactttctgctatttggatggtcccaagtgtagcaagttctcttaatttgattcctagacttcccaataaccatgaggataagttgatatggaaggatgcgactagtggggagttctcaactcgagtggcctataagtcaatcatcaaaagtcgaagggccgaaaatgatcctatttggggtcatatctggaaacttaagatctcggaacgtatgaaactcttcctttggaaacttgggagagatatcttgccttttggagaaagacttcagcgtatttttggcaacgaggtgatgtgtgctatctgtgatgaacaggaagattccgcggttcatttgttttgccattgcccgcttgctaaatccctttggttggcaagcccgtggggagtccggagtgaagaactgaacctctatagctccctgcagctcttgaagtggttgcttgagcctccccctttgttgcaacatggaaactttgaggtggaggaattcagaaagtttggaatctctctctgtttcactctctggtcagtgaggaatcaagcttttcacgaacatgttcgaccctccttcctcatcacctttaatcggattaagagcttggtcgctgagctcaattcggtattcatctctcctcaggattcttcgattgaccaatcttctctggatgctggtctggaagtgttgcagggagagtttgtggtgtttgttgatgctgcttgcaaagatctcaggtcagttgcgggaatcattgtcactaaggctaattccgaggttgttgaagccttttctgctcaacttcaggctgttctacctctggaagcggaggcttgggcgcttcttcatgcg

SEQ ID NO: 26051 - DNA, 2641 bp, Cannabis sativa
cttattttattattttagtactttttggttttgatttttattttcttttatttataaatagagcaagaagttcttcaagggtgcaatgtaacaggaagagaataatatcatcaacaagtaatgagagagtgaggaatccgtactattttgatgattataatagtaagttgttgggtttgggtttgggttgtcatgatcatcatcatcaacctcagcctcatcagcctcagcagcagttgtttaagggaataataaaagagactcattcctcaccacctttctcactgccacacagtctttacaacctcaatcctttcaaatatgcagtccaagaatctgatttctttaaggtacaactttttttttttcttattatacatacatatatacatatacatgtttttgtcttcaaatgggtttttgggttttcctagttttaatctgaccatttatatatatatggtgaaaaatgagtacatatgtttatatatatatatatataaataaatggtcgatcttgtgaattgtgacaataatgaagtataatgtatatctttggcgttaagttattaagttctcaattattcatcaaattcccttttgattttgattttactttttattattattcacttaaaagagaaaactttacaagattcattaaacgtgttaataagactatagtagtgtaaaaatatgtactaataataatgggtaataatcctatgtgactaactatttttcttcttctagtgttttttttttctttctttttaatgttataatcttttcttgggtttagcaatatttctctacaaacaaatattaatactatagtatactacattcctagaaaatggttggcttgcttgcacagttgattctctgaaaaccttttcattatattctttgtggtccttaacttattattacacttactatacactcttgtaggggacctgtaatactctctctctatatatatatatcctttatttataaatggctggccaaattggaatttcacacaagtccctttaatttatgagtctctctctctctctcttaccaaatagtacgtaattggatgaatagtctttggttagagacaaatttgaacgatttttctcttttgtagactttgcagtagtagctcttagcttagtacgtaaattcaattatatttactgggccccgcccataccaatacccattttttccttcttttctaacaaatccagcgcccattttggtagtccatacgtacttttatgtcattatatagatgcctatttcacatgttttcattaaataaatattatttaagatacgagcaaacactataaaaaatcatttacttttagctacaataaatttttttgtgactaattaaaaattacttgtaattaattatagggttatatatatacaatcgtaaagtgtgttgggcaaagagcaaagtagcaattctcttcgaattagcatttgtatttatgtaattttttatattacttattaaattaaaaaatataaaattaacttgttatatatttttgtaggctaacaagctaatggatcgaagttatgaaccaaaacgaccgtgtaaagaagagaaaacgacaatgacaacggcattgcaggtggatcgtgaccccgaggccagaggctttgggttgtcactttcactcccgttgcaccaccaccgccaccatctctcgtcgaacaagagcaacgcttcttcgatgagcgagattagcgaggcgataacgtcatcttacaacaccactactactaccaacaacaacaacactatgtctgcttacaaagactgttctagctcatcttcggccaaacacaatcgtcttaatttggatctttctattgctctttgtggcaattaatattagttagctaattatattttaaaagtggttgatgatcatatttgtaaaatcttcatgttttaattaggccacatatataaagagtctgtcatctataatcactacatctatatttaattagttcaatcctttttgtttcttttaattaattagttaattagtctcggagttctgtcctatatatatatctaaattcacaaattaattgagccttagtgtttgtctgagttagtatattatatgtttctatagacttaaaatagtatatagatttattatttttatgtacaagaaatttaacaaaagctttttccaagtccaactcttgaacttaaaatgcatgcatgcatattcattaattacttgaagaaacattattcgtctcaatttttatctttttatcttattatatgcttttttgtattttaataattaatcaatatgttcactgaatttaaactgaaaatattgatttaattatgttagctagggtgcctagatcatgttgtcatgataatcccttaattattaatcaatattcgtggataattaaatttgctcataagaaatattcatcgataaataatacagcatatatatttatacttttattatcaacttataaatttttttataaactacattttttaagtcataaaaatataatttaaaaatattataaattatttttattaaatacatataaatttataatattaaaaaattataattaaaaa

SEQ ID NO: 26052 - DNA, 2457 bp, Cannabis sativa
  modified_base (2160)..(2165): a, c, t, g, unknown or other
ctctttctctcttcatcttcttcttctttcttttcatttactttatattattttataacaattatataacttttgtattagttatttcttttaggagaacaaacttaaattaagcaaaacataccaaaaaaaaaaggtaattaagcaaagaaagttagcacataaggcagcttccctaaaggtttaacgtacaattgaagtgtgtaggcacaagagtattgttattagatgtaaatgtacttaacattatatgtgcatgtaaatgtacttaacattatatgtgcatattaatatcttaagaatatttagtttaatttttttataataaatattaaattaaaatatataactacttaacaacatgatagtacgtcatgatgatggtactgaataacacaagtaacattagcatatttggtatagacataagcacaacattacaactactgaaattaaaccaaagagatcaccaatttcaaagcatatatatcactaataactaacatgaaaaaaaaaatcattccattcttagaacttatttaataagccccaatcgtattatattaaataacaaataacactatatttaaaaaaaatatattatattatattaattattacgaccataaattctaatacaatgtaagtcgtattatttaatacataataaaggatatgtattagcttctattataaatttacaaagagtttgggattgaagacctcgaccccaaacccagatttggacccgaatcgggacccggcctcgagccatggacccgaatcctagatctgaacctggaccaaaactcggactcagaccccaaactatagacctagggtcaagtttatggtaaagatcatatttcctacctattagataaattatatgaaacgtgaagaatgtccacgtttcataatcgttgtacaaattagatcaaaaataactaatatcctaccctataactagcagtgatcacattgtgaaaaagacggccaaatttctaactaagagaaaattctgctagattgtacttgtaaccaaagaacatcagaaataaaatcaactcgtgtagtatgtagattttaacaataaaatcacgtaaaaaaaatccatttcccatataataaatatatcacatttattgagtattaaatatagaatatatacagattattaattatcgactcccatttatgttaaagaaatattctgagttgatagattgctagtttcattgagagtctttgataattaaattctgaaaacacaactccctaccaaaacacaaaaatttatattatcgataatgcaacccaagatattcctgttgaacagggagaaactgttcatcgtcttggaacggagccccaggggacttcacctatcgaaaatcaaaatacagggagaggtcctcctgaatggaacttcaaaagaactgataatgaagaaattattctagaatgatggaatgagaaagcatatgatcctactagatatgtacctttagtggaattagaaaatagccaacttcgacaaaagttggatgaatctaactgaatgaatgttgaattgaagcgtgaagtcaccgcagcactagcacatgcaaatgctaatgctaatattggagcagaacaactaaaaaactatagtggaacaatggaggaaaactgaacaaatattggagcatagtatgtactgctctattgtttatgcataattgggccatttggcggcttgcaagctaaggaactaagaattgaaactctctgagaacatctccaattgtttaattttaaaagatacttgcttatatagattgtttatttgacaaaacacaaagatattatactattgaagttaaataggtgttaatatagaaaattgtattgatgccacacattgatactatctcttttttaaaataaaaataaataagtagtgtgacaatatttataattaaaataaataatatattaaataataatgtgtaatattataataatagttttcttgaaaagtattatactattggtgtgtttttagaattaaaagtgttaaaaataatgtgaatgagaaataaaataaaatattatatttttaaatgatatgaaaatttgtagcacatttaaaaaataggggaattaccccatatactnnnnnntttaactttttttttttcaatttacgatttggatttctaaagtggttgcagcgctagttgtagtaagggtttctatacgattttttgttgcaatttaggttgtagcactagttgcaataggtgtttctatataaaattccataaaaatgtaaaaaaaaaaaactattttgaagtgtaaaaatgaaaaaagcacctaaaaaaatattagcgaatactcttatagtactctactatacatatatttatatatatactaggtgaatgtacgtgccgagtcacgtattgctagttt

SEQ ID NO: 26053 - DNA, 3430 bp, Cannabis sativa
tggaagaactataagaactccacaccaaatcaagatatggatatcttcctattatgatgaaatatgtcgagaaagaaataaaactaaaaaaggagtttcaactgggtgtactagtgaacaaagtaatgcagagatagagtttcttagctatagactgtatgtggacgcagcaatatcaactcctcaaaatgtgattggttttggagctgtcattttctcctcagacaaacaaatgaaggtagccttatctaaaccactacaccaatttaataagtattatgtttttcttatagaaatgattgggataatacgtacaattttaaaataatatagtaaatatcattttggtttatttagttttaagtttatgcttcaaatttacttatgaaggtataaaaagatgtaataataacaagtgtggttgcaccttaaataattttaactaaataattctaagtggattttatctggataaactttaaagaattttaatagttatgttttttcaaaatagatatatgatctgctttagcgtgggggttatttaaatttatactattatattatcatggttaaaagttaggtaaagagtcaaaccaaaggggtttccctttgggttttgactattacaattatattctaaaaattttgagttttaaaattaaaagtacttattgctttaactatctcatttgcaggttccttttcagttttccaggcagaagcaattgctttactagtaggtttgcgttgggctcaacatgtgggacttcccgtggaaagggttttttctgattcactttctttggtctcagttttggagggtcagacagtgtatttaaatgagctgagggttatcttttttgatattaaagtcctattgtctagttttccttgagcatctctttctcatgttagccgcaactttaatgttgaggctcataaattggctaagcatgcccttatgatagacaatgaactttcttggatggaagaaatccccccacctactgtgtaacttttgttacatttgttatcttaacctttatcggttaccccaacaaaaaaaaaaatcatcataaatggacaatattgaaatttaacttaatatattagtattttattggttataataatttaaaccacactcaaggcagctttcaatgtaaccaaatgaaacatggtaataaatagctagttataaagaggaaatcgtacattcaagttcgagagcttattacagtatttgatcaacaataaaggctcaatacaaatggaattcaagttcacttacaagacaaagtaacacctctctcatctcaatcgtagcccttccctaggcaatttagacagcgttgtactctgcagtttcataagaaaagaataatcacaaaccaaggaatactgagaaatggttattattactatcggcagttaacagttatttctaactgtcataatcttaagattagttgacaaagccaactaactttaataggagtggcaaaacgtgtcatcgtgtcgtattcgtgtcatattttatgtaacccgtttctatatttcgtgtaagacgtatcgacccattttttgactcgtgtctaattttctcaaccctaacccgacccataaaagatcgtgtcgtgttcgtattgacccactatgatttattttgctattattaaagctaaagttgtagaaaaaaattatagatttagattccattaaaaaacttatatatactgtatatatattagttatataataaaaattaaaaattttatcatattttcaatttcatgttaaaataattaaatttaaatttttttaacataacattaaatcactaaatatatatttttatataattatattattaataataatttcttattttattatattaaaaaaaaaatcgtgtcaaattcatattaactgagtcgtatcgcgtttggcctgtttttatttcgtgtcaagtcatgtcgacccgttttcaacccacgtctaattttctcgaccctaacccataaaattcgtattgtgttcatgttcgtgtgctgtgtcgaaacctattttgccacccctagggctactgctgctactatataaaggacctagccttatctaattttatcaatccaattcataagactaaatacaaattgtaaatacaaagtattcaattcaataaagattacatatacattttcataagctatcttcttttggcacaatgatagttctgtctaagaactttggtgtgcatagctaggatgaagctacattttctaagagattggtattagagttgaacgtgttcttaggtttaattcgaagcaagccaggcattacagaacgtgaagaacatccagggaaagaatgggaagtgcaaagttccatttggagaagtttaaaggcaagaacgactttgggtatgaagggtgaagatgagggctctgcttgtgcaacaggggattcaagacgctttacttggtgctcagaagattaaagacaagactgaaaagtaaaagatcgaaaatctggagaaggctcacaatgcaatcatttcgagtcttggtgataaggtcttgagtgagatttcaaagaaaatcactgctactggtctatggtcgaagctcgaaggtctatacatgactaaatcccttgcagtctctacttgaaacaaaaggtgtactccttcaagatgcaatctagaaaaggcattgaagatcatcttgatgattctaccaaaatacttctttttttttttatcaagaaagaactatcttcattaatcaaaaacaaatgtaatctatacaatgcaaagccaggaaaaataacctactttttacacaaaaatattctctatatatttattctcatgagctttcaagcttctattttttgctatttgtaatttatagaaactattttctttatttcctgtgtaactttagttgttgtactcgagtaattgttgaagagacagttgtttctattgcttcatatgttgtaaatcattgcagccattatagagatatgcaccctttgcttcttgtctgtgctggtttgcagcagccattgctgccaggcagaaaaactagtcggccagcatctatgacccagccataaaaagattttctccaccacctgctaagaaaagttgcagtcaaaaaaaagatgagcattgctctctgctgctaactcacaaaccgggcaattaatgttgtcaagcttgctctgaaattgctcaaacttgtcacgagttaaaagttgagcattgataaattgccaaaaaaatgaatttgtgcttcggcatgttaagggaattccagatacttttgctgaactcaaactgagtttgaggaaggcagctattatacaataatgtcgatttgaatctgtgcataccagcccctgccttttcaatagc

SEQ ID NO: 26054 - DNA, 3689 bp, Cannabis sativa
gttgttaaatcaacatacttgtgattagatctaagatcctggtaaaataattccaacaaatccttgggcatcttcctcaatgaatgttatggagtcattttaccctttgaagttctttggtggccttcgctccaagctcaagaccattgggggttgtcttgcctcccaagcatacctatcccttccattatgggtatcaactcccacttttggtcccctaaaaattgtccttatgcctcttattacccttggagctctgtttggagtttttttcctcttatcctcctctctccattcttcgagacgtcaatcctcttggcagtatcttctttgaaatccactttgcatcaggttctcgatttccattttaagatgagaacattcttcggttgtgtgaccaatatctctatggaacttacaaaacttatttggatccctcttcgatctatcctttctcataggagttagctttttgaaaggccctcgatgctcatttgtcaagaagatgtgctcccttgaacatgtaagtctaatgtagtaattgaattctctaggccacagatcttcttcccttctaaccctcgtatttcgatcattccttccaccatcaaattctcttttcttttaaggctcatcatataagtggaagttcgttaatctgtcttagccactttttccttctgttaaattctcatgtccgccctcaactcaaatgtatttcttggctctttcgtaaaattcttccaagtcctctaactctctcttcagcatgttattccacaacttactttttggatggactcatgcggctatgaccatcttgtgctcatccttggttaacctcccaactttggccgcttcaacattgaaacattggatgtagctttttcagtttctccctacttaatgtttgctaggcttctcctagggtagagtagtcccgagaggcatggtgttgagccaagaatttgtcagtgaattgtttccaagaagtaatagatttgggtgttagccgtttgaaccacttgaatgttgtgcctgtaagcgttgcctccaagaagtaattattttgttaaaggcatctaggtggtactttgggtctgttatcccttcctaaggtaacatgtttggttctttgaaattcgtaggcaatggttcgacctgaatttcaatttagaatggggattcctcatcaaaatcatcctcctccaattacattcttccaaagcggccgacgctattctccgttgaatatcctccatttccttgtttagttcttttctcctcttagttagcttctctcagaggtctagtggtgtaggccttgttcttctcttgtcccaagagaatctactgagggtgctcgtttctcgaccgcaattttttgacgaagcttttctcttaggtgaccttggatttccttggactcggtgtttttaggttgcaaatagggttccaaatctttgcgagataatcctcttcgtggtgaagattctggggtgccactcatggaatacttggacattccttcttctcttatctcacttacgcctttctttctttcttctggttccctttgcccaactaaaggtgcctcagagtgaccttttaggagttcttcaagttctctctgcatgtttgtgatggtttttttctagccgcatgttgcttgtccttaactcattcttctccttgttgtgaatatgagatcgagagcttaaactcactgagtaagccagcttctccttcccttgtcagtggtgtgagattctaggatcccttggtatcggcggttgaggtttccttatcagtgactgaacttttttcctttgtgatccatttccaccatcagacgtgatggaggcagtcaccccatctcgttgcatgttaattgggttttcctcatggtggttttcctcttctcttactggaggcttgtgactgtttgtgcctccttctctggcttcaggcctctggccatttgtaccttctcccccaatgacgggtggtgctgtatcttgccttgaaataaatagttgagtgtcgtcaaggaaaacctccaattcttggacacgacaagaacatctttacatttttttatgatggtatgtaaggaatcaacttagccttagcctactcccacaaacaacgcaaaatgattgacagtaagaactcgtcaactaattaattaaggaaaatctaatgttaagaacttgaaatagaagataattaagagagttgctcaaactcttcaagaaatggtaagaaactcagggttccaatgatattcaaagttctttctaccagaattttccctccactttacatctattcaaatggtctatttatactagagctactgaggctttgaattacatgttccccccaagttaatggaggggtacaaaattcctttagtaccatgaagatcaggtggatagtggtgaaatggtagtcggatgtcagcttgtacctctaatgaggcaagctttgtctccactatttgtacttcgagtgagataagctttgtctccactattcgtatttgtagtatgatcactacctcatagaggcatgcctactccaacggtctcatccttggttatccatcatttttgtccgtccctccttattctcccatgttcaaggtattatgaagacatacaataaatttgaactaagtgttccacttgatgttggttctcacatttagagactatgtacatgatgggatggtcttctaagtatttgagagagtatcttaggagaaggaaagaagggagagtggggaaaggagagaggagggagcagggagtggggagagaggagagcggggagcagggagcagggagagggaagggcggggagaggggagtggggagagcaaggagagaacagaggggggagcagggagaggggagacaagggtggcccgcctatttacccttttgaactttttcagtgggctttggaatctttttctttctccaattatgtggcctctttagaaaatatacttagtgaatttttggggttcacatctattagcgttgaaagagggtgaaccactataaaatatggtgatagttatttttatttatgtactctttacatttatttctgagttggctattttcatagtcacactactatatcgtaaattatgcataaatttttaaaaatgggtggaatgtctactattattgtgatgtatatatattatcatataaaatatgggtgactacttaatggttacatttttatgttgtaaccatgatagttatatttttgttgacctataattgtaggttaccaacatgtaaaaaatttctttttagaatcaaattaactataattaaatatttcttaaaataattaatttttaatttgaatatttaattagagcatttttagaaattaatattaataattttatttttatatttataagtctctattataattttttaaaagttaagtcatttaattataacatttacaataaaactctattattttataaaattaaactttcacctcttctaaaatatatttttgaataataatcaatacgtttgagaataatgcgaaatactagaatatgagtattcatgatttatacatcatatctaaactttaatttcatctgtatatcttcaagttatatgttttaaacacaacttgaaaac

SEQ ID NO: 26055 - DNA, 2585 bp, Cannabis sativa
gaaggcctagtaaacgatggctattgggcttgagagttgtagctatgagtgtctaaaccatttataactgttgtagtcatagtggcgttgcgatattgatccaagtgagaagcaaagaaggaacaaatattgttcgctagtttaggcttggttccatgaatttctttatttttttcagcccaaatagaccacattaggcatgtaatcttgtctaaattagcatcattgtgtaatgcagtaatgtgtgagaaaatatcatagcctttaagattactaatatttggcatagatacttagaattgagatttcctccacatagccttagcacggtcacaccaaaaaattgtgtttccttcccacgcacacatacaaagggcacaagaagtggaattagttatcatcctatgagctagatttaacagaggtaggaagagcatcatttatgaatcgccaagcaaagattttaacttttttgggcagccgtagagaccaaaatcggttccaccattgacagtgagaagatgaagatgagtgtacattcatagattctaaactctctgctaagtggtagccaaatttgacaatgtataagcctatgtctgaatggtgccaaataagcaagtcctctctaggaaaaggattaagagggatggaaaggatacgatcaatatcaatagtaccaaaatgattctctaatatccttgtatcccattgcctatctgttaagatatagtgtgcaaccgtgaaaaggggatcaccacagtaagagtatggggtaaaggtagtgtcacccagcaaccatggatccgaagcgcatcgaatattctgccatgtaccaattttccatctcaggccctaacaatagttctttaccatcacagatactttaccaagtgagggaaggtcagatgcctttttgagccgaaaggaaatcatcggtcttatagtaacaagatttaagaacctttgccaacaaagaagaaggattatccaatattctccatgcttgcttagcaagtagagcctgattaaagtgaatgaaagagcgaagacccaaaccaccgtcagcttttgaagaacacatgaatttccatttcttccaatgaatctttgagttgtttatgttaaaaccccaccagatttcagccatcatagattcaagttagttgcaaaaaattttaggaaggctaaagcaactcatggcatatgtcggaattgattgaacaacaacttttaatagcacctctctactaccaattgaaaaaattttggcatgccattaattcatctgtttccaaatatggtctttgatgccgctaaaaagttcctttttatcttttccagcatatgagggaaggccaagatatttttcatggaaagcacagataggcatacccagcacattattaaagcgatatttgattacttgagtagcatccaatgagaaagacatgacggttttatttatgttgagaagtttttctgaggctctatgataaaaatcaaggaccctgatcacagcttggcaagaatcttcagtagcttggcaaaaagcaaactatcatcagcaaaaagaagatgagatacggcaggggcacctctagcaattaataacccttttaaatgacccaaagattcctcattcttcaacaaaactaaaagcccttcatattagattaaaaataaatacagtgataaaggatctccctgacgaagacccctttttggtacaactgaacctttgaccgcaccattaagattgaaagagagttttggggatgcaacacatctcataaccaaatccacccaatttgtgtcaaaacccatcttaaccatcaccgcttgtaaaaagtatcattctactctatcgaaggctttacttatatctaattttagtgtcgcataccccaattgtcttttttttttttaggcaatgaactagttcaaaagcgagaagaacattatcagtgataagacgatgagaaagaaaagcactctaattttgagaaatcacatgaggtaatgcctctttaaatctggcagcaatggcttttgaacccaacttgtaaatcaccatgcacaaactgatgggtctataattactcacaagttttggttgatcaatctttggaattaatgtaatcaaagccgagttaatagacttcatgtcatctccctcattcagaattctaagaatactctgagtaaccagtggcctaacaatatcccaatgatgctgaaaaaatatggcagacataccgtcaactcctggagacttttctggtgccatagatttgagaaaaaattcaatttcaatagttgtaaaaggctagagcagaaaggtattcatatctggagtgatggcagtattaatggtggataagacaagcaaagcttcatgatcaacaccatttgaagaaaacaaattggaagagtaattatcaatttcagtaacaatgtccttctcagtttgcaccattcctccactactggtgtggagtattttgattttatttgtggcatttctggatttagcacgagcatggaaaaatttggtattagaatccccactttgaagccaatca

SEQ ID NO: 26056 - DNA, 1934 bp, Cannabis sativa
ttaaattaaaagagtttgatatattacccctcttcttgtaaccgccattgatacaatgttcttcatcttcatctttttcttattgttatttttttagtttcgaaagttttagtcacgtttgtatctcgtgtggtttggttttgagcatattttttgtagttggtttttgatgagtttctcttatgtttgaaatccattttccctcttattttttccctcataactattttaccctttctcttataaatttttattttattttagttttccatgcttatgtccaactttaaagtagcaataccattacggcctgttgtcctattcttgatagcattgacaagctcaaaagccactaggatgttatctttgatcaaacggtttggcaagaaagcactctgtgttttgaagatcacatggaggagcacatgtttaaaatagccaacaagaagcttggtgacaagctgcttcgagatgacattgcaatggctacggggtcgataatcttgcatctgttaaggtttttttttatttttggaatgagaatgataatactcttgttcaaactagtggggtcagctccatcatttaaaatacttaacaccactttggtaaccaaatcaccctcaacataccaatttttttggtaaaaaattgcagacatgccatctatacccggactcttgtcaggggccattgattgcaggacatgttcaacttcagtagcgtgaaaggtcttgtgagctcatcattcatttcaacagtaaccaatataggtattgcatttaacatttaagatagagcatcttcatcaattgtggtggctgtgaaaatagaagcaaagtattcttagattgtggtagccaaatatgtcctagaatgaactcgtgtccctgcctcagtaaggagaaattttatattgttgttggatgtcctagccaaagctttggcatggaaaaactttgtgttacaatcacctaagcttaaccaatctacccttgagcgttgttgctattaaatttcttcttgctccaacaaatcatcaaggattgctttagagtgatttaattcaatcattttttcactgctgcgatgtgacagattgttgagtgcaacgactttagcttgagattcagcaatatttttcttcattcagcaatatttaccaatttggacatgtgtgccacaacctcacaaacatttatgttaaaatcccatgaataagtgaatatttttgggagtgcaattttacttaaaaaaattatttcaaaaataccaaagaataataaaaaaaattacaaaaaaatagttgtatgaaattttaaataatttttacgattttatttacagaaaatacagtcttttaatgtatttttattttgtactcttgttaatttattgttgattgtttattatctgtatattattttttgttgttattcgatattattttcctgttacttttatataatttttttgctattttcgtgttgtttttatagcataccgtaaaacaatataaaaaagtcattggaagtaaaaatataaaaaatttacaaaaagcgtcttgatgtaataatctaaaaaaaaggggtttttacaataatactaaattttagacaaaagattataattttaccgtcacacagaatttttttataaaaatactgttttttttttaataatcgtaaaacaatacaacagaacaattaaaacaacagtagaacaagtgaaaaacaaccgtgaaacaatagtgaaaatttaacacagtacacattatttttgaaaaaaaaaaattcaaccttcaataaaaaaaaattcagtatgcgatgtaaaaaatctctacataaaaaaaaaggataattacataaaacataattttttgtaaaaaaattacatttttacgtttaaaaatttcttttacatttttacggtaa

SEQ ID NO: 26057 - DNA, 4246 bp, Cannabis sativa
tttaagttgcagtgctagttgcaagaggggtttttatgtagaattccgtaaaaataaaaaataaaaataataaaaactattttaaagtataaaaattaaaaaattcttatatttaatgtaaaattttattaaacttaatattttaatattctattagaggtaactttaaattataaaatttgtaatatttaattacattaataataatagtaggagaacgaaataattactgactgtatgacaactaacaactttttaacaattctcttatttttaaccgaaaaaggaagaatcgaattggatgggacccacaagggcttttgttgtactgggctggtatactattgacatttcttttaggcccaaggttgtaattctttaacaaacaataattgtcagacagactgactgacacattttgtttaaatgatgttgtctttcttaatttcaattttacttggttcagtaaatgatcactttacaattgatacttattttaagttaaaagagtgttcatgggaaaatgtaaaaagacaaaaaaaaaaaaagccaagagattgcataaatattattataattaagttaactccaatataatttaatttaataattattataaaatattattaactatttataagacactacttttatataatgataatgataatagtaatgctaaaaaaaataaggataagtacaggtatattttctctttagagaagtatatagtatatttttagtagatcttacatcttgttcaatatttaagacggtcttttattctaattttttcgtaatggtagatattgtaattatttaaagtcacttataattttttttataaaattttaaattatttacagtaactaaaagggatattggcggccataaaaaattgattttttgatggtaaaactatttaaacggtactctattttggtcattaatattctatctaaaagtctcagttaactgttatagtggactgtccacgtgcacacaagtgtacatgtggcgtgtgtacacaaatatacatgtgtccaaaacagaagtgcaatagttttacggtcaaaaaaatcagttttatagttaagtgttagaaaatataaaattcaattagttttgttgccaatatctctacttaaaataaaattcaatttttattaatttttttctaatatacttaataagtaattgtttgaatattttttaacactgtaaattattttgaaaatttataaattattataaataattacaatatatataatcatgaaaaaaataaattaaaatattttttaaatgtcaaagaagataaagaatcaactaaaacatcattttagattatgaactacaaattttttctcactttttattatatataagttagagccaaaataattagaaattcagataaacgtgcaacttttgtgtgacccaactaatcacactctttgtttgagaaaagaaaaactaatcacactctgcaatttaaccaaatatttctttatttactttatagtgtacaaaataatgtaaaattggtgttatactttttctaaatgtaataccaattactagaaaagtttatatgagtttgtaaataaaggtgtatgctcattattatgttatgtgataatcagtgtttgtgtatgttttttttttctcattttctaccccataattaattgtctcctttatcattcctctttatacatcttacagcatcactaataaaagttgtcacaaaaaagtgattgttattagtgagtccaagagatatggagtgaaagggagaaaataattttgtatttttatgattgacattgataccaaaattaagcatagataccaacctaattaacatctttttgaaaaaaaaaatgattttaaagtattcactttgtatgctctttaacaccctctctaagttataatcatattcattgtctttttagtctttcatcaactctgaatatgataaaatactttatgacatgttacgaatatataatgagaattaaaggtaagagagtcattctttcttttatatttgtttgttttaatttattgaaattaagaatgaaagaacttaattaaataaggataaaaaaaaaagggaatgcttctcccacctatttagaggctgggattttagatttgcttaatgcttgtctaaatcacatatccacccctaaagtaataatcatcctatagtagactttatgtgatcgacacaagtttggatatcctagtcggtgtagcctaaaagggtttagaacgtccctcttatagtctggcatatggtttatagtcttcttcaagtatttcagaatatgtttaattgttatctaatgtttcaatcccgatttagattgatatctactcacaactcccattgcataacaaatgtcaaatttagtgcgatgcataacatacacaagacattctaatgtcaatgcttaggaattcttcttatggttttatctcttgtggagagttaaggattgctcctagataaacgaactttgtatcataaggcaaacgatctctctttactactacaaaactagacattccaacgatcctcaaaatactattttttgtagaaaaatcatcgttaataaaattaaatgagtgttttaacttgttgagaaaaattaaatattcctaacagattagaataatcgtgagggtaatttgcgacgatttttaagagtttagcttgattttttaaatagggaatacgcaacggtttaaaactgcgggctaaactatagccgacagtttaaacataattgcccaccttattaaggataaattcacaactgacagcttgaatcatttggctttcgatataagaaaagatatgcataaagatttcaggatccaaatgaaatatgaaaaagcttggaggtgcagatagaaggcactacacctagttaggtgtacacctgaagcttcatactcgaaattatctagttatttgcacatgctaaagttgagaaattcaagtaccatcacggttgtggtagaggatggtcacttcaagtattgtttcttctcgttgggtccttgtaggcgtgagtttatgttttaccgacctgttgtatgcattgataagtcttttttgaagactatctacggtgggaaaatgttgtaggcagtggcactggattcaggcaatcacatttttttgatagctttcgcagtagttgacaacaaaaaccataactcttggacctattttatgagaaacttgaaagaagtaattagtgatgttgagaacttagcattcgtgttaggtaggcatcaaaacattgctcatgttttagagctcgtgatctctgatgcacaccacggtgcgtgcctacagtattcgaaaacaaagtttcataaagaatttaagaagtttggggcaatgaatattgcggttgcattataccttgagaaaattgaatttgagaaatgggttcggccatactttctaggggtacgttataatgtaatgacgagtaattgggctaagagctttaacaacacaactaaggacttaaaaggcttttctcgatcaatgcttctgtagaattcgtgtgaggttcaaaagtccaacagtggtttgctacgcgaaaagaaaaaactgacaagtggatgagtggatgaagacccgaagaccctaacaccagaaaccagaaatggagaaatggaagaggacggcattgctttgagaaatctcggtatttgaacgttgaaacatgtggaccttacacgttgaatgtccaccctggaggatccgttgagattggtgtcgtagtggacttgcaggaacaagcttgcacttgtggcttgttccaaattatgaaatttcattatcctcatgcatgtgctgcaacttagcaacgaagtattagcatgtacgcactatgctcaccatattacaccacataatataggaggagcacatataaaggcacaattatgccagtttatgacaagaataattaggaattgtctgatgacataaagaacatgatagttgtagtgcatgttgagaagcgactagtagggcaacctaagaagcaaaatatttgaagaataaagtcaaaccgaaccgcttgtaatggtgaaagaattgtgataaaatgaacctatagcaagtgtggtggcaaggggcacaacagaaagtcttgcacctacaaaggttaaaaattactgttgaattttagtaatcgtattgttatgt

SEQ ID NO: 26058 - DNA, 2284 bp, Cannabis sativa
gtgggaggcattcacatcagctgcctatttaattaataggcttcctgtccccaacctcaactaccaagtcccatatgagatgttattccaccatgccccagattacaatcttttaaaggtttttggctgcacatgctttcccttactaaggccttatgaaaatcacaaagtatccttccgctcttccgaatgtctttttcttgggtattgtcactcctcaaagggatatagatgtctccactctagtggtcgcatctatgttaaacgaagtgtaacattcaatgaaaccgagtttccatacaaaagtctattttccccatccacacctacaactcacactcaaactactctcctagaccccaatgattttcgtgtcccacacactcatcacaacactattcttacacctacacagccccagtcaaccaaccattcgagtaacacctcctccccaaccacatctgagtccactgccccccatgaacatgcatcaaaccagtcctcacaccagcagacaagttatgcaacttcatccgaagctcccccagtaacacataacatacatcccatgtccaccaggtccaagatgggcatcttcaaacccaagatttacctcaccacttcaacaacaggatccgaaccaactaacataaaggaagccttagccaaccccatatggaactctgctatgaaccaagaaatgacagccttggtcaaaaacagaacttggatcttggttcctaaaccagaagacacgccaatagtgagttgtaaatggattcattgaatcaagtacatgtcagatggctcggttgaaagacacaagtctcgtttagtcgcaaaaggttttcaacaaactcctggaattgattattttgagacatatagtccggttgttaaaccatgcacaatacggatcatgttcaccttggcagctaccaacaagtgggacattcaacaaatcgatattaataatgcattcttgcatggtgatcttcaagaaacagtttacatggcacaacctcccgggtttatcgatcctcaacatcccacacatgtgtgtaaactcaacaaggctatatacgggctcaaacaagctcctcgagcttggtttgacacactcaaaaccaccttactgcaatggggcttttagaattcaaaatcagacacaagcttgttttttatacaacaacacacatctctgctgctcttattagtctatgtagacgatattttaacaggtgataaccttacacacattcatgccatcatcattgccttacaaaatcagtttgccctcaagcaatttggctctgtaaactattttctgggattcgaagtcatcagggacaatgacaccatttttctcactcaacaaaagtacacacgagacttattaattagaaccaagatgcttgatgccaagccacagtcgataacgatgtgcacaagctccaaattgtctattcactcaggcactcctctgccaaatcccactgagtacaggagcatcatcggggctcgaaaatatctatgcaacacatagcctgatatctcatttgcagtaaaccgtttgagtcaatacattcaaacacctactacagaacactgggggggcctgcaaacgtgttcttaggtacctcgcaggcaccattcacctcggtctagtcttcactcctgcccctactcttagcattacaggttacactgattcagactgggcagggtgcccggatgaccgcaaatcaacctctggctatggcatcttccttggcaacaatctcatcagttggtgttcgaaaaagcaacaagtagtggcaagaagcagcactgaatcagaatatagggctctagctttagctacctctgaaataatgtggatacagtcccttatgaatgaaatatcagtcccaatttcaaattgtcctatactttggtgcgacaacttaggagctgggtctctagcttccaatcctgtatttcacgctcgcactaaacatatcgagatcgaccttcacttcgtcagagatcgtgtccttgctcagcaactcaaaatcagatatgtggactccctcaaccaaactgcagacatatttacaaagcccctgtctgtgtcaccattcctatttctaagaaacaagttgacacttggtgtccacccgtgtcactcgaggggggatattgaaccaacacatcagcaagattcaacagattctaaccaacttggataagttggttatgatagttaggatagtgtgctaaaccgttttaactgtattttctt

SEQ ID NO: 26059 - DNA, 2554 bp, Cannabis sativa
ttcaactaatggatataaatattatatccaatttgttgatgcttactcaagatttacatggatatacatgctcaaacaaaagtctgatgccttgaaaacttttacacaattcaaggctgaatctgaacttcaattaggcaagcctattaaatgtttacaaactgattggggaggtgagtttagacccttcactgatctcctcaaacagtttggaatcatacacagacatccttgcccaaccactcatgaacaaaacggcttagtcgaaagaaaacatagacatgttgtggagaatggcttaaccttacttgcccaagcttcaatgcctctcaaattctgggatgaggcttttcgaacctctgtctatttgacaaatagacttcccactgctgtgttgcacaatgtctctcctatagagaaattgttttctatccaacccgattacaccaaactcaagacatttggatgcaaatgttttccaaacattcgaccctacaataaacataaactacaattcaggtcatcaccctgtacattcttagggtatagcctcaaccataaaggctataaatgtcttgacacatctggccgtatgtatatatctcgtgatgtgctctttgatgaaacctctttccctttctccactaatcccaaacacagcactgattcttactcatactctgatttttacacttctgctgttattcctacaatcactcaacctcctcctgttgcatccaacaccagacctgtaccatctgaccataatgtgccaaatatggcaagttgttctgtgcctatgcaggttccagttccaccaacaagaattcctgagataccagaaattccagctgctgctacatcacctacagcatcagcacctcaagctgcaataccccttcttcctcatcttcctgagcaatctgtcaccagttctcaaactgctgctgctactcagaatctattggccaactctcatcccatgcaaactcgggcaaagtcaggcatacacaaaccaaagagctacatggcaatcaaaattcccaaaacagttaaagaagcattacaagatgagcagtggaacaatgcaatgtctgatgaaatgcttgcattaattcgaaatgcaacttataccttagttcccttgcctcctggtcgagaacccattggctgcaaatggatatttcgacacaaagaaaattctgatggtacacacaacaagttcaaagcccgacttgtagcaaagggatttcatcagcaaccgggattcgacttcacagagactttcagtcccgtggtaaaaccagtcaccatacgcatagtcattacattagcattgtcccagggctggtgcattaagcaattagacgtcaacaacgcgtttctaaatggtgatcttaaagaagaagtatacatgatacaacctcccggttttgaaattcaagcttctcctccacttgtttgcaagcttcacaaagcattgtacggtctcaagcaagctcctcgcgcgtggttcgataagttgcatcactgtcttcttcaattggggttctttccttcaaaatcagatcactccctgtttattcagcatacatccacatacacaacattgattcttgtctatgtggatgacatactcataacaggcagtgacccgaaagtggtatctactctcatcactgctctcaacaacaagttctctttaaaagatcttggtgatcttcactactttctgagtattgaagtccattctacaccatttggtttacacctctctcaagctaaatatgctcgggatttactagtcaaagctcagatgcaagaagcaaagccatctcccactccaatgaccactggtgtaagactttcagctcatggcagtgaacctatgtctgaccctcatctctatcgatcaattgtaggtgcactacaatatttgctcatcacaaggcctgacctatcctttagtgtgaataaggtgtgtcaatttatgcacaaccccttactcactcactggttagctgttaaacgcatcctacgatatctaagtggcacaatctcatatggtttgcatttaaaaaggcctacagatcatgatgttgtagcattctgtgatgctgattgggctacagaccctgatgatcgtaggtccacctctggtttcatcatcttttttggtgaaaatctcattgcttggcagtgcaaaaagcaacaaacgatttctcgttccagcactgaagctgaataccgcagcttagcaagcacggtagctgaacttacttggattcactctctcttcacagagcttcaaattcagcttccaagaccaccaactgtgtggtgtgacaactcaagcaccattcttctcacagcaaatcctgtccttcacgcaagaactaaacacatagaacttgatctctattttgtgcgtgaaaaagttctgcagaatcaagttcatgtcaaacatgtaccctctgtagatcaacttgctgatggcttgactaaagcaatctccagtcaacgttttcccctttttcgatccaagcttacaatt

SEQ ID NO: 26060 - DNA, 2563 bp, Cannabis sativa
aataataaggaatatttttttagtgtaatttttggtgttgtggttggagtggtaatactttttgacattaaatttggtgatagtgtaacaccaaagatgctttaaaaaaaaaattaactcactctgtccaataatggtagaattttccaaaaattaacataaatgattgtaaaattagaaaaaaaaaataatttttttcgtactttttgtttttttttactctccctctctttcgtcttcatcaacctccttcaaaccctagttcttgtttcgctactccctcttccaccatcgaagacctctaacactcttccgacgaagggacctcacttcaacttcaatcgacggtgctgtttccgacaatcattctggtgagacacgaacgaacccagcaagttgacaatgggcgtgcgacgttaggcaaggtcaaagggaaaggcacatattggattcgcggaggtggggtgatcggggtgggtttacagaggtgaggagaaatttttatagatatgaagctgaaacagaggtcaggttgataagattgggtaaacgaaattgtgattgagatgttctcaaaagctcgcgttacagaagttgtagggaaggaatgctgaatcaagcaaacaaaataataataaataaataaataatgcttaaacagatgcacaagcatggttgtaaacaaaatggttatattgatattagtgtgtcctttatttttatcatgagaagagaaaaaaatatggcagttgtaaataatttttcatttctatactatattgcaacgcacggcgtccaaactagtattaaataaaatactggtaatacttgactcttttcttttccgtcagaagtttgtgcagaatttgtgttttctgtttgcattgccttccacctgtacgacgtaatgtctggatgagaaaattttgtctttttttttttgggttttcaggttgaatatttgaagaattgattttttgtttttcttttttcctgcttaagtggatccctttttgtgtgaagaacatgttgaagcaggctctaggaaatgcctggaacaaaggggtttatgggcatataggagagaaacttaggagctgcttttacgtgcctgcaattggtatccacaacggacaggtacacctccaatctttttctagattcttattattttctggagtttttgtaatcagactaacatcacagcttctattgtcagttttggcactacactaggaaattggtagtggaggatatttatgttcttcgttacttgatttgaacttcaaataaatagttgcaagctagaaagaatgatgtggtgtggtcatgacgtttttttatagtgttatacactcgtgagttgtggtgcctgaatttgataattgagaaagaaaagcatttgtggaattctagttttagtttgagttttgtgattgggatgtcatctgataagaaattttttgccatcttgtatctgatgcattaaattttcgcttattcttcctcttagagtagtgaaaaagcagtgatggtgatcatataaatgtctgtcagacttcccaaaggcagtgatatactcgtcttcccaaaagtgtgtttagatgtttttcgtataaatgttttgcagtttccatcaagactgttatttaatggcattttgggttggttttctgtttgctccttgttatcttcttctaagtgtactgttatccctcgtctgatttcgtttcatcttcatgatttgttggacatattcttttgttattgtgtttgttaagagccaaaatttctaactggctgcagtcctagatgttcatttgatatgtagtaaaaatagtttcttcctatcacaccaagttttctaacttttcaatgatgaaggttcattctgcaccaagaagcttttttggggtagaagatttccttgatgacaacaacagccgaccgtacacttacaagaaggagaagaagtcaaaaaatccacagaaacatatatcattcaaacaacgtacagaggcgtacatggaaccatttacactcgatgtgctaatctcgaagcgatttgtgacagcttcccttactcacagggtgacaagtaggcaggttgcagttgcgggcacgaactctaaggacataaaagcggttctcaggtccagatcagacatacctgcatgtttggccgttgggagtattttggctgagagggcaagagaagctgatgtctatactgcgtcttacactccaagagacagggacaagtttgaagggaagatcagggctgttgttcaatctcttatcgataatggaattgatgttaagatttatcttgattgacttggttggttttcttttattactaaatgactcttttgaatctagttgtgttttacaaaggtgtcattcattcatagccatagatgtgaaaaagagttgatccgtgggcttcatttaagggcatacaaatgattaggtgcttatttcaaaataaattgtcatatagtgaaattactataaaacattagttaaaaattatgtaatatactgttataccgaatttaaa

SEQ ID NO: 26061 - DNA, 1540 bp, Cannabis sativa
aattttttatttcatgcagccttctcttgcgacgtgaatgttgctcatttagtcatggggagtatgtcaaagcagggttgagtgagttggaacagtggtgtcatggtgcaaccgaggaggtctggctcattcacctcttccgcacctgttttctttttcctcaactgaaaaattagtttaacatgtcgctggttttcattcagttcacagggtttgcttcagatgaactgaaacaactcagacaggcagttggtttcctggttagatatcatttatctttgtcgttcctttatatatgcttattattattctagacatttcattgttacttagataccttttctctaatgccgaatcaggtcatacatcagaagcccaataaatcattgacagatatctcaaatgatctttgtcctgtgagtgacttctctgttctacttactccatccgtagtacttgaactcactatttctttgctgcttctttcaggctctcagcattcagcagttgtatagaatcagcacaatgtactgggacgacaaatacggtacacatagcgtgtcttctagcgtaagtcaaagctctttactaatatcatttgattgatctgtcagtctttactttctttccccttgagaaatatccattttaacatacttttgatgtgttacagtttctctttctttttctttgttttcttgtatagtctcaccccataatcttttcttactacaggtaatctcacgtatgagagctatgatgaatgacgacattggcaacccgcgcaggcattctttcttattggatgataactcgaggtaatcccttttgcggattttgcttactgatcattacatgacgatataacttatactttcatatggctgcactcgaactatctcataataattataattttgcagaattccttttactgtggaagacatttccaagtccatgggcgcgggtgaaattgaagtagctgattttgagcctccacctttgcttcgatataactcagaattcgcttttctgctacaacgttcgggtgattgaatgtttccagtttcaatcccagaacattagtgttactactaaaacatttggtttcattagtatttgtcattatacagtgtcacaattcgaacatacagagcctcacttgtgctccttgtgatatcatttttacttttggtttgtatcaaaaaactacagccggttttaggcagatagccgcattttattggctatggtctactgttgtatcaaatgtatctctgtgaatgtaggcttaggcttctttatgcctttttttagagatacattttatgatgtagaaacttgatttgatacatccatgttggcaaatggctaatgaaatatcttttttattagtattatttttaccattaagtttttgaacttaaaatagtcatttctctctgcatgcatgccatcttttgttaatatgtagagcattgctatagtggtgtctagcatctagcatcatctaaatgtaaatagttagtaatattacata

SEQ ID NO: 26062 - DNA, 4038 bp, Cannabis sativa
  modified_base (37)..(40): a, c, t, g, unknown or other
  modified_base (3502)..(3506): a, c, t, g, unknown or other
  modified_base (3558)..(3570): a, c, t, g, unknown or other
gtgtttaaattctattattttagagaattcatatttnnnntgttaatcaacatacttattagtaaatctacatcctggtaaaatatatcccaacaaggcattatcttccagcacgccatatcaagttcttcacctttggaggaattttaaacttccaaaaattgtcccaaaatctagtaaaatcattatcaaccgaatctcaccttccatgaattttttgtaacaatttatatgcacttttaactgaatataatcctaaagcttcatggatccaagtcattatgtcatagccatatgcaatattcagtggaatttctaatataagcttcttatccctgtcctcaaataagtctttcaagatttcaacatcccgattcccgccttcatcagtcattagattgcaccctttaacatgaaccaaaccaaggtgtgtcgaaacaacaaaaggttgttcttcacaaggcagccaaggttcatgaagagcatcaatctcttagccattggcaacacaccaacgcacacctttgccaaccagcacatgagcttcaaataaactacgctacacaaagcttgggttatttcccaactgagtcgtgagataggagccattaggatatttctagccttgaacacctttgccactaacgagtttggatgagaaagtaaccttcatccttggttgcctaaaaggaataaattgaagtccctcgaatgatgaaagcccattccacccttagtcttgtgaagacaaagacggtcccaagaaaaccaatggattccattcttagaattattagagccttgccaccaaaacttagtcataactttttccatatcacttgttatctccaaaggcagtaagaaaatgctcattgcgtaacttgggagggattgagccactgttttaatcaaaaaaaatttcctacccgagacaggaactttgtttcccaaccttgaattctcttacgaacccgttccttgagaaagcctaacactgtagatttgtttctactcaaagtacttggcaaaccaaggtacaaactaccttctcccataatagacataccaagcatgttgctaatattattacgagtagcaagatcggtatttgtgctaaaaaaatcaaagattttgagtaattaaccttctgccagacgcaacttcaaactttattaaaatctcttgtactctggtagcctccaacatagttgctttacaataaagataactgtcatctgcgaaaagcatgtgagaaatatgatgagctccattagcaaccttacaactgtgtattaagccaccattctcgtaacgattaagtaaggtcgagaggcccttagcacaaaggataaaaagatacagagataggggatccccttgtctaatatctcgagagggaataatcggacccatctcccgattcccatgaaccactgtgtaacaagtcgaggttacacatttcatcaaaaagcaagtccaccactcctcaaaccccaatttcttgagcatggcttccaaaaagacccactcaattctatcataagctttgctcatgtccaattttaaagccatgaagccttcttttccttttctttttctcgtcaggtaatgtaatacctcaaatgaaatcaagatgttatctgagatgagcctccctagaatgaaagcactatgtgtatcagccacaatagctttcataaaaggcttcatgcgcttcaccatgactttcgtgatagttttatacaagacattacataagaaaattgggcgaagttgtgtcatgtcttcacgattatttttcttgggtatcaacacaatgtttgcttcactacatcttatttcaaactctctagtaacaaagaatttttgaacagcagacaccacatcacctccaacaatagaccagcattttttgtaaaaggcaagcatcatctcgtctggactggggcttttatctaggtgcatttggaaaatagcctcttttacctcctcctctgaaacttgttgtcaaaattcagaatgaacaaactttggaaccatcctagaaacacagttcaccacctcctggcacgatgaacttgaagctttgaataaagaagaaaaatagttaaccataacttgagatagaccatcatccaacccgacccatgcatcattttcattctttaatctcacaatctgattatgtcttcttctagagagagaaaccttgtgaaagtaactactattatggtcacattctttcaaccagagttatttagaccactatttccagaatgcctcttgttgatcaatcaccttgaacagttcgttcttgacttccatgtgccattggataaaggctgcatctctcttattcctcagcctttagagctccttttacacggttgattctggctttgaaattaccagtcacatccttaccctatgagcttaatttctcagcacaaagagccaatttgcttgaaaaactacccacattatctatttcccaacaatcgttaacaatttcaaaacacattggctccttggaccacgcattctcgaacttgaatttgcagttatagggaaatttttgttgaggtttaggctctaagaatattggacaatggtctgaagatgagatgtcgagattcaatagagaggcttcttggaaaatctgagaccaagagcgattcaccaaattaagcacgatccaaccgaatttctacccattcactagtgcctcttccaagtgaacgggtaactagtaatctccagatcttctaagttgcagtcattgagggcttgttgaaagccatttaagagcctttgagggtatggacgtccaccatgtttatcctcatgtctgactatgttattcaaatctcccatcacacaccaagggaggttcgaatctatagctaacacgcgaagtaaattccatgattgatatcgctgagctcgaactggttccccatagaaatcagttaacctccataagcccttcgtttaagaacctacaagaaaatcaatgtgattatttgagaaacccaacacccgcccttcctcttggtacttccaaagcaaagttaatccccttgaactaccttaggcctcaaccataaagaccccttcaaaccttagtatacggcccacactttcaatcttccatttgttacactttgtttcacataaaaaaaataaaattagaattcttttgagatataatctttttaggaattgaacagcttgttggtttctaagctcgcagcaattctaacttaaaacattcatacacagaacctgccccaaacaagttttttgtattattatatataaagatttaataatattttttcaatctttttagctataattttgtagtttagttttttttttttttggtttaaaaaaaattgtttcatatccttccatattattttttctaagttttggccagcttacaaatacttccgacctccatcctttataatgttaagggtaaatagtggcataagtnnnnnaagttttatgtttgtaagcgacataaatctaatgtttatttttagcggcatnnnnnnnnnnnnnttgtaaaactgtaatttttctctaattttgttagtacagactctgttattgtcttaaatagggcacatataaggtttaaattcttgatcattgagtctaaatagaaacatgtagtttcagttacttctaaatattcttttaataaatagaaaacagaatttgtactgaaaaaattggaagaaagttacagttttacaaacattgagtttgagtacttatgtcgctaaaaataaacataaaactttaggtacttatgccgctatttatcctaatgttaatcaacatataatgtaagataaatataatcgatacacaaatacaatatagataaacacaaaaatgcaatgttcggattaggattaaaatttattgacacaaatatatatatatatattaattaggttaaaattaattaattaaacatgtcaattatataacatgaacacaaatacacacccttaaaataca

SEQ ID NO: 26063 - DNA, 2552 bp, Cannabis sativa
aatataaatttattatatgtaattgatgataaaaaaaaaaaaaaatttatagtatttttaaattatatttttatcagacgtgaaaaaaaagtagaaactctaacatataaaaaactttaagttagtgtgatttgttaatattaaaaataaaaatataaatggtcatagacatatatagcttagtagtttcacatttctcctcacaaaaaaaaatgtcaggttcaaatttccctcccctaatataaaaaatatatataatataaatattttttataaagagaaaaaataaaaaaaaattaaatattatatattctattattttaaatatttatattatttataatgcataagtaaatatatttttaataaaataaatttattatagtttttttaataaaaataactctttattaaaattgttggctcctcatctttcatttttagcttcaccataaattcttcatataacaacttatctaaaaactatgccaaatggactctaaatgacatggttataaacatagtgcggttgttaataaaatataggtattttgtcaagaacttgataatattataattaatgctaccaaaaaaaacttataatgtatattatttcttaacccattaataatagtaactttgatatacttcataatctaacaaacataacaataacaataaatgctattatatttagtattactatattacttatagtcatcatcaaaatttatttatatatctatagatatttaaaagaataaacaatttaattaactcataaagtgttgtgaggcttgttccaagtgtgtggttcacagttcaaacccttccagtggggaaaatgctcagccacaactataatggatcctaattaattggttcacaatataactaattgaaaaattgttattcctcaaataaagcttgaaggtgtaattacctattcaatatttaagtaactaaattgttgctgaatgctgaagcaagtttaaattatttttccgaataatgggaattaagaatccctaattagatgcctttttttccctcaaaaaggaaaaagaatacataaatgcataactaactatatatataatattattaaacttagccttagccttagtcttagttttagaggaagtaaacacacgcatttgcagtaatatataatttcaatttacaaatatattaatttacttagtcttagtcttagtttagtttatatgcataataagactagtaatatatatatgagtggaaccatcttatatatataattttacaatcatattatgaccattcaaacattcaaatattgtttaccgtttaccttaattttcattttaggtattaaaacacaacaaagtggctctaatatacgtgttcttcgtttttcttcccagaaacatatccgcctcataatatgaatatatgcttcggttttttaatttttcgaatcttaaacgtgcgtttcgaactaaatatatgtattgccattataataaagattaccattaaacaaaataagtatataaaatggtcaagttttttaggtagttcagatgctttgggtcttattttaatgtaaacaacatgcatatatataatataatattataacataagcgctttattggttgtataagtatttttatatttcaaactactttttttttaatgacgtcctacttggatccctgtcttggccggtacaattggtcgggtaacatttttagtttttattttttatattttaagaaggggaataaaaaaaaaacaaattcaatcaaatacatatggaattatgaaactagctgtatataacacattttttggtagccaaaactttgcacgagtaataaatcaatggttcatgaaatctactgatcgatctggttacatatttattaaactaaataattttttttttttgacttattactcaatatgtatttgtaaaaggagaaatataactaagataaatagatattgaataattgatagttttaattggtttttatgaattaaggataaaggtatggagccatgcatgttttcattgaatgagtttcttgtttccatatgaaagacaaaagaactattatatatagttaaattaattagcattaaaacaccataaagattgtgttatatattgtacggaagttttcttatagatatgtccgtatttaagtgtaatatatttaagatataattattccccacatgattattatgttggtccttttattttccttctctctcttttttttaatttaattttgttgaagaaagaaaagaaaagaaagaagaagagttattggtcaatctgaagagttggaccaaaagctttgccgatcaaagattcaatttaatcaattaaactccataagaaaattaataaactttccatcaaacaagtagtagcataaagctaaaaaggagggcatttaggcaaacaattaaatggagccagagtgtacatccttctcttgttcccaagccttggttacaaaacacattataataatattgatattaatataata

SEQ ID NO: 26064 - DNA, 1655 bp, Cannabis sativa
cctcaattatttaacatgttcatatatacatatatagtatataaatagatagatagttgaataatagtaatggtgatgaagagtaatgttttataattttagtgcataatataagtaccacacgtttttctttcttaaagaaaaaaacatcaatataggaacctttcactactactacttattactacaacttatcctttggagtgatccaaaggacaaattctaatcaaaatcaaaatatagacaaattaagaataacccagaaattaaacccccaaaagaagcaagaattaatttatatatccttaattatgattaattaattattaaaaagaaaattagaagggggatttgcatctaataatataaatatatatatatatatatgtatgtacctgcacagcgagcaagggaattccagcgaccttcaccatgaatagcaatgtaattaatgagagtgaggtcttcttcaacagtccatggacctcttctaaggtctgaattattcatctcttgatcgtgatcttgttcatcacttgatgaattattattataagatgaatttgatgatgagtttgttgttgttgttgttgttgttgtagaccttgatcttcctcctccattatttattatattcactttaatatccattttttcttcttctaaaatacaaaattaataattaataatatggatttgacagagagagaaaagagatggagagagagagagagagagattaattagagaaatgaaatgaaatgagatgagtacaggaaagacagagaagagtttggggtttttatagagagagagagagagagagatatgataatgaagaagaagaaagagaaaaataaataaatatatataaattaattaattaattaattaaactcattgtacttggtttctctctcttggtggaagagaaagagaaagagaaagtgactattatatattttttttattatttataaaaataaataaatgtatattgttattatgtatggatggatgtgattaattaattagttaattaaatctacttacttacttagttagaatttgctttcatcaagtttgacgctttggactttgcactcatcaaaaatgaatgtagtttaatttccttctcgaagcttgcacatgttctaaatattattgttatttattgttttttcttcttttctaataataataaattaatagataaattgtactataaaattaaataaatgggagaattatctcataaatatatatatacatagtataggtgttagtaacactaaaatgcaatggatatattaagtgatatgagagttactatttttatagaataataaaaaataaaaataaaataaaaactctcataaacttaattaaattattaaatttattataaagtatgattatttaattaatgaggatcgattttgaatcctcatgttatacaaaatttgctccaatttgaattttaagttttctcattggtaaattatagatttatatatataagaataaattacctattttaaaatgttgtaaattttcactacaagaaatttcatttttaccagcatagttcgctactgcgctggtaaaagtaatttttaccagcgcatttcgcaaactgcgctggcaaagagatc

SEQ ID NO: 26065 - DNA, 2898 bp, Cannabis sativa
cgtatggaagaggaagtcagtaaaaggcttgagccaaataaggaaagaataagtgggccacctgttgttagtaatttaatgattcatgggcaagatgtgttgatgaaggagaataataatagtattattgggcctttggattcaaaaaacgatgttgtggtgggttctggtgtccaggcccaccgtccattatgagtgtattaagctggaattgccgtgggcttgggaacctggggactgttcaattcctaaaagatcttgtgtatcaaaagaagcccgattttattttcctttgtgagactttgagtcttaaggaaacgcttgaaagaatgcgtgtgatgcttggtttcgaaggtgtttttacagtggacgctaggggacatagtggtggtgttagtattctttggagaaatcaaaatgaattggaagtattgggatattcaggaagtcatattgatgttaaaatttttaatgctgataagggaccttgacgattaactggaatgtatggtgagcctaaccgttctcaaagatttaaaacttggaacctgcttcgaacaattgtggatgaatcgtctcttggtgtgtaattggggatatgaataatattgttactcattccgataaaagaggaggcaaccgatacccgaatggcttaattgatggtttccaaaaagctcttaccgattgcaatttggtggatttagaactccatggatacccttttacttgggaacgaggtcgcgggactgataactgggtcgaagtgcgtcttgatcgtgctatggctaacccctcttggattaatctctttagttcagctcgacttactaatatggaagtatctagttcggaccactgtcctttgttactggaattgataaatcaaagtttgcatacagctcctcgacatttcagatttgagaacgcttggctccgagagcctctttgtgtgcaagtggttcgagactcatgggaagttgatgatggtgtatcaatcttagagaagatcaagagatgtggagagagcctttcaatctggggtaatgaatttactggaaatttcaagaatagaattaagcagtgtaaaagtgagattaagagattgaagagactacgagatgatgagtcggttgctgaatttaaaaaagctgagaaaagattggcagaggtacttactcagcgagaagttttttggaaacaacggtcaaagcaactttggcttcgcgaaggagattcgaatagtaagttttttcatgccaaggccacttcgaggaagaaaaataatgctattacaaggcttcggaatcatgtgggcaattgggtggattggaattctggattagaagatgttatttattcctatttttccgatctcttcacttcaacaagtgcattcactgatgtggttgttgctgatattattccttcggttactgaggctcagaatatggaactacttcggcctgttcttgaagaggaagtaaagagtgcattgttccaaatgcacccggataagtcgccaggacctgatggtatgaccccggggttctaccagaaatgttgggatgtggttgggcatgatgtggtgaaccaagtcaggagcttctttgattcaggtgtgttacccactaatctcaactgtactaatattactctcattccaaagaagaaaaatattagtaacatgggggatttgagacctatctctttgtgtaatgtcttgtataagattatttcaaaagtgctagctaatagattaaagccgttgctccctcaactcatctctgaaaaccaatcggcgttcattccgggtcgtctcatctccgataatatcatggtctcctatgaagttatgcactatttcaaacgaaaacggcaagggaaggttggttatatggctttgaagctcgaccttagcaaagcttatgatcgaattgagtgggatttcttgaagactatgatgttcagaatgggatttcacaaccggtttattgacttgattgttgctactatctccacggttcaatatacggttgttcatggtgggcatgcgattggtcctatcactcctagtaggggcattagacaaggggattctttgtccccatacttgttcctcctttgcacggaaggcctttcttcgttgattaagagatttgaaagtagtgggcatattagaggatgcaaagttgctaatggtgcacctactatttctcacatgctcttcgccgacgatagttatgtttattgtcgagccacagaggttgaagctgatcatgttcttcggctgctacatttgttcgagatggcttcaggccaacaagttaatagagccaaatcttccattttcttcagtgcaaacaccccttctgaccttcgggataggctttttactcgaatgggaatggcccctgcaagtgaccaaagtttctacttgggactgccttgcattttgggtagaagcaaaaaggcaattcaaaatttccttcaagaaaaaatggaaaaaagaatactcagttgggagggcagatatctttcaaaagcgggtcgagaaatactccttaaaacggttgctcaagctattccgtcatatgctatgtcagtctttctccttcccattgaaacttgtacgttacttgaaaggttaatgtctaagtattggtgggggaattcttcacaacaatctcgaggaattacatggatgaaatggaaccgcttaagtcgacataaaagtagtgggggccttggctttcgaaaccttagagattacaatatttcactacttggaaaacaagcatggcgattattgcaagaagatgactctctggtaagccgtgtgtacaaagcacgatattttcctcatggttcaatgttgaatgcaactcttggagccaa

SEQ ID NO: 26066 - DNA, 7802 bp, Cannabis sativa
  modified_base (3058)..(3066): a, c, t, g, unknown or other
  modified_base (4420)..(4423): a, c, t, g, unknown or other
  modified_base (4698)..(4701): a, c, t, g, unknown or other
gggggattgaactggtggaggtggtggtggagagtacactggaggtgggggggattgaactggtggaggtgggggagaatgaactattggtgtgggtggtggccgacttggatcaattggtgaacgtctagtgggatcagggggtggtggagacgagttgtgtactggtggtggtggtggtgaatgggggttgttaacaggtgatccattatggggctcaggtgatggtggtgatggtgagcgaattggtggtggaggagaggaaatagattgtggcggtgggcttctcggtacgccaattggagatctttttgtgggatcagatggtggtaagggtgtttgtggagggataggaactggcttggaaggtgaaggcccctccacaggtggtgatttcgggttttgtttgggaggatttggagtgggttttggtgattcttttggcgttggaggtgcctgttttggtggttgtggtgttggcttttgaattgggacgggtaatggtttatttggatcgttcgttgatgaagatagtccaccgcactttgccttgctgcaatctattggcttgctcacaatcggttgacattcttttgctgtcttctgctttggcctatctggcaagcaattgcttatgtcttccaacacaatgcctttattcttagttggattgcatttttggtcctcaccattgaagtaattgtaagagaatttcaagctctccaaattgggcaactgacaaatgctatcttgaacaaacccagttagtgtattgtgtgaaagattcatttgttccaccttctggagggacttgaagcttttaggcaaaatcccactcaagaaattggagccaatatcgaaaactgtgagatttcccaagttaccaatctcagttggcaaacacccatgaagcttattgtttgacacaataatctcattaagagtgttccccatatttccaatgctactgggaatgcatccatagaagtggttattggcgatgaccaaaaccgaaacaggagagttgcccagagtatcaggaatggtagatgtgaaccggttattattcaagaacaaagcgtccaagtccatattaaagagatctccaggcacaactccctcaaaatcattgtacctgagatcaaggtacttgatgtttggaatggatagaacaacctttgggaaaggacccacaaatctgttgttgctaacatcaagctcgaaaagaagtgtgagcctggagaagctctcaggaatgacaccacagaacctgtttgagttgatgtgaaacaaagctatttcagtcaacaatccaagttccacaggaaggtagccagcaatgtcaccatggttgagatcaataccagccaccacttcctcggtcgggtcatccaaagccggcgaacaaaacactccagtgtaggaacaaacatcttcaccaacccaattgcccgtaacattaagtggatcagaatagatagcattcttccatgcttggagtgcaatgtatgcacgtttgagtctagcgtttggaaaagtaacacctatcaaatgaatcgtctcttcaaagtcatcaggtaaatccccgccctctttaagagtcagcaactgtcgacgagctataaaggacgcctcagcatcagtgagagcagaggagaaagaaaacaaagtagtaccgaagataagtatgaagaagaaaaagaagcagcctgaggcctgcattttgggaggaaattgcagagcgccgccaccttggataggcccaaggctgcttataggaagtcaaggaaaggaaggtgaatgaggaatgtgttatattgagaagggaaaaggaggtgtttgtggggttatgcaacaaattctctttaagaaccttttaatgaatggttttggtttttattcttttgcaccacaaagcaaacatttatctcctgtttttggttttcatgtttgttattttttattttttttcttagaaaaagagctctaaatttagggaggattttggtggcttttgtctaaatttgcaatttgatagttggtaaatgattaaccacatactatcaatgcctaattcttctattttttttcagtgcttccaattgttttggttcgtttgatttgttattgtttttgttgttttagtgtgttttattatctcattattttactttcctatttttcacacagaaaaagtcggatcttgttatcaatttgtttttaattttttacaatgaaaacttattttctattattacaatagaaatagatattttttaagaaaaaaaaattatatacaataaatacaaacaaaatgctatatataagctaattataaattattatacaatatatatataattaaataaatatagtgctattatttagcaatattccaagaaaaaacataaattcaaaccaatgacaaatatgatattaactcttttagtgagaaaaaaaaaaaatcatgttaagaaaataaaaatattaatgttataacattttgcatggaacttctaaatggaacctttagtagtgttaatgttgtatacatgaatgtttatttatttattatgttatatataaatgaaagttcattcaaacagacatattggaaaatataaactagtttgtagtgtcaacaaaagatgctacattccaaatagcaataggaattttgctgctcttatttgctgtaataagagtgaaacgatgagtaaaaaaaaataatgagttgattgatttgttgaaaaccaaaacaacaaatcagtaaaaatcagtacaggagaggagaggagagcctaacttttgaagatgaatgcttggctctttgtcatgcattttccatatgcttgaagttaggttgctcagaagcttgggcttgattattctaggatttgaaaataattttatgttttaaaaaaggtaaatattattttggattttctattttgtaaaagttaccaaaccttttattttgttaaatgataaaataaactctgtattttctaaaattgtacaaataggacattggactaattttttgtcaaaataaaannnnnnnnnaatttgatctagagatgttatgacaaaactgattacattttctatatctgttcgtgttaaagttggttatattaaaaaaaataaaattgctgaaaattaaattcagggtcctatttttaccattttggaaaatatatggtctattttgtcatttaacaaaacagatgatctaattagtaacttttacaaaacacagggtccaaaatgatattaaccttttaaaaaaatttaacaataggaacgtctgaaggtccgacacggcccataggtcaagtattttcgtgtcttgctctgattcgtgccatgttttgctcgtaccggtccatatttcttaaacagaccagcccattttatatccaaacttaaatttgtgctttactttttcatatttttttacaattactaaattatatgtatattttagagctttagttatacttatataacttttgaacaaaattttttataaataataatataaaaaaattattaacatcattaaaatttgaatatttacttttaaatactcaaatttttatatcatatcccatatacaaattaatatgtaattttaatttttcatgttttaatagttttaattatagaattgtaatattcagtattatatttaaactttattattattttatcttatttataattgataaattcatattactattattattaaattataatattttttaatatgtcgttccgtgatttttagatttgtagcatcatgtcgtgtcatgcccgagtccgtattttttcgtgcctagtcatgcttgtgccttctgggctcgtatcggtttcgtgcagtgtcaaaaagcccgactcgtatttacaacattagttgcaggtaatgaattatggaatggaaagaaattaatttttatttcattcatttattttgttgtattttaaaggatcccaatgcaagataagacaaaatttaattatttttttattaatttttttaatgtattttaaattttattccgtaacattcttattttaattcttatatttttatttgtccatgtaaataccacctaaatggtgttagacatattatctatgggcgtaactgcaattataaacactacattacataattctaattttttatatgagtttttttttcgactgaaccctctcaactatcattttaattgcacttaatcctccaaactcaaattttggtggtaaaaccctccaaactactgaattgttagcacataaaaggtgccatctattttcatagttaactgccaacattaacggcttatgtgtacactcttgtaaacgtggcacctttatattaatatttataatatttttttttattttnnnnttttataattttatttaattttaagacgaattttgaaataatttgaaataatagtattaggtgtactaatataaacatgccacatgtacaagagtgtacatatattctgtccatggtggcagttaaccggacgacaccttaaatttgctaaaagttcattagtttagaaggttttatcgctaaaatttgaacttaaagagttaagtacaagtgaaacgaaagttaagagggtttattttttcaaccaaaactctttttttttttaatatatatannnntatatatatatataacattgtttagtgtaatcataatgaattttgtacagatttttcattttttttaaagttatttttgaaagtttaattctagtggtaaaaaaaaaaaatagtctctacatttttttcctcaccaaaattaaacttttaaacatagcataaataatatatgataattttagaattctaacatggctacaagcttaacaatttgtttttgagcatttatattagacattagtgatatctagtatcatctagataattagagatattcaataataattattaaattaaattatgtgagacatatttattttatactaatagtataattctataaaatgttaagtactattaatatcttttagtatttttctttgtttttggcatttttttgtcacttcaaattatttattgaattttagaacatacaaagaaatcttgagtgtgtttggtaatactttttttttaattagaatagtaaagtcactctcaatattttttcttaatcaatattttagattccgattcctacctggaccttgagatctacgcttagacaccagacttaaacccgacccggttccgaacatggacacagacctaaactcaaacccaaactcagacctagatccaaattcagcattggacccaacctgaaacttggactaaacccgacttaaataaaatcaaatttatcaagcatatatattttttttttttatgttttttaaaattaaaaacaaaaactaattacagatcacttacttttatttatgtgattaaaaaatttaaaaactaaagtattacactttttgtttataataaataaacatagtatcataaaaaccacaagaagaggtatcattcatttcttctaaaacgtatataaataggtatcagcttatagagaatcgagagagaatagtttcaggaaaaatggcgagcagtagagttgggagtgggagtggaagcattacaggaagtaatacggccaaatcaatggtcactgatcagatctctcaagccatactctccacctccaatctcctccatctcatgcaaacatcttctccttcccaggtccaaacccatcaccattttcatttataattcatacaactctcaaaatcaaattcctcatttttactgcaaattacatttcttatttgctttcatacatatatatgtatatatttatatgtgttcgagggaccctcgttgtagtggtctagaatagattgatttaatctaatttccagaaaacaaaatagaacattggatgggttgttgagtaattcaaagcaataatttcaaagataaattaaagtaattatggcttgataattgaaattttcgtaatttcattgaattgacctttgttatttgaaaagatcctggaattggatacagaaagtgtaaacttaggttttagtgtattgagatttctatattgtgacagaggacatgaaaaatttgctgagaccattattaggaggattcactgaaattgtattagtacaatattatgttagctagcttttctatgtatctgggtacatgtattaaactcttattatgacctgaagaaataatctttttgtttatcaaaatttacatttatatttctgtaaggcttgctacataatggaacctcacagtttgatatggtagatacttgaattattggcttcatatatctgacaaaaaaggaaaaagtgaaaaaaagtcttcttgttaaaaatattaggactcaaagtttttagcatatttgaattagactgaaagagctcattatacaattcaaggcaagctttgatactgtttttgagtttgaccccttctaaaagtctttttttttttttttgagtgacccttctaaaagtcttttgaattggtaatcttcaaaactctaatgttttgtgcagacccaactggtgaagcttccaaagaatctcttgtcaaaaacacctacaattaagaatactggacaagtaagtagggcagcagaattacaatgattttagcttgactaaactaatcaagaagattttaagtctctaatttcaacttttcctctgggtttatgaagttgttagagcatatgcctcgggtgatttcgtccctggatgtacatatggaaaatgcaatgcaaaggttgtgatgatgctttatttgtgcttatcattttatatttacactactttttcagtaaagaatatggtaaaccaagaactgtaacagacttggagtgcttatatctctattcctaattgttcttacttgatttacaacatttgcagtgctcctcatctacaaactgtaatccaattactttcaaacatggaaagcagtcagcttagttccctctcccaagtgcatcgtcctcgagaggttataactgttttttttcccttcttattgtttccattttctgtgaatcacttcatattgttcattaagatatcttattttgacacccttattgctccttctcccaggagcatattgcagaaaatcaaccttctgaactggagtaagaaaatcatccattttttttccttcccaaaaatctgaatttgttagtgactgataaaagataggctttgttgttgtgacaaatattctcaatcaatgatgtagaagtattggcctttcttagtccaatttcattgtacataattgtaactcaaatgatgttccaccttgtagatgaataattttagtttcaactacttttgtttttttcccctaattggtatcatttgtttttttagaattgctatagtatcttatggtgttacatacgccgtgcctatataacaatgctatttttgtattcttattttgttgaacaacttttttcatattttttttgaaaagacaattctgatagacaatgaaatatgaatataatatatatatttgcattgaaaatacttaaattattatgtaaaacttaagtattatgagaagtatttggggctcctttgtttttgcgggacacaatagatccaacctttttcagtctatactggatagggtgtggaacaatttttttttttttggtggaagactaaatctttttctactggagg

SEQ ID NO: 26067 - DNA, 2426 bp, Cannabis sativa
ctttccaacctcccttaagagatttctcaaaacctctgctcatgcctatatgcgatgtcatcaagtcggcttcacttgggcaggtttctgcctgtggtaaattggaagctggagctcttcgtcccggctttaaggtaaaagtcagtaaaatcaaatatacataacatgacctttaacctttgacatcatctgctctctgttcttatctcattttaagattatgcttgtgttaaccaaattgttagatgtttcatatgcaagaatcttgttgcgtacatgcatttacttctcttgaatatgcaggttctggttatgccttctggagagataggaaccgtgcgatccttagagcgtgactctcaggcttgcaccattgcaagagctggagataatgtttcagttacccttcaaggcatcgacgggagcaatgtgatggctgggggggggctatgtcatcccgattttcccatttttgtcgctaaacatttagaagtgaagattctcgtcttggatgtgacaactccaatattagttggttctcaggtgtgtattgttctcatcatcatcacttttcatttttctttttcttaaattggagacttatttgtaactggaatgagcagttggagtttcacatacaccacgtaaaggaagtggcgagagtcgtaaagatagtatcattgctcgatccaaagacgggcaaggtagcaaagaaggctcctcgttgtcttactgccaaacagagtgctgttgttgaggtaagttcaaatccaaatcctcttaacaataaaaaaccgataattgtcttgtctctaacattcttttttcgatcttggttcgaattcaggttgttttgcacggatcagtttgcgttgacgagttctcgagttgtagagctcttggaagggtgtttctgagagcattaggacgaactgtagcggtcggcattgtaacaagaattgttgagtagagtaccatttttgatgtatttttacttcaatttagtatttacacaaatcatgtaccttaattattatataattctaattcacagttttttttttttgcaaaaaatgtatgggctatacttatttattagtatactaatcttggttttattttctttccaattgtgcaataataagacaattaacattatataattacaccaatatggcattatataataacaaaattatacttattttttaagctagtgtattttaaggtatttgatccatgttatcaagaaaaaattgttgaaagcaatgtgtagacaatgtatagcataaataagtattgtatttttgtaaagaaactacttcaaattcttaaagatattgcaattgaaaaaagtgtatattcatatatttgtaatttttttaattaattgataatcagatcaattgacaatatttttgtcattaatttaataatggaaaattgcaatagtggtaatacaaataagtttataaattccgatatggaccacataaataaattaacttatcttttcagcattgtttagagattgtatttacggacaagaaaactaaagggcattggtgacctgagttattatatatcgatattggtataatttaatatcagattcattatttattaatgtaataattatcataaaaaattatcatctatttgaaagacgtctctataagcattaaaagtatctaataagctaattaattgacatggtgaacaaaatctaaaaaaataaataaattatttccatggttttccaagttattgagaaatactaataataataatcaaataattgtaataattaattggacaattgtgatgggtagttggaaagttgctagatttccaataaataaataaataaaataaaaaatcttagaagtataaatttgatgatagtgatgatagcgtgttaaacttaaaatatgtacaataattaagtagtattagtattttttattttattaaaaataataaatatattaattatgattaaaaaacactctgagacgattatgtattggtggttttgaccctgtttctcttgttttggattttgatgaaatccagggctttaaatttcactctccaatccataattagagtttttcacattctttcaaatatagtcttaaaaaaaagtcctaataacagacttttgtgagatcacacagccaaccaaagtaattcaccattagagcaatattctattttcgaccttcataaaacccaaccccactatacttcttgggtaagcaaacattttcccaagaagtaagataaagtttacttctattcccattagcacccccaaaggaaatctacaacatttgtcaatcgcaacaacaattttatgagggagtataaagatacttatccggaaatttctaatgcccaacaaaaccgagtggataagttgc

SEQ ID NO: 26068 - DNA, 3719 bp, Cannabis sativa
tgtgttttaaaaacttcaaaaagtgttttttgttctcatttctaaaaacaattttttgaaaacgaaaaacagaaaacaataccaaacatgctccaagcatgtggggactcgatgtaactcatagagattcagaggactagagttgggtatatatttctttaactgttgcaaccttcaactccttctcaaatattttttttatttatttaatatatttttttcaaatgaaaagtttttttttattgttttaatatattttttttttgtattttgaattaattttttttttgtaaaagaaataattatttatttagcacgtttattttaaaagaagtagaagtctatttttttttactaaaataaagttttattacaaatattataatcagattgttcacgtcttaaaagtattataataagaatttaaaaatataaaaataaattatatgtaaatattaattaattttcttaatatagttattttatttataattaatttaatcaaaaaaaatccttattaataatctattattacaaatttaaaaaattattaatgtactaatatgataacattaaatatataattattaaataattatttgagatttttacaaaaatattaaatttgagacaaaaatttacaattttaatgttatatagaaatttttatacaaatattatctttttataaaataacaaaacataaaattaaatcaacagtaaaacaattaaaaaataatagtaaaataatagtaaaaacttaactcaatataaaacttacattatatttttttaaaaaaatttactccacaataaaaaaaataaaaaaattaaaaattataatatgtggtgcataacaatcaaagtacggccacgaaaatgtacacactcattaattttttttttttttggaaagaggtacacacgcattaattgaatacacaaaatggagccggacactctgtcatattttcttatttaatttcctgtccaaccaatgaaaagaaaccaggccagataatgaattaacaccagtaactcaccactcttatcttctttcaccctcaactctagtaacactcttatgctaatgaataactaattgggcccacctattttttgtccacaaatttctctttattactatttgttttttgttttatttttatccttatagttttataacgagtagtttgttgttttttcggaaggaacgatttttttttaacttcaaattcctctgtcttaataaattgttgctctactccctcccatggcagattcatataagtataacaaaatttttgctatagttttacttctggtaaggtatctgtatttataaacttttcatgtattacattggtaatcataaaaatttgagtgatagtgatatctaattaagctgagccactaattttttgttgagaaacttacaaaaatactagttttgagcaaatttttacaattttactgtcacaaggtaaaaataacatttatacggtcttattttttttttttctttatactgttaacacaaaaaaaaaaaagagacttccatcttctacacccacagacaaaattactacacagcaacactataacaaccaaaaaataattattaattccaacgagatgaagcagaaatattaaactattaatactgggactatcatggttttttttaatgttgtttttaggttgttctactgttgtttcatatgttttaacaaatattggtttcaaattacacatgttaaaccaactactagaatgaaaaaatcatggacagtaatagtcttactttccattaaaagggtgaaatctacaaaaccaaaaaaacagatagaagttggctaggaaaagaaataacataacaaatacagcaaaaaatggggagctgagacacaataagagaacatacaagagaagacatcaaaaatgaaaagaagtagaacaactaaaaatcaacagtggaacaacacggaggaaaactgaatatatattggagcataggatactaaaaaaataacttacacacaaatttaattattttcctattattattaaatatagagcagtacaataatatttgaaaaaatgtaataaaaacaatgaaagaaacaacagtaaaacaacattaaaataataataaaataaactagtaacagaaaatggtaagttggagaaagatgatggacttagaagtacggtagagatggagccaacgttttgagactaaagagactgaagaacatgaacttttttttttttgaaataaagcgtttatatattagaagaacaaagcagttagacctcacggtcattacaaaagataatattcggaatagtagaaacctctaccataccagaaacattattggcaaaagcccatttggccacattatgggccgcaaaattacagtttctagaaataaaagaaaaattacagctagtgaaaaaagtagagagatgcttgcattgtcttgtgtagttctcaagcctccaaaaagattcgacaccttttaggttcttgaccaccatctcggaatcactctccaccataacaaaagaatgatgcagtttgactgccgtctccaatgctaacatacaagccgccgcttccccgataagagggtcaaagaagtgaagcttgtttgttgccacccacaaaatcgactccgtatgatctctcgcaatcaccaccgcacacatggtttccactctgactctaacatcacagttgattttgacccaatcctctggcgggggagaccaacccagagtaccatcaacctggtgagacttgaacaaactggatccataatctgcataacaataatatatagagtcaatataatgtttcaagctacccaaagtgttattatgaaccttgtcattttgagccctccaaatcgtgtcaaccacgattgaagcgcaaagaaataaaccatcagtatccactcctctggtcctaaggttccaaagaaagctaacccagtcccacatgcgggccccagactccacaacatgcataaccccccaaggggaagatctccaaaggtgagacgccagatcccagtagagaaataaatgctccatagtttcatcaccattaccacaaaaggggcaagagatctcatcaataaccattctcttagaaaggatagcccttacaggtagatcattcgagaggatactccaccagaggactttgtgacactccaatttttttgaattccacagcttgttccataagttcggagctacattacacaaaggagcccgtcccatgacttggatgagatatgctgatttagtagagaacctaccattagagttctacaagaagctcgtcacaaagcaagctctcaatttctctctctcacacacaaccacacctttatctttctcaaatcttcttctttttcctactttacatactcttttttttagttacccactacaaaaggagagggttagtttttctttggttaatgttgtagacatagaaaaaaagaagaagaagaagaagatgaacagggaagataaaactcaaaaataatgaaaaataaaataaagagtatttaattatttgcttaaaagtaatatatatgtaagcatctccaaagaaatactaaatttagtgttacactatcaccaaatttagcgtcaaaaaatatttctactccaaccacaacactaaaacttacactaaa

SEQ ID NO: 26069 - DNA, 5092 bp, Cannabis sativa
tttaaagtctatcatttttactttttttttaaacattgtaccaattttatccctatcatttcaagatactctccatgtgattcttttacgtcaggtattttaggtataatacatataaaaagaggtatgtttcaattaaatataaaattagagataaatttgattaattgattaataaaagtggtattcctaaacttagaacaaaattaagttggctccgaatcctcaatattaaaccgggtcgttccaagcaagcctttcaaggtcgattcaaccatggctgacaaatcggcgacgcgacggcacacatcggagagaatggcttccaaaatttttagaaacccaaatctaattttccctttcgctttgatctccgctgatgcgctgctcatatctctaattatcgcttacgttccttgtaagatcaatttctcttgctctatctctttaacaaattttgtaattgtaatgtcataattctcccccaccattatcagatacaaagatcgattgggacgcttacatgtctcaggtaacaatttttctcaatcttgtgtttctaaaactttcagaactattgaaaaaggaaagctgagattgaagatttttaattgaattctatttttttttaaaaggttcaaattgactttcttagcttctcagtggatagctagataatttttcgttgatttggattgattttttgttttatttatttattggggtatgattatgaagaacaggtcattggttttcttggcggggaaagagattataagaacttgaaaggtgacacagggccattggtttatccagctgggtttctatatgtttatgctgctatcagatatgttactggtggagaagtttacccggctcaggtagttgatttattctatcttttaaatcaaaatctgtgttcctgatcaacaatgtttgattttttgttgttgtaaaaatattatattggtgggagatacttggcttgaactaggaagaaccatagaaactacgctatatgaggagaaagagaatgggatgatttgcctgagattcggtggattattgctgtgaagataaatgaagaattaaattgatgatttggatttaagaataaaagggatgacaggatattgtgattataactttgctaacttatctatttatctttcaaagcttaaaaattcccttgatttctttctttttctctttttcagttctcatcattttatttatgtaatatactaattgcatttaaatatattaattggctcttaatctctttgttacagattttgtttggaattctgtacattataaatctgggaatcattttggccgtctatttgaagactgatgtggtatgaaaacagtttgtacatttttctagtgtctgacactagtagtatttttccttgaacaaccatgtaaaactgcattatttgttgtattgcttaatttatttttaaccttattgagttgtttgaagctcttgtttttgggacttgcataattaaggaaattctgatattttacatcttttgatttaaatgcaatctgctcaattatttgcttcttctacttgaaaaggccttgttttttatttttgcttggactcttaattgtcttgcagcttccttggtgggctctaagcctgcttcttctttcaaaacgagttcattctatttttgttcttcgtctttttaacgactgtttcactatgttgctccttcatgcttcactggcttccattatttaccaaaggtggcatctggggttgatcattttcaggtatgtcttttgcatcttcattcctttttcataaggtagatgacgttgattaaagtttgtttctggcttctgtagtggggcagtttcaataaagatgaatgtactactttatgctccacctttattaatcctaatgctaaaggtacattccatttagaattatatctacatgcaaaaagttatctaattgaacgttttacaggagcaggcattttctttatagtttatatttaatattaatttgttttaaaatgtcttttacaggctatggatattactggagtgatatctgctttagctggtgctgcacttgtgcaggtgcttatcatgcccccttttgctttctaaggatttaagttttctgattatttggttttgagggctctaaattttgcatgtgtatactgttattattgttaatatttacagagtactcgagtttttaaatgcagaagttggatgataaattttattgatcttctttcaacatgactaggtgagttggacttcgagagcatttcctgattgtgatgttcagtttctttcccctcattgatgaatggttgtgcagatacttttggcactgccttttatcatatcatatccattttcatacatatcaagggccttcaatcttgggcgtgtcttcatccatttttggtacattgggctggttcatgaaatctttcaagattttgtcatatgaatttttagttcagctaatttaataatttggacgatgcagagataaaaactaatatccactctatttttttcaggtcagttaattttaagtttgttccagagccaatatttgtttcaaaatcatttgcagtctctttgctgattgctcacctcggtctgcttattgcttttgctcattataaatggtgcaagtaagttgaagaactttttatcttctgtttgagtatgatttaaaagttaactaacattgcagagatcaggtaaggaaattcattttctatgtacttgtgttacacatcttgacattataattggtataagcctcttaaacccgaattttcactcaatatgtttatgtgattgtcatttgcaggcatgaaggaggccttctaaattttttgcattctatactggtctctataaagttaagattatcaccttccacctcaaagaattctaacgatggtcatagatcattgaaggtgctcaaagcagaacgtaagctttggcattctcataaactttagttcaatatccatcttctgcttcctctttatttatatacatgctgtcttctctgatgttttcagatattgtcacaacaatgtttgttggaaacttcattggcattatatgtgcccgatcattgcattatcagttctactcgtggtaagttctggtggaccaaaattattgcctgtatgccatgattttagtatctttaaaattgctcctcgctgccacgctcatgtttgtagatcctgaggcttttagccgttaaaaatttaattgggattcaccaaagttatcttcttcacttaaatctagcttatccattgtcatttaattgcaggtatttctatagcataccgtatctgctttggaagactcgttatcctactttgttacggtatgtttgtttccatttccggccttactttatcccacttatgaagttgtatgatgattttgtttgccctgcagtgtacttttgtttatcggaatagagttctgctggaatgtttatccttcaaatgctttttcatcagcactcttgttatgtctccatttagtaatattgtttggtctatggtctgctccatctgaatttccttatgtgagcaatacaaaaactgaatagacacaagaaaagacctataaaacacattaactgtttctttgtgttgttctgtccttaattttgcattgttttgtatacttgattatatataaaccacaaggaacaccatgattgcagagaagaactagtaattttcttagcatctattgcctaaggcgttgttgttgttgggtctttttctagtagactttactgtttaattttaaattcaatttatcagttctaattttttgtttactttagcatatagtacaccaccaaaaatgctgttatctcgagacaaaagctaacttataaaatgttggatagtgggtttcacaaattttatttttaatttatatagggctagtatagttgtattgttggtgctattagcaattcttattattatttcttgtttggaattggtatgtattggactcatattttgatagttgaattatttttagataaatactaataatttggacattttctctttatcctatgtttgctacaatgggtggaaaattgaagagagaaaatgggggtagaaagaaaaattagaaagaagtagatgaaaatatgatgctttctttattatttggtatttaggaaaggaaaaaaaattactatattatagtgcattttataacaacttttttaatcaattgttttctttttataaaatgtgaatattttcaagaaatgtattctacaaaattatttttactttttcaatttttgaaatgaaaataaaagaatttgaaggaaaaaaaaattacataataaactaaatatttggaaaaaaatttcaaaaatacattaacatggaaaaaaaaaattacgctttgaatttttttatttatgcaaatatcttttttgaaaaagtaataaactattttttatatatatatatatagtttatttatagttgacatgaagttattattattttttttttgttattttatagttatcgcgagatttatttcttgttgtcttttggttgtcttctttccttttactaagcaaagactttacaagtgtgttttttaaataaaaacttaaggccataaaattttaaaaacataaaaaaaaaattatttttgaaaattactcctaaaaaaatcactttcaaaatttatttatatatttttttttcttaattataatatatttacattctctttcattaaattttggaacgtgatctcaatttgggccccaaaccttagaagctggccctcagaccaagaactagaccctagcccagacctgactctcgaacccatactcaacccccaaacttgtacctaaccccagacccagacttgaacctcagacacagtcccggactcgtacccgaaccccgaccccagtacctaaaccttgcccccgaacctgcacctgccctggacccttacctagccccgaaacccgtatccgacctaaaccttgtaccctagcttcgaa

SEQ ID NO: 26070 - DNA, 4240 bp, Cannabis sativa
tgaaatgagttgtatttagggcacaaaacccaacaaaaactaagagatggcatgataagaggatcaatacaaagtatttgaagaagggcagcaagttctattattcaaatcaaggttaaagttgttaccggaaagttaaagtctcgtttgtcgggaccattcaccattgccaaagtgtatccttttggagttgtggatgtcaaagacgaatagtccataagggtatttaaagtgaatgggtagcaactaaaacactatatcgaggggaaggtcgatcgagcaaagacctccatcacattggaagaggcttgaggaagaaggacctcgggttgtcatggcttgagtgtatcacatttgggcagctcgagagtggaggaacaagattatattaagttatatatatgttatgtaataagtttggggtgtgccaccccttaaaaaaaaaaagaagagtatttaaaattaagtttggggtgtgccactccttgttaaaaaaaataaaaaagagaaaaagaatatatatatatataaatatatgcatacttatataaatatatatatataattttcaacttcttgtaatggatttgtaatggtatggtgaatgttattggaggtgcaaggtagaaaatggagttgtgcaatatgctaaaaagcaagatttattgtctgaagcaggaggtcccaggaattatagcatcgcctcagcattttgaaacagtgatgcataagagaatgaattgcaaaagcaatgctataacaactgggagtaatgggttctaaaaaaaaaagaaaaactaagagttgaatataaatttcatgaattcagctgttttcgaatatacacatatatatattaatataaatatataaaaaaatatatatataattagtatacaaataatataagtatttttatatatatagataaatacatattaatgaatgaatagatttttattttttttttcttttaattttcaattttattgtttttattattaatcttattttatcaaaagaaaaagaaaaaaaaaagagtcatcatcatcgtccccaatttgtgcttctgaacaaactttagccgcataaccaaccatccacctccactgccacccgaacctccatcaccacccagttgttgaactctacacagccagcctagcacctccgtttccgtctatagccgaaccactacccaggttcgcccaggaattgccaaagctccacctccatttcgcacagccagcccgaagaaccatttccaagcacatccaccatcatctaccgttcatttccaaccagccgccccattctcctccattaacctagaccaccagcatccatcttcacgagctctgacaccactattcgtctccaccttcactgtccaatagccaaaacacgaaccaacagctctgtccatgcacaaccagccacacacccaagtcatccctatgaatttcaagctccaaccgaagcttcaacatcaacactcaagagcaagagtttgaagtaccatcaaccaccaagctcagtccaatagctcaacctcgaagccactcacggaggattgtacctaattgagtaacaagtcaagtagtgccgaggaatccaaaactacaaatttgagccaacacgagttaatttctagtttgttgaataacattgaaaatttacttggctgaattgcatctttcgtgatcattgttaggttgtgctatttgaaaaaaattattgtggtggtatattgatctgatttatttaatctccgagttatacttgtaataccctaggtttcagagaatggattagcaaaaccctaactagttaattgtgtattattgtggaattatattattatataatttattataagtgaattaatttgatatatgacatgttaagaccccgttggtgagccagggatattttagtaattatgacccaagaagggtaaaactatgaatttaatttaattgtgtgcttatagactatattattatatagtaaacttgtattgtccttttgcatgtgttttctgaccagtcggtgcggtatagtcacaatcgggtatttcgggccgaaccgagatcggggccgaaatacatttttggaattttatatttgtattttattaatatatgattaacctgaaatttatttgaggttgtatgtgatgaaaatgacaatgttgcaattaaatccatgcttatctcttatttggccctaggggcattttggtcttttgaccatttatttgatgtttcaagaaaatgaatttttggtggaaaattcaaggcatttactctggttttccagtcctaaaacccatcccctcattctctctatttctcatctcttccaatttgttaattcttgaatattcatcttcaatcaagcttggatttgtgattgttggtgcaagtttgttggaaaagcttgaggtaattgcttcacctctaaatttctatgtttaaaggttgattattgtgataaattcttgtgctcttgatgttcaaggtgattgaatgcatgttgtagtgaattgaagtgatattgatggttcttatattgtttgaacttgtggaactttgggttattaatctagattattttagagagtttttaaagtggtgattgtgttagaaatctgagttctggttgttttcatgcatgaattttagttatggtgttcaagcttttggataagagattttgataattttagctcaagtttggagccttatcgtatattgtttaaatctaaattttgatgcatgtgagctttgattttgagctttaaatgtgcgtattagctctctattatgatagttatattatgtgggaaatgattttgagatatatgcatgattggggtgagtttgggtgagttttgatgcattttttgagctgctagaatggagttccgagttttcaacccaggcgtcgcggcccagcttttgggcgccgcggcccactcgcgtggacaaattgcatatagaacttgttttgttcataacttttgactcgggactctgtttgggacgttctttatattgttggaaagcttgttccgagctatgtgattatcaggaatttgaatgccaattttacaattgtgaatcccggaaattgtgactaggattatcgaaacttggtcaggagcatccagggatttagaatctccatgtttgcgggacatcaggtaagacagtagtttttacgtagagttaagcgcggtggcgctcatattttatattatgattgtgattaattgagaaccaagattaaggttattaccttaaaatgagcggttatatggtccaggattattaccctagtaattaaaagattttgagtgatatgccatggttaatatgttggaataaataattatgcgcctaaggcataattaagctagactcggtaagctagtaccttgagtttaattaaatgcgggcgagggttattaccctaaaatattatgaaggtaagaaagttatgatgtatggtaatattgttaatctagtaaagacgtgagttagggttattaccctcaatagatgttattttgagcatactataatatgttaaatgagtgattatttagtatacaagttagggttatgaccataagattctatatgttatagtatatattgagtgcacccaattatgttaagagttatgtgtataagacataactgggttagacctggtatatatcaccaagataaaccaccgaaagaacgtaatgtatggattacgtatatatataaatagggttatgcgagcaaggcataaccgtattagactcggtaactataaccgagataaactctactaaggccttattataaatagacgtatgagtgtaacacgtgggtctatgctatatagacataaatagacgtgtgagcgtaacacgtgggtctatgctatatagacataaatagacatgtgagcgtaacaagtgggtctatgctatatagacataaatagacgtgtgagtgtaacacgtggatctatactacatagacatgaatagacatgtgggtgtcacatgtgggtctatgccacataaacatataaaggcgtgtgagtgtaacacgaaggtctgtattacatagacagttagtgcagtggcaccattaattatgtgctatatatttattgtgtatatgattatttatattgtcttgctgggcttggctcacgggtgctctactgtgcagga

SEQ ID NO: 26071 - DNA, 2247 bp, Cannabis sativa
gggcacaaaacccaatagtttcaaagttgacggacaagtgtgttcccttcttcaacatcctctgaggcaataagaagtttgaatggatagaggaatgcaagaatgctttccaagaactaaaaagacaactcgcaaagcctcctgtactctccaaacccttggacagagaagaaattaggaatatacttggcagtcaatgaatacgctataagtgtcgtgctgataagagaagaaacaatgtccaacatctagtctactatatcagcaagtgacttgttgaagcagaaagttagtatcctttaattgaaaagcttacttaatgcctgatcttagccacatggaagttaagacattatttccaagctcccctgtttgagtttataccgatcaacccttgcgccaagttttgcaaaatcttgatgcctcttgacagttacttaaatgggccatagagttgggtcaatatggaataatttcaaccacgcacatcggttaaaggacaggttttggtggactttgtggtggaatgtacaggtaaagagaaagacagtacaaatgatagccccaagccaatacaagagtctctaccagaagaaaataaagacaaacctatctagaaattacatatggaaggattagctatcgaccagctttctagtgcgggaatcgctctcatcacacctagggagcaacccctgcatggagcaatcaaatttggattcaaaagcctccaataacgaagcaggatatgaagcaattatggctgggctgaagcttactcgcgaggtacacgctgagtatattaaagtctgcagtgattcatagctagtgataaatcaagtctcatgagagtacctagcttgtggagaaaagatgatggcttatctaagcaagatccaagacctgcttgcacaattcaagggttacaccctcaggcaaattccaagggaagaaaacacaactaccgatgccttggcatgacttgcgagcaacatagtgatagataaggacaacttagttccaatccaattcttggaagaacccaacatcaattgcacagaagaagtcaaaatgatagatacagtgccaaactggatgacacccatagcaacttacctcaatacaagaaaactcctaagtgatagaaacgaggctcggaagatgatgagaaaagctacgcgatacatcatagtacaaggtgtgatataaagaagaggcttctccatgccattgcttaggtgtgtaacaaaagaagaggctacacagctcatgtctgaagtacatggagaattatgtggtaattatgtgacaagccagagtttatcaaagaaaatactaaggcaaggatatttctagccaaccatgatggaagattcaaaggcccacgtaaagaagtgtgacaaatgccaaagattttcaaagatcccccgtgcaccccctaatgagctaattcagatacaaagtccatggcccttttccatatggggaatagacctgatcagacagttccccaaggggaagggcagagtacaatatgcaatggttgcagtggattacttcacaaagtggatagaagctgagcccctggtagccataacatctaagaaaatactggattttgtagtaaaaaaatatcatatgtcagtttggacttctacacaagattttctcggataatggcaagcagtttgatagctagatgttcacaaatttctatacggcacatggaatcattaagattttctccgcagtagtacatccttacacaaatgggcaagttgaggcaatcaataagacactcaaaggcaccatgaaaaagtggcttgaagaagcgtaagggaactggccggaggaactaccaaaagtattgtggttttatttaatcgttttatcttgactcactgtcgttggctagaagcgaggtcaacagatcatataaataatttgtaatatgtaaattttgtaatttctttcatctgtgataaacctagttaaatgacagggcccatccaaatcatttgtattgtataagcatatatatatttgcaattgggcttagatgcatatagaaagcctatttaatttggatatttaaatggactaggttgataaaaataaaatagggaaacttacaaaaatattgatttttggcccaatctttacaaaaatactgccgcacggcagaaattatttttatactgttttggccaatttctttttcttttatactataaacacaaaaaaaaa

SEQ ID NO: 26072 - DNA, 1927 bp, Cannabis sativa
ttggagtctgttcttctaattgattttcatttttcatctaggtaacggaagttattgattgataaagatgattttcccattaaaaaaatattttttttttcaaaatgtagacctattgtttgatttagcccaattataataggagatccaaggccaaaactgaagtcaatagatcaattgttagtaattgagttagcccaattataatgtaggtacaatattcccaaatcattagatatttcttacttgagaaacatttatataatcaccattctcttcctttatatctactacaaatactatagtgtaaaatcataaatggtgtgggaatttagctaaacgacattttctcaatgtattaaaattcccaacaacccaaagagattagattaattgctttaagtgtaatattacaagcattgtgtattatattctcctaaaaagttcaagtacaaaagacatactcctcctcgtcatttttttgttagttttctaaaaatcgaatcaaaatcaatactaagtcgaaatgaaatcatttttcattacattcttttaagcaatagatacacaatattattatttaatttttattttttaaaaacaatagaatatataaactgaaaattagcatttttgaaatcatcagcaggtatttatgaaaagagaaattaaaggcagtaaaaatgtaaaatataccccaaaaaatgatttagttgagtaggcccaataggagaagcccaagcccaatcataaacccaattgggtttcatttcatcgttccaaactcattcttgtctctctctctctctctctgtaccctaaagctagaaatattttcactaactgatcggagatcggagaggagtaattccgtttcactcatatgccaccggagaaacaattacttcactaacaacaggtactgtacttaaggtttagtatggttgttttgagttttctcaagtgattctctctgttttgttttgtatatagagttctacattggcatcctacatggataatatgatttgcctattatagtttataatgtttagttctaaggtttcgaaattgtatatattattagtatgaatatgtgttaattttgttctaatctggatggaaagatttggccagggccaaagagaatttcataattttctgatttttgttcaataaaataaattcggcatctttcttgtcaatcaatctcatttgtatggtatttgttcctacatatgttttatttcagtactgtgtttatgttttggggataattgtatatctcggtgttgatgaagtgtttgatgacattgagaaacttctctccaaatataatcagtttatggtgtttctaggaaattttaattgtactaattttactcagatataactgcattgaaataaacaacaattagaaaaatcagtcaggagtagactggagctgtatggctctactttacccaagcttttatcttctaatttcgattttccatatgaggagtgcatatcagttttggcaaatccagtttggagtattttcttgtatcttgatgtattcccacacatgacttggtgtttagcttgcttctaaaattaattttatatagatacataatacacatgtaaaagcgtgatatgttatagtgctgtcatagaaaggtgttgtagttgtggactcacaattatgtttcaaaccgactattttcctattttcgcaccttatatttttctatttattttctagcctttgtttattaatttcgttgcttattcctgttcaagtattttgatttcaagttttttgttcaattgtagaagtatgtgtaattattcacaaggagattttcccatgtaaacatatgataatttgcaattttgcttaatacaattaggatggacagaattcaaaattcagttgaaactg

SEQ ID NO: 26073 - DNA, 1517 bp, Cannabis sativa
agattgagaaagtgtctacagaagtaagccctacaaacatgggaactaaagtggtgtccctaaataagtttaagctttgcttaatcttattagggatagacatatgtttgtaaaacctcttatgggtttaggctatgaccctaagaaaaactagatcaatttcctaccagtgcatatgagaatttaggtggaagttgttggattaaatccccacatacactatctagatcatcataatatagttacaacaaaattaaaacaagaaacaaaaactttacattagcaagtggcatttggccttaataaactctcaaccagaaccaaagttagttgtaaagtttgttaaactattgcaactaattttcagctcgctcacctaatctattactgctataaatacaaggaactaaaactaggagactaagagatcagaaaggaataggaagaagcttactgtgctaagatttagagccctagtattaaggctcaaagatccattcccaagtgatacatgcaaaagaagagaaacacaatgagaaagagataatcacggagagagagggaaaaagaaatacttgtaaatctaaggattactaatcaatacctgtgatttagaatctgttgttgcaactaaatgatctttaaagatctaatagtggaaacaagccttgcttctgaggagagcttgaaagaggaaatacctgtcaaaatcatttggggaacctctgtaaatctggtggtttctttctctgatctttctttatttttgattcagttgtttgtttgtgtgtgtgtggctatctttgatctaggtggagttactcgacctatttttcaggttgatacagacttggagtttttgaagaagaaactcgaagctccactagggttttctctgtgtgttgtgtgtgttttggttttgtgtatatcttgattattttgttagggtttggaagagatcaaaatggtgatttttgattggagtcaaaggtgtgtttgacttggaggttaaaggtcaagatagaccttggaaacttgatttagtttctattgtgtgtagggacaatattgtcatttcatacaagtaaggtgcaggttccatctcaaaattaattggaaatgagaggagtagcgtatggatcttatatatggtattctctttctacatattagcaatgtgggacttgttctaatacgccatcctcttcctcttgtttgggcctggaacgtatgggtataatgaacgacctttaagagacttcataattaagaatatcatctatagattcaggatacccataaagatagtgtccgacgacagaacttagtttgatggagatttgttcactgagttctgtgaaaggaataaaattagtaaaagcttctcgtcaatatcaaggcctcgggccaatgatcaagttgaggcttaaaatgaaaccttgaaagacactataaaaaagaagcttgacgtggctaagggaaaatggatagacgagctacctcaggtactctaggcc

SEQ ID NO: 26074 - DNA, 5004 bp, Cannabis sativa
gttttatttttcaaatataaactgctctcaatggtgttctttttacttttcccacactaaacttcgtattttctcggtaacttttctcttcttttgcctgcttcattgcatgcaagagaagttagaatgtttgatccaacaactattcaacatctacgtagagcttttcccagatattgaacccctctaacttgatcagctagactctttgttaggtgaagtacacaatttccaggctagctgtaatccctgcatcatttgcacaaataagaatgaaaagtaataaacaacaatatttattacagatgttcggccccttgtgataacgggtaatgacctactccacttttagttgtatttatacaaagataattactatctagatcgctataggtgggatctgctatagtacccttaggattacaaggtactattcaatactggcaaaactcatgtgttgagatgtgctagggtaggcatgtgagagagaagaagtgaggaagagagagagagtttattagacacttaaagtttaggagcaggcctctgcttagaggcaacttaggtttttagcttaaggttaaggcatttatataggaagcctcaaaccctatgtttacaattcaaatctattaacttgtgcataatttgttagatatttataaaagaccttattgcctttgattctatatattatttagcaaattatttaggcttttagggcccaattcgtagcccatagcctgttgttcacgtgtagaaatgtccaggaaagcctgcagtgcacttcttggcttgccaggggcctctggaggctaggctgaccaaccatggtgaaatcccaaggttggccaaccagctcctgagagggagctggtctatcacttgatgctcgtatgagtgtcggcatattcgtttgtcaatgtaagcatgccacttactgaggataaaaattgggataacattttcctcccaagtccttgtgcggacgtctgtacggatagggtctttaacagctatattgatgttgtcaggactattgtagcctttgttgaataaaagtttatgcacttttaaaacactttgtcttgactatctgatctcattgcagtagagaaataactgctttagttgccttaataatgtgtaggttaaataagtgaggaaaaggggcccacaattacaacataagtgacttttgggggaaccctttttgcacttctcatttttcacgtttactttctctcacaagaaaagataacgctcctctttctctcttggtggtcgaacccacaagcaccattcttctcaggatttttgcactatttagacaacccaagcttcccaccttcttctccatcgaaatcctgtagtcagtaagctttctagtgtcgccatttcacttggttttattgatttttcattgaattcacgaacattatttcttattttgagcatgctttgattcttacgttagattgtagtccattcggtattttgattcgcatgatagccttaggatggataatgtgtgatttctagacaaaaaagaactgaatctgacctttattatgattcttggatctttgcgtgacaaagaacatgtttaagttcttgaaaaaacacgtgttctagtccaagcaaatcttggccaaccaaggaggctttgtttgaagctttgttggacaaaggtggctttcatggggtctagttggccatggagattatgtccttaggttggctggcctatgcttggaactaggaatcttgggcagccactaggctgggtcttgggctctggccgtccactaggacttggaaccctagctggtcaaggctccaagtgggcagccagtttttctcccttctttgacctcggctacggtctcgtgatggcattggaggcatatacaacggtggccttatgagtggtttctattggaaactctatataaggataggtaatgagtccattatagtcaattgtaaaactttggacttactgtatgtcttagtaaatgtacctaagacggtacttggtcattggtaaaccttatacactttattttacctaaagatgccctttggtgccattgactggaatatatttgtagctttgtcaggtttatcacctccccttattttttccatgcaattagtgtcaggcattgaataggagaggtgacaactgtgtaggtctcttgtttacctcataattatggtttgaaggaaatagactctatgtaaggtgcccctatatgatcttcatgtggccatggtgaccacaaggggtcgagttagaatgcagggggagactgcccaacctcttatcgaggctcagccagagatggattcaagggactgagaattttgatgaagaatctaagcaggaggaggtttctccagtgaggaggacgaggtatatgacatgttcaatcctccctaactatcccttgggcaattatgacgcctgaggtaatccattgaacggactcggtgagccttcagaactaggactggaccatgtccaaaagtagcctcctgatcaggagatactggatgccaaaccacctaaagttggttggatttttcttacttctgctctctccgatgaggccttcagtaagatccttactagctgtttaataggggatgtccattgtgaaactccccttagaaactctagggcggagaggccctctacaaaccggttggcatggtctgggcgccatattgaacatggggcagtgttgctgcttcaccagtattttctagacgtcgctacttactttgagatgtacccaaccatgtcaaaggttggcaagtacgcggttgaccagtgtcgacaattttcgaatttatggctggtattctcttactcctagagctgtaagagtgccaaatgtagatgaggcctgctgtagagatgcgcaaggccctggcttggattatgatgaagtacctttgtctcacattgcgtcaaatttggagaggagagataaggctctccgtcggtgcttggacagcgagggtccagtaggtgatacttcccttcatattgagcctagaggctaggtttttgagagacatacacatcccgtgcctacacctaggggcaagggcaaggctgcagttgagggttttgattgctcctcttctgatgatgatggtatttgatagttgataacaccatgcttttgttcttgtattaaatgtttgtgaatgcttgttgagtttgctactttatctttgtagacatgtcttctaagttgagaggtctttgacatggaccttcaaatgagcctatccgacaggtgagggcgaaagtggccaggacttcccatggtgaggatgctgtcggaccatcactgcctcccctccaccaaggccagcaccagccagacagcctgtgatacagcctgctgaccaaggtacacggaggcccaatagaggagaagggtcagttgcaggttagaaggctattgagtcagccaattggtgcataaagagggctctttctttatttgacaaggatctgaaggagctgggtgacagtggacctgacaggctttactctatcgggctttgagatcattccttggtaagttgtacttttagctctgtccatcttcttggtactataaagactggccgaccatggtgcttcttgcatgtggctggtcagccttagaagcttatatggagggctggccggccatagcagtccaaagaggggactggcaggccagttttgtgatcttcgacactgatgttgttttcctttatttttaggccctgatgaagctcagctcagcttgtgatgtctctagggggtcttaacactacaaggatatcatctttgtcaccggcaaagatttgctggcgccttttttcgccagcaaagggtgccgacaatagctcgtcggcgtatcaccttttgtcggtgcagtgggtaaatttgtcgagaaaagtatttacaccggaaaatttgttagcaatcataagtgaaacgctggcaataggaccgccggctgaggtcaccatgacgaggttttgccattgagttaacacaccgacaaaagaattggcgcgaatttggcacctactctttggtggcgcatgagctcgtcgagaaaacattttaatatataaaaaaaaataacattttttccggacaagctccatgttctcgttgtaccttcccagcttgtaggctctcttaccagttatatttgtaacttgataagggccttcccagttaggtccatacactcctattgctgagtctttagtctttggagcaccatgtctcctatgaagaatctttttctcttgacgtgtttgttgaagtccttgatactttttgctaggaggcctatatctttaggatggcttgttctcttctttctccttcttcgtcaagggactctaccagtagggtgttgtttgtttgttcgtcatatgttattcttctatgagacagtggcactagctctacatgcaacatcccttgcagcggtaagctagagcaaatggggtttgcctagtggccgtcttcttggtagtcctttgcgactataagaccgctaggaacaattcaggccagttgccttttgcgtcctcaaggaacttctttaaggtgtccttgagggttttgttgacagcttctacctgccaattttcttgaggatgggccacggcagagaagttgttgatgatgccatgtctattacaaaaatcagtgaacatatcactatcaaattgcttgttgttgtctgacacaatcttttggtgaaggccaaactgacatgtgatgttcttgactacaaagtcaaggaccttcttggaggtgactgttgccaggggtttaacttttgtccatttggtgaagtagtctactacgaagaaagcaaactgtacccctccttttccctttgagagttgacaaatggggtctatcccccacactgtcaagggcccaggagactgttgggttttatgccc

SEQ ID NO: 26075 - DNA, 3347 bp, Cannabis sativa
gactaagtcttatttatgaattttactatgcaaatgcgttttaagaagaaaaaagaaaactaagatttaattattaattaagagacttgagagagtctagttaataattatgttaaatgataattttatttgataattatttataattattaaatacacaaaattttcgtttaaatgttaagaataaaaagtggtactttgataaagaataacgcctagaactaatatggcatttataaaacccaatgggctttacatagggtttgcccaagggtttgagaaataaggccatttattttatctttttaagtccatttaattttaatcctaaccctaagacattactattgatagacccttatagctctctattattcacatatttcttcatctcaatacttgagatacaagtttcacttgactatagaggaattcaaattcctcatctcttcttcctctagtctacacgcctatatacaactgtatatagtgtgtataccgtttgagtgatcatagactatagatagaaaagtgagaatttgagaaatataattttatagtattctcaatcaagcctagtcgacatatacaatctattttttattcgttactccgaccaactcttactctcttgtctcccaccttttgtaaatgaacactggtgattttcggggatgcaagcatcatattgactaggacttgcttcaaatcttatacgaagatcacccccatctccgtgctagcccatccttatctagtgacgatctttcaaattctagatttgaagattgtgaagttagtagttgcacacaccttccctggagcctgaggtgcaacactatttctatcccgaccagattcgtggtgaacgatacaaccatttcatctgggaacttaagaaaggttggagacgttatcttcttggtagctggacatatagggtccattcgagtgtggttgacaccttgccccagggctgcccaatcccagctgcagagggaaaacctattgcaaaatttgcagtaacgattgcaaggcacaattttgataaagctccgtccaaatttaaaatgacagcatgaaccaagcagactatcaggaaaccttcatctaccaaccctcatatcgcccgtctagctactctggccagggtggaacaggcctgtcctactatcgaggaggaggaaactactggagacgttgaagtccaggaagtggaggaccaaggcgaggtctgtcctgcaactcctcccgaggctgaaggcgatgaagatgagggggtagctcgggtgctgccttttggtggttacaatgaaaaaggagaacctgttttgaagacaagtgatgtcctagaagctggccgagctacatcgaggaggagtacaccgaggctcgtcctataagcaggagaggtgcaaggggagctcgatggatttctccgccatctgtcctgaccatgaaaagattagctaatattttcgagcatggtctcctggggaatgtcaaatgcttccttccctcctctagtcaaccggctactaaccctggagagggttattgtgcttggttgggagcaaacacaaaatagggtgcaatgctgcctttgctcccgtacttcaagaagatggccaactattataacatcgatccgacccaattaactcccaagggcctcaagtatctatgttccctatttgtgctatatacctctcaaggatggggtgagccatccccccacgataataactggctattcgacctgaagttgagccccaagcaaagccagtcggggtttttttacttctctcaaatcaaggagtcatggctaaagagtaccacgaatacccaggtgacaaaaatatgtggcttcgtggaggactactattatgtcaagggaaggacaccaattatactagtttccaacatattctgtcctactaccgacctccgttcacattggaacttaggaagagggcccaggaaattatccaactcccctcaaatgatcgaaatatttctcgcctggccattgacgccaattttgttaggcataaactctatctggctgactttgtaccaaagactgaggaggcagtcggggaagctgtgcccaaataggaggctccaagcaagaagaagaggaaggctcctccaagtggccaagtacctattgagcagtccattaagatcagagatggtccaaagaaggttgctcaatctttcgccccggtggctggaaagggaaaagccattgtggtcgagcaggaagaggaggattattcagatgatgacgctccttctgtgcttgttcaggagggtgctcctgcccacatgtagggtactttaccttgtttttaaagttatttgcatttatttagatcatacttgttcaaacctatttgttttatttatgtgcagttatgtcttagaggatgctgcgcgcgctaaagaagaggtcaagtgatgcttatggccaaaagtcttcagcaaaacagtctaaggtggacgatgctctgcccaagtacatagttctgagcaccaaaactcctaaactgactgttgagaagagttcggctatacctccaactgagattctcgaggagacagtgctagatgtaagtccaccggccaagaagaactcgaagtctcaagcaacggatgtttcttccaaaggcaccaaggggggaatacagatggccccgcactgctcaaacctttagccactcatgccgtactgaactttgagactaagaagggtaaagagatgctcttgctctaccaagactgggtgcttctcgaagtaaacgattagctagccggaggagaggacatgtccgtggagctgctcatgggccgaatattgaaggagaccacctaagtaaatacttttcctttggtctttttctcatgcttttacctgtgtagattttgaccttacttatctgtgcaactcagtctgaagatggcttatacttactcccgagccaagtccgtggccttgaaagctacaacgaacatcaccaacttgaaaaaggaggtggaggaagctataacaccccgatttctcgagatttcacacacgatacaccatttataataaaaacaataaactaatttattgaaaataactaaagcatgagatctaattattttaaaacaaaaacacttgattcatttataaataaaacattaacttttacaaaagtaatcgagtcataatctttagcgaaatatttttaaaccaaaatgtcgtgacaatcccctaacatgtaatccacgcctcaagctcgctacccacactgtttagttttgcctttacttgtacacaaagtacccgtgagctaaca

SEQ ID NO: 26076 - DNA, 1799 bp, Cannabis sativa
ttgcattaaactaattgaaagcataaaatcaaagatggaagaaaaataactctttgaaaatcaatagatgtagtctctgaatctcgttttctctccaaattcgtgcatccaaaattgcttaatgaaagtccctcttctaattaggttaattaaacctaatcaggctaaatttttgtaagcgggtcacagcatggtaaatccaatttcatggctcctgtcttcttttttttttttttttttgaaaaaaaaagctcatggtacattttgaggaggcgggccacggcatggtaaaaccaatgtcgatgcgcgcctaaaatttttgggacaaaaattatgtcatgccacaggacgcctctcaacctttaattgcatggttctctgctatttctttctatttaagcgtcgtgatattgaatttttatgttacgacgctaatccaatcttttcaaattctttatttttagagactcaagatttgccaaaaactttacaaaacttccaaagactctacttttggtgcgccaacaacttaaatattttttttttctttaatttgcagcaattttctcaaatcactcatttttttccttattcaccaaaacatgaaaaatacaaacaaactaaagtgtgaaatagaactaagtaaaataaaactaattaaaaacactaaaaaacatcaccagaatatgacgtaaaataacacctaacaataatagttattaatctatgttaaaatgactttttgttggttcacaaaaaaaaatgattttttgtaacaggattatatggtattaaatattgggtttctcttaaatattttttggatcttaaatatttaattaatcaatgtttgaacatatataaatgagatagagttatattttgtattttagtagaatttatttgattaattaacttttgtcattagtatcatgttatcatattttgattggatgtaattttttttttttggtatattataaaatctcataatttagctaaacaaattatcaatatattattttctatcaaataatatattaattgatattatattattttcaaataagtttatataatttcattttttgtgaagcattagttaaattaacttgaatatgatgattataatttttttttattatatttattaactaaatcaataattacacttatacccacatgtctctatatatatatatatatatatatagtttctacacctataaaaatgataataaaatataatagtgaggctctaatattaatataattttgttatatattattttatataaaaattatattaataaaagaaatgaggtaaaaactaaatagcaccatatacctatccacctatagtatatttacatatttaaataataacaactatggttaacattttacaaaatttcataatttcatctaacttcttatttttgatcaaacttcaatttcttctctaatttagtctactaaaaaattgtccaaatctgtgttgcaaatttaaggcttgtgaaatgttaggtttatgctaagctatatgtgggggttaggtttatcaggacaaaaatattgagttagaaaaccaaaacttttaaattacatatacaaagcaaatatgttataggtattgattgaattgaactatggtatgatggcatagtagagtgggtatttaccattcaaattaatggggaattttcatttttatagtttttaaagtataaatttataaaaatataatattttttcaaaaaagttattttatgaatttttttagaacaaagataaaaaaa

SEQ ID NO: 26077 - DNA, 2298 bp, Cannabis sativa
cactgtccaattacattgcctcttttgatgtcattcccacctctacgacgaacaagatcgataaagcttttagagtcatttggtggggagatacggaagagaaaagagtgcttcattgtgttgcgtgggagaaattgtgcaaacccaagacccatgggggcttgggtttcagaacgactgaggcaactaatcaagctttccttatgaaatgggcctggaaatttatgactggtgaagctagtttatggaagcatgtaatggaggcaaaatacctcaagaaccacaatttcctcgacctggaatcccagaaaattggactccatactttggaaggcgattcttaaggcaagggctcatttacatagtttggtttggatgcttttggcacattaagacttgttccttcaatttcactaattgggatgaatggataagctgattcaaacacaatgaccataggccgaaataggtgagtttccatgcttttcttgaggaagttgccataatttttgagaagatatggagggagagaaacaagattgttcataatggtcatggtaccccaacaaagattctcacttagttgatcaacaactgtcttaaggaagctctcaacgcacaacttttggactcttccccaatgccacaatggctccgtccttcagctggctggaccatttgcaatactgatgtggtaattggccatcatcactcggctaatgcagcagttttcagaaacgataaaggggaaatcactagcattcgcacgactcaaattcactattgtgagcctttggcgggggaacttgcttccttgtcctagggagccaaaaacgctattcgacttggccatataaacgtaatccttcagtacgactcagttggagcgactgctgcaattctgaaggaaaaccaagaaatcaaggacttgaaccacaacattcaggatattgtcatcaagttccacggtttagttgctaaatttgacctctgggaggttagctggatccccaggatgcacaatggtgtggctcaaaggacacttaaatctcgactgtttgggagttttgatgcgtctaattttttcagtttcccacctggtgtgagggtggatggctggcttctatgttctgtttttcttgtttgttattgtcttttcttagttttttgttagtttgttgcgtactgcttgttgtttgtagcttggattctggtttagtttgttgtttgttcttgttgttgctgtgtgactgctttgaaggcctttaataaaaaaaaaaaaaaaagaactaagctttaacaataaatttatcattcctgccaaatcacaaattccctcaaaaatatatttgtttctattacaccacacaaaataagtaacaacagctacaactgctgaaattaaggcttcaataaacccaaaattggtttcttctcgtctatttaatcaggttttaagatttagaggccaatccaagaaacccaaccattttgtatcctcgataattacttgtttttgtgaaaatgtagccgaaaaataagtgagtgtcagattcattatccatacaacaaatcgaacaaagaagagagtccacatgaaagattctagccaataaatctcgggtatgttcccatttagagcttgtcagtagattatattcgagatactcttagtatgtgtaacattatatagaaatgagatttgaaatatgattaccatgtttaattgtctgttaaacgtgttgattttagatttgtgtcacatctcaagttgatcaaatgtgttatggtgtcatgttgggtatcctattaagaaattaggttgtgtttgaagtatagacaccttcaataatcatgtcaaattcgtatttactatatgttgatacaaacataacattgataacataaattgttggtcttaaaaaatatatattgataatatgtattttaaagaagatgacattttacatcaactaccgtgaatggtcttagtggaacactaatactaggtaccttaacaatatttagtgatattctataataataagtagtaccttaacaataattttattttaaaagatctatacgtttataaatagaaagtaaattagacctcacctcacggttcatataattatattttttttgacattaagataacttaaaaatattagttatatatattatgagcaaaaactcacctaaccacattataagcaacatagttacatagatgaaaaatatttaaaaagtgacaatacaaaatagactttaacacatagctacaatttgaattat

SEQ ID NO: 26078 - DNA, 3054 bp, Cannabis sativa
gagttatattttgctagtttccacaccttcacatctgtatgtctctgtctttatcttttcaggccggaagtcttcaattgtcaccaatatctgttgaaattacttacggccttgagcgtatcctcatgttactacaggttagtgctggtagctcctcttaatatttgtttagttatcgcttgctattaatctaattcggctaattactccattgcagggagttgaccattttaagaaaattcagtatgctgatggaattacttatggggaactattcatggagaatgagtaaattagctatttatcttctgtttctttttgtttttgcttttgcttttaaacgaagtatgaaaaagtattatttcttacttgattcttgctgttcttatattgctatgtcaaggggtggactagaaaatcagaatttactatatgtgctcttttcattaacacctatattacaaacttccaccacacttgatgattctgtttcccattcctctttatgtgcgtgtactataatgctttgaagattaaattattaatggaacttgcctattatcataactcttgttattattatttaaagacatgggttcatattttttgggctcgtgtttttctgttagagcttttagtagcttctgtctttttaccttttggatgcttacttctttcatgccactcctcaaagttgattgttactggaactttctagccatagagagtaaagtatgatatttttcgaatatctttttcaggaaagaaatgagtgcatattttttagagcatgccagtgtggaacatcttcagaaacactttgacttttttgaggaagaatctcgtttcttgcttgcttctggtttaccgatccctgcgtatgtttaagcttttatttctatatgtttatttacaattcaggagttggtatgttttaatatgctgttttttttgagtgtttctttccttacatgctaggtatgatcagcttctgaaaacatctcatacttttaacatcctagactctagaggctttgttggggtgacagagcgtgctcgatattttggtcggatgcgcaggtaagatatcttgatttatgctgtataagaattacaccgagaagtttgtatgtcaaatatagcattcaatctaactaagttttatttgtgttttgaagtaatattgtgtgcttaatttagagaagtgatgtccaataatgtgtgttcatgagcaattgcttggaactaagcttttgtactagttgttttgaggctcactacattggaagtgctgtagagtgaggccttttgctttgaaccaattcatatggattaaatttctaagataaaccagccaagaaaacacccactatgatgggaaattaatgattttcaagtgagattggaagggttaagaacaaggagattattcaagtttgccaaaacatgaaaggaaaggtacattaaaaggtacctgaagaaattttacctgagcaaatcctttaccactggagaaattatttcctaaacaaacagcaaagacatttaatcctcagtttctgtatcacttagatttcatctgaaattaaagttccaagaggatatccaaagtatttatatgaattagaagtatttttagaatccgacagtaaatgtaaagttaaaagttccaacttccaagtgtagtatgtttgttacgttatttattttctcagctttgatggttatcatttttagtccggtgtctatggagtacagacagaactatgctttatcaataagtagtaatgcttattcaatgagaataacttcttggcatacattcattaacgctcttaacttttgtgcctatgcttacgcttcttgttctctcagtttagctcgtcagtgtgcacaattatggttgaagaccagggagacgcttgaacatccattgggtgtagtttctgaacctgttaatcttgtatgtcctaaagagcttctggaggcagctgtcaaaagggtcagtttatatacattaaatgtataataggttcttttccgtatcataagatggtcatataagtcaacatggtttctctgtattgtcttaggtaatttttggcccctgacttatgaaaaaataataggacatgggtttttctaccataattattatagcccaagcattgtatgatattgtgacagaccaggctaattatgtactattttagctaagtgtgtatgcatggacatgtgtggttatatctatgtaagcatccattcttgaactgtttaaccatgtcaaagttgtgtctaatatgatattcaaatgtcacttggcataatattcacattgctcagagtgtttcttttaattactcaggttggtgataattcaaggttatttgtacttgaaatcgggactgaagagataccacctcaagatgttgttgatgcaagccaacaagtataactgtttttcctttatctaactgaataatctaattttctttctgttgtgtcctccacttttttttttttttttggtagcatggttagatgtcaatgctattaattgtactgagttggtctttacagctaaaagatctaatgcggcaattactggataagcaaagattgagtcatggagaagtgcaagcctttggcacacctcgtagactggtggtatggttgcctttattatagtctcacttaggttgaaattaatgtcatgtttaggctgacttccggtatttatttgtgtgaattataacttggcatttctgggaccttatcacgcaaagctttttctaaacttttcttagtaagaaacaatgtgattagaggaaacattgtttttctttcttgggagcatactctgatcatttatatggtgcatgtgataagatgatgcttcaggacttttaatgcagttcttgctgtgctagtcctaatatgtagtctgtctttacccatgtacgttttaaatacttcttttttcatatttttcagatttttgttgaggatctttgtatcaaacaagaggagaatgaggttgaggttcgaggacct

SEQ ID NO: 26079 - DNA, 6591 bp, Cannabis sativa
aagactcttcagatgacgagcctctatctttgcttattcgggagaatgctcctgcttacgtgtagggtattttaactcatatttaattgtcattttacttggcttatataacacttatttttaaccttcttattttgttcatatacagctatgtctcagaaggtgttccaagctctgaagaagaggtcgggtgacagctctggactgacccctctacccaaacaatcaagaggtaatgaggtatcgcccaaggagatattgcccaaggagaaaagctcggtcgagtctcctatcgacctctctgaggaggtggtatgtgaggtggagacagcaaccaagaaggctcccaagtcaaaaggttccaagggaggtatcacggatgagtctggtctgcccaggccctcaaacactcccatcgtgctgaaccttgagaccaagaagggcaagaagatgcttcagcactaccagggtcaactacttctcgaggtgaacgataaactatttagaggggacaagatgtccgtagagcttctgatgggcgggctcctgaaggaggcaactcgagtaagtatttctcctttggtttttatcttgtctttttacccgtgcaagttttaaccttttcctgtgcagctcaatgtgaagatgacttacacctattcccgagccaagtctactgccctgaaaaatatcaccaccaccaccaatccgtggaaggaggtggatgtggccaagaaggaggttgaggttgtaagggcagagctgggcaaagtgaacaagcaacttttagctgccaataatcgagttgaggagctaaagaatgagatcaaggagatgccatctaccttctagcttgaggcggataacgaggctctgtccaaggaagttaatggtttaaaggatgagagggagggtctctgtttgcaaccttgaccacggataagacaaactttgaagaggacgttaaatctaggcagaccaagaaagaagagattctaaaggaggttgagaatttggagtctattgccttggaagttttctatgaattttggaaggctaaaccataaggaaactttgattacctcggtgataccaaagaggcatatcttagttactgtgcgagccaggcagccaaacaaaaccccgaggcagacaattccacagccctgaccaatcacaacacagagaccccagcctccaatgaccaaccgagcgttcattaaactcagtaatactccattttattttgagatgactagctaaccgggcagcctttactcccgaatttatatcgtgcttttgtcatcttttcttaaatgaatattttcccttattttagtaattatacgtgtaactgctatgtttttttagcttgttatttactgatgctttgtatgggtatagtggccccttaagtgaccgagctatgactcttggtcacttgtattttacaagttcaatttttgtcttttcggcttttgggttcgagcagaccctttgtacacattttgatggtaaattcataatttgctataaaataattgacacaattagaatgataattaatattcatgtattggtcgaaataattttgttaccgtagtaacttacatttattaaagctattaaatgatctaactgatatttagctaatttaaacacaaaataattgcacttttagaattgtactttaaagatggtcatctgacctgagtactagtcattttatctaaacctttgagtaagattctcccagaaggccatctacttaagagtaaatgttctagcattgtgtacttaaagtcggcatcagaccttgtacacttactggtagtatttcctcaaatgttccccattccaataccttggtactagaacgagctccatattttcatcataccgccccagcttatatgctctagagtctgtgacttcgacacctgatttggtccttcatagttaggtccgtacacaccagtcgcgctgtcttttgtgttcaagaatactcttttgaaaactatatctcccgcaaaaaaatttcttgtcctcactagcttgttgaagtgccaagctaccttttgctgatgagctactagctttaggtttgttgaggctcatttttcttcaatctcgtcaagtgattctgccaggagggcatgattagcttcttgatcgtaggtcaatcttctacgggacaaaggttctaattacacgggcagcatagcttcataaccataggccatagcaaatggtgttttcacgattgatgttttctctgttgtgtggtatgaccacaatacgtctggtagttcttcaggccagtaccctttagcctcttcaagtcctttttttcatggtgtctttgagtgtcttgttgactacctcgacctaaccatctgactgagggtgtgccactgtggagaaactttttatgattccatgtgtcacacagaaatctgtagacatctgtctgtcaaattgtttgccattattcgaaacgatcttctgctggacaccgaatcgacatattatgtttttcactacaaagtccaatacatttttagatgtgattgttgctaaaggcttggcttctgtccactttgtgaaataatcaattgtgaccactacatccttactctgcccttgcccttaggcaattgtccggtcaggctattccccaaatggcaaaaggccaaggactttgcatctgaattatctcgttgggcagtgcacaggggatcttcgaaaatctctggcatttgtcacatttctttacataagcctttgaatcgtcgatcattatcggccagaaatatccttgccttagtattttctttgataggctttctcctgctgcatggttaccagagaatccgtcacgtacttcgcacaggagtcgtgcagcttcttcttttgttacccatctaagtaatggcatagaaaaaacctttctatatatacacatcacaccttctactatgatgtaccgtgcaactttcctcatcatctttcgagcctcatttctgtcatgtagaagttctccagtgttgagataggctgctatgggtgccatccagtttggtgttgtgtctatcattttgatttcttcagaacaattgatagtgggttcttctaagaattgaataaggactaggttggccttatctgttactgtgctgctcgcaaggcgggctaaagcttcaacagcttgttctcttctcttggaatcttcctgagggtgcaacccttgtattgtgcgagcaggtcttgtatcttgcttagataggccatcactttctctccccaagcctcgtactctctagaaacatgattcacccccaactacgaatcactatagacctcaatgtattcggcacgtacctcccgagaaagttttagtccagcaatgagggcttcatattctacttcgttgttggaggccttgaacccaaatttgactgctccgtgcaagtgttgcccccaagtgtgacaaggaaaattcatgcactagaaagttggtctgtggttgacctgtccacgtgtaatttctaggtaggttgatttttcgttgttttctggaaggagttctcttactagcttcatgttgtcccttaagttgcgttcttctttgcttgtgcacttaactacaaagtctgctaaggcctgtcccttaatcgctatttggggttgaaagattatctcgtactgacccaactctatcgcccacttaagaaactgcccagaagcatcaagcttttgtaatacttggagtaatggttagtcggtgtatacccgaacagggtgagcctggaaatagggcctcaacttcctcattgccaagattaggtagtaagtgagcttctctattaaaggatatcgtccctcagcttcaatgagtcttttgctgaaatagtagactggatgttggacgttgttctcttctcttatcgacacgacacttacaacatattcggtgatagccaagtatattcctaattcttttccatccaagggttttgagagtatgggaggctttgtaagctatcattttaattcttggaaatcattctcacattcttctgtccattcaaactttttatttcctcgaaggatgttgaagaaaggaacacacttgtctgttgactttgaaatgaatttactgagtgtggctatctgaccaattaatcttcggacttcctttgtctttgttggcgatttcatatccaggagggcttgtattttctctggattagcctctattccctgagcattgacaataaaaccaagaaacttacctgagctgacctcgaaggaaaactttaagggattgagtttcatgttgtatttttttaggattttgaagcattcatccaaatcttaatgtggcccccagccttcctggatttgacgagcatatcatccacatatacctccatatttcatcgatctggtctttaaatattttatttaccagtatctggtaggtagctccagcatccttcagaccgaacggcataaccttgtaacagtatagaccatatctgtttgaaaacttgtatgttcttggtatggtggatgcattctaatttgattgtacccaaaataggcgtccatgaagctcaggatttcatctccagcttttgcatccatgagctgatcaattattcttggtggaagtgaaaaacaatcctccttgttggggcacaccttgttgaggtcagttaaatcaatatatactcgccattttttaggcttgggaactagtacaaggttagctacccaagctaagtagaaagcttcaatgatgaacccgttttcacgtagtcgctctaccccttttatcagtgcttttcctcattctttgtccagtagtcttctcttttgcttgatgggacaaaagtttggatcaatgtttaaggcgttagacattatagtgggatcaataccgaccatatcctcatgtgactaggaaaaacatctaggtttgctctcaaaaattttattaaagctaattttatttcgagcaacaaacccttaccaattttgagtttcctggtcaaaatatttgggttgatttccacttgttccagttcttctatcagtcttacatttgtgtttgattcccaagtcggggatccatgtcttcgtccctgccttggccaacttcctattgggcaatgcttttttccttgcccaaactctagccggaggtgttttccttcttgaccttagttagggcaaggttatagcattcacgcgcaattctttggtttcctatgggacatcccaccctattctttgttggaaacttgatgcacaggcacaggtggaacattgatgtaatagcttttaagtcaaatagggacgatcggcctaacatgacattaaaagttgatggaacatcaattatcaacaactgtgccatcacagttatgctcctcgaagcttatccaatagtgaggtttaagtggatttatcctagaggttcaatgctctggccaaagaaaccatatatgagctgggtacagggatcaaatctttaagctagagtttcatcttctcataagttgttttaaacataatattcaaggaagctccattttttatcatagtcggtgccactgtcttatttgcaatttacacttttatgaccaggggtcattgtgcaggaagttgatgcaactggcatctactttagtgagttattgttggttcccctacccatggtatttttagctttctctcctccacggccaagactgttacattttgctcatactacaaggctcaagcatacttttctcaagctttgcccgagtgtctagcaggatgtggaccaccaataataacttgtaaacactcgtccactggtggaggcatcaactggttttggttattgtctccttgggtggccctctagttctggtcggctttgacatacttctgtaagtgtgggttattctttctaataaaaaattcaatttctccctttagattattacattcgtttgtgtcgtggccgtagttcgcataaaaacaacaaaacttggatgtatcacttttacttacatacttcttcatgggagatggtttcttgtacgggaccatagactgtgttgtctggtagattgtcttaaggttgtctgttaggactgagaaggcagtcaattttgaggcattgtctctggggtgctattcattattgtcagtgaacttgcctcaacattagtggtagacgggacctcagtgttgggagtggattgaacggctgctaaactggtgttcccagtctcttgcacgcctagtgtaacccaagcaagaggggaagtcactccatggcccacagtgggtggttgcgtattgacctgctcggggtttgtccctggtggtcctctcgtatttccaggagtctgtacattgggatttgtcaccatcgggtcaccctgatcagcaaggccactacgagtttgtacaaccatccattatgcctgtcaaaacttaagacaaaaaacttgggttcttactctcaatgaaagcaccaaaatgttgacctcacttttagccaaagacagtgagtcaattaataagcga

SEQ ID NO: 26080 - DNA, 6942 bp, Cannabis sativa
actacgagtcccagacgcaactggaatactactggacataatttgtcactacagaaaataatagttctaacaccacacttattaaagtaccaaaccaatggtacatttagttatcacctttagacaaacacccatcagtggaagagattattccaagataatctaacctttatcaaatatgcccataacatgtttctaatattctattgatccttccatattacccatctttcaagaataaaaacatcataccattttttcaataatctccataattctcaataactttctttaacccttaacatcatagcttaagatatcaaccttggaatttcacaagattagactatttcttcgtataaattccatattctcatttattgtataaattctctacactaatagacaacatattacctcggtatgtccagccactactactttgtcgaaatcataagatcccacagtacataattcagaattatgtctttctattcctccgatgggacctcctaagctgatctattgacttaacttattagcaagttaagtattcacttctgatagatattcaattaaagtatttcttatttccatccaatactatatactcctctcaataccttgtcaatatctacttattaacacatcccttcctcttgataatctctggaatgactactaattatgcatcctaatatgaatctttttagcgtactttttcctcactcatacgctttccgagatgacttcgtagaataattcccatcttgatattacctcaagttaattatgcttaactccaaggtaagctcatggtgggttatcagaaagtggatgcttctttgtcgttcctaattgtatttcttgctttcattcttttgttaatagaatttaatttctatcactcccttcattagcctcttccaattactcattagttttgttcacttaactataagaaatttccatcttattatcaacttgaatcttgttcatctccacttattttaactggcatcaatttcccttgaactgacaaaacttttaaatttctaaatcacttacagttaaccaccgttataaagtaaattgatgtaacctatacggtagaggcaacaatgctcatactgggcacccagagctaaaatggaaatacccatttcctaattctcaactgataacaattaatcaaagatcattccttgatctcgaagtttcgtttctgtgtttggtagaaatcttaaaaatcttttcaaacacatcctgaaatatatgtacctcaagtatattctctgttttattgacaatcccttggcatgaaatacaatgcaaacatatagcgagtcgtccgttgctgatgctaattcataggccctcgtaacttttcccgtcattgtcgctaaggttttactcccaagttcatacgccactattgctcccttgaaatcatcatatcttcatacttggttaactcctctaaaacttattttaccctcaattacatagtttgttgtttaataaacaacctactttgtggtccaacattgaccgaccacttgactacatgcccattaaatagcatctcagtttataagcttttcccattctaggtgagcataccttttcatcattacttaataagacaatattttattgttatttcaatagtcacctcgtataccagattgaccgtctggtcaaatataaaagcattctcaatcattaccatatcaccatgaataattcatgtaatcttctttaccttagtgatacaactactctccctaatgttctattatacgttaccttagtaacatccatacttcaagcctccattgggccttctccccacggactattcgcttttatatacaagtgcaccactctggccacttcctggatcgatgactaacccttcaggctaacttgagtgttcccaacaggcttcactctaacttgagaatttcttgggaaaacttcctgaaatgaaatcaccccaggtcaagaacacctaattgtaatgttatttcgtaataggctaccaaaaacaagatacaccttgctattataggtagtctcaatctctccattcaagtcccctgcaactatgtagtcccatacctacataattttagaatcatcatatatgaccttctccaagatgatgtgggattgtatagctcctcgtctattccttgtagatcatggggctctgactgtcacagtttgactcatgtcccttttaatctcatatttctcttggtagtaaatagattaacccacataattgtggcctttaattcacttaggattgcgggcactactcataaattgtcccactttactaatgctagatcacttctaaacaaaagattcttttctgtaaataaattagatggatgcctccattggctactcatgtcctatattccacttagtaataccagcaaatttaactcatattatcatttccctaatctttctaccctttcagatgagctaccactaaataacatacatgcaccgtccattcagatttttgatgtctctaattgaaaatacaatgtttaacatcaatatcaatcgaaatagcaaatacaatattgcccataaatttctaacctgagtcgctcgaaggaacgatacttgagtcctcttaagtcattaccgacacttgggcagaaaccatatactattctcctttaacatcattctttgttaattacgggtaggttcttttcagatgacccactattccataataaaaataagatctagctcgacatgagcccaaatggcatcttttgcattttaaacactcaggataaggtcgttatttcttgttctcaccttgaccgctatcatggtcaccctagaaccttttattctatcccacgattggtggttcattcaattttttccttctaatctgctcgtaagttggttccatgagtttcacgacatttagtggtacaacaagaagtgtcggtggtacatcaatagacccaagacgagcttgttattctctccaatatgtttccccttgttgtctaattatatcctacatggtagaatttacatgttcccagtgatgtggcaataaaggattctcttccttaccatttgccctgagcccagacagctcgctaatcaaactatttgattgcccttacacttaccgcataacttatcacacatttagtctgcatcttccaagcatttagaactcagacagatataaatatcaatatacatataccatacacatattcttataataatcatcactatactacttttcccaacatactttataatagtctaggtaggtaatccaataataaataatataaacacttactataccatgagtcgacctttcttcacataaaatctacatattagaccagtcttcaagacctttaaaaccatggctgatctaatacgaagttgtaacgccctatcccatagggacaccaagtgtgtgattttataagatagtttaatattaatagattaattaattattaaaaacagtgacgatattaaaaacaagactaaaataaaatactaaaaattggcatcataatgacattaaaaatgtgtttcggtgtccttattataaaatgtttacaaaaagactatgtacaaaaacaattcaaaacacaaaaatcaaaatacgcagtagatacagccccaaataacccttggcaactcagctcacaggctggtggggtcaatatatacattgttggagaagattgtcacctcatggttgatctagcttttctatgcctttatctacacacatatcactcgtgagtctcaagcactcagcaagaaaagtaataacaataatcatatagtttattattcgaatattattttatacttagacaatcaaaatcaaaaaatcccacattactcataagatgaaatccgaataacttctattatctgccatgaataaacatcagtatacaaacatttcgtaatacaaaaccattatatcaataatagagatcatattcactcaataatataaattagatatatatatgttacctcataaagtaaccatcttcattacatcacattgcctaatcatggaagtcgaagctttaatcttttaatcctgtattgcattgcctaattaggcaagcccatgccacagcttagcacccatatatcacataatcgcatcacctgattaggtgatctcgtgccaaaaacctgctcccatatatcacataattgtatcacctaataaggtgagctcgtgccacaaccgggcaccgatatatcgtatcgcctaatcaaacgagcccatacctacgcccggtactcacatgtcactgccgcccgtacctaataaggtactccaccaggaaaaaacccaacattggtttcaatctatgccatagcctgacattctcatatcactgccgctcatacctaatatggtacgccactaggtatattgtatcacctaataaggtgagcccgtatatcacattcatagtatcatcacattgtcattacttaatcaatcaatcttttaattatataacaataatatccatatcattacctttaatccagattcatgcatgtcggccaagccaagtggagaaacatccccaatgatcttggctctatgtcacaataaaggtaaaccaatatgtgtttatcccaaaacactatttattaatattcacataagacaatctcggattttctaccaaaccccgtggtataaatacaataaaataaaacttatattttgactttaaaacatacacaatatttagagctcgtcgcaagcgtcaaaaaagtatatagaacatcaaaaacggacacccaactggaaagttatgacaaaaatacaatttctaatctcctaggaatttcaaaaaactgtagaacacaaaaattccaaattttgtactcaccgaaacactcccaaaacctatccaaatcatttcaaacttcataaacacatatataccatatatactgtaacgcgctggccaacagggacgccacgtgtgtgtttttataaaattcttaattatatactatataaatataccaaaagtgtgggtaattaaatttttgtcatttaaaatcatatatataaaacttctttatagttaaagataagtaatgataactatggggtccccctgttttcaaaatattataaactagtttaatagtgcttttacaacataaactttgcaatcccaaaatatattcaaaatatagcatcttgttcactgggtcgtgccactgcggctgatatgtacattgttgccacgatctcgaactcatggctgctcaactttttccttccctttacctgcaccataaagcacctgtgagtcacagagactccacaagaaaactgaataaaataataaccagcaatattaagcaattcaatttcaatttaacttgcatacacattcacatgatattataaacacaatcctggttctttataaagtacccctttaccactcgttaaccacgagatgaatatgtcaatatcgttgcccgatgaagcaaatgataagtaagaaacctatccgctgttttaagagtaattactcgtaacggtaacaaccgttctcaacactaggtcacaaccgaggctcaacatacatatattcagaatcttgataatcaagactataatcattcaaccgttaacacttagccacatatgatgcttgccacttttcttaccttagttaagaactcaagcgtacgggccgacctgagtggaaaacaagctaagcgatcttgcgtcctatgtcacgacaaaaatattttataaacaacttatccatattccaaacaaaaccctagccccataatcgggcaaaattctaactctccactggtttaaaatagcttaaacgtcactaaaatatcctattctaagttctgaaaaacaccctgagcgaaaccggtttcgaagccaaaactagagttttcccccactactgcaaaaaccggtcgaccgatttcactatgcctgtgaaaccggataaccagtttcccttgctgcacaaaatggaaaccagggtttttggctccaaaactgaaccaaatctcctccaaacctgttcaaacactccagaacagtgtactaacaataatacaacatatcccaagcttcaaaacacaacaattcaatctttaattccaaattacatgcttaagtgaaagaaattcaacttttagcttcatctaacacatttcgatccaagtagccaaagaaacctctcaaaaccattctcaacacactcaaaaacctaacctaaacacaactgaaactcaatctaatccctacagccacagaaacacaaaaccctaaccttaaaccaacaaaaattcatagaattcacaacctataaggtgtaaacttacctcaatcacttctaggttgatcttaggttcaagaatatgctccaaaagcaaaagaaaaatggtgtggagagtgtctcttgctggttggttggcttgcacgaaggggagaagaagaagaggaggagaagcgtttggttccttgcttgataagttaactcttaaataggtttttcttttctttttgttataaaaactaacttgccaaaaagactaacctacccctcaaaacttaactttctaaaaaaagaaacctaggggcattatggtaattttactaattcaccaaccgacattctaaaaaaattctaacctagtccaaaataccctcaaaataattctctcattaacgttgtgatatttctgaccacatcactaaatttccacagtagccgggctggataaaatatttttatttcaataatagtatcctcgatacccacatatctcaatataatctccgtaattaataaattatgcttggtataatcattcaataaatcc

SEQ ID NO: 26081 - DNA, 1723 bp, Cannabis sativa
ttacaaataatatttttgttttgttagctttagttctagatttgcattttatttatttatgaccaatatccaaaagtttttatgcctgaccaaaattatattgctatagtaataactttatttatttctagataatacatttattatttaaatagtaataatttttagagagaaaaaagtcacatgtaaaagtcttgcttgacaattctgaaaaatctgagacggtcttgaaataaactaattaagttgagttgtactaatgaatacacagttaaaagtaaattgtgatttaagggaataattacttactttgagcaccaccaaggcgatttacacattccacaaatcggtgatgaagatcttgagtccatttcagtcgttgttttccactactttttattatcccacttacattttcgcaagataattcagaagaattgaaaacagtttgatctgctgatgagtagtactgcttttgatctttctgctgtgagtaacaagtctccaccttctgattatcttcttcatggactctcttgttaattattataaaacaaatatcaatttaataaataaatcaacatatttaattcataatgcatgtattatatatatatacataaaagaataacaattaatgtttttcttacttgatgatgactgctattattaataatgttagcttcatcatcgtggtcagtagaagattggaaaaatgggatttggaatgagctgcacatctcgagcaactcagagaaaagaggaacaacattaccattataattaataatgcaattctgatgatgacttattttgttgggttgatctgaatccatctcttgatctctaccttctaattaattttttttttttagatattgtaagctaggatctgtagtttctcatctccaaacattattttattttatttatacatgattatgatagcacctttttgtgtaacttcgaaaaagttttggaatatataatgcttatacattacaaaatgaaaatatatggtgttaagatgataagtactagcaagctttcatcattatactagaatatgatatagtataagtgctacatggcaaggaaatctagcgtggcaagctagggaaggactgcattctttaaatgaaaatcagaaaaatgacaacattatgagttaaggatgatggtcatgatatacatatatagtgggaatccataaataatgacaacacttttttagggtttgaatttgtgggatcactatgtatagtttaaaataattttggttacaatatattattccccacaaatataacttagataggaatagtagtatttttgtcgttttcttttatttaaaatagtttttgagacaacattaaataaaataaaatagttgtttgagagatcatggactttatattatacaatctatatatttatctaatttttaaatctcaaccggtaatgtgatactcttataattgtgtcatgacccaattgtcttaagctgtgataatatattcataacttggatgattaaatgtcacactttaatttttctactacaaaaaatattacttttagttataacatatatattgtaactaaaaagtctctaactaaaggtattaatcacaataattacaatttattgtgactaaatgtatttttagtcacaacaagtgttgtgactaaaactaaatttgtaacaacttgtatctaaata

SEQ ID NO: 26082 - DNA, 7725 bp, Cannabis sativa
gaatttactcttcttattttgtttttaaaaaaatatatatatatatttatatatatatagttgcaactctatgtgactatgacacgggattttgaaactgccgcaaaaagggagttttgagttgcagagtattgacactgtttaccaaccaatacaagacacggcgaaacggcttgttttgactttttaatcgtagcccttttttccaataatttgaaaatactttgtcctttcacactacttctcatccatatccacccaaaacaatctagtacctatacatatacactatatataaagtgagcatcggttgctagcgttattattctttttgacgaatcccattacttaacattaattaaactagtaacaagttttattatattcaatagtaggttggatgtttgaaacaaatattagagactgtttcctcaaaaaaaaaaaaaaaaaaaaatattagagactgaaaaagtgagagtaacacaacttctacaactttatataaaaagatcatttaaaattggataatgttattatcattttaagggaatgttttttgtactttatcaaatgttaaagattttagtagttgaagaatactttatagctcagggaaaactcatagttgtaacatggataagttacgttttgtgagacattcagtggtaatgataactgagggacattacataggttttttccccactttacttgagaagattaagtcacagaagaaaagtaagaggactgtgagatgcgaactataatcaactcaatagattattgctgtgactaaaagtacaaaaacgaaacagcagggaaaattacagaatgagttgattcccaagacattttaagtgataaactaaggttgagatgaatcactgttcctctgtcatagcaaactcaaagattttcaatttttattagcttcagcttttctattgaactttgtcaaaagtcgtcttgtttgactcaattgcaaaaatttcatacattgagcagaaacatctgtaaagtttaaatcagctgatgatcatcttcttaaaaaaatcagcttgctcgggaaaatactccagaacttcatctttggttacccaaacaaaatcctcgcacttccttatgttgaatttgttggttgcaataacttgagacttaaagaagaatcgctatttaagcacacatcaaacgaaagaaaaaaatcagtacctatcgatcaagtatacttagttacactattgacaggtcagcaccaaggaataagaatatatatccataatttcatattagactatccaacatgacacggaaattgattaggaaaataataccttgagcgatgaagattctgcttgattctctgtgggctgtatagccatgtggcccataggggcattaccaacaaaataagtattggataggtctcctatgacatttttcaacgcagactctgcacactgtaaattcatttgagttatatatcaaagaggacgcagaacaagattaatgattttcaggaagaggaattttcacctttcgcatggtctcttctgactcgtaaactttttcgggaaaatgccacacggccttaccagtagagtccccatttgtggttccatatagaagaagataaagccttctgtcgagtgctctttgtaatgacctgaataaggacatggcattttacataattagtcaaactgtcacagcatctcctgacaaagtgtttgattcaaaatcatgttggaataataacaaattgtataagaagaaagaatgataaaactttgtgtcatcaaacccaaactcaatttaatctcagcacacacagcatgatacacctaatactataatcaataatcctagtgcttgcaaaccattcaaccattggtaaattcatgtacttttgcatctccacactcagttacataacataatgagaaatcagaagctagtgcgatacatggagttttcctttcaacttgacttagaagaatttatcttttcatgtttaataaagtagatgatcatttataagaaacaacaacaaggattgcaagtaaaaatatgtaaaaccgataagaagaaattagttaagaagtaatcactaactataaacataaataaaacccataagactatccaaacttattttatacagaattgccctgccacccctatgagtatgtagatagtagatactataagcaaacaaactttctcacatataccaaattccgcggaaagaattgactgacaagtgacacacataaattataaaactatatgtcatcacattaagagcactatattttgtctgtttaaaagctaaatattaatatgaagctcaaagagtcacaatgaaaaagctcaaagaaaaccctttttaagtaataacagataagataaaataaatataattctaagcatgtaacattaaaacatactccgtactttttgtcattgtttttgtcagcttcagttattcgtggagcaggtacataatcaatgtggtagtcccctttccctctgaacataaccaggtgttaacaattggcgtaaagtgtttgagaatttttataatagtgttgctatgaataagatgcacatattatactatgagaatgcaaagttttacttttaaaaaatgaaaactatgcaacgattcattatagagaagaaaataacttaacctggaattagacttatctaaaagctcatcaggatatcttcttcggaactgttgttgccatctaaacctgaaataggacagaagagatggtaaattccaaaaacacagaacaagtatatagtaattagaccttaattcttgattaaaaaaaaaaaaaaacacaacaacaaagattagcttttggtcaaataaatgagactgtaatcatcatttacttcactactttgtggttgtaaaaataaaaggaagctgaaatctaaaatccttcgctcttcatgttcttatcagacacgatatgaatatgtcaaggtcagcaattgttctaactctctggggtccttcctaaaaattatcatatcattattactattaaaaaacatgtattcggttactgattaacagcaaataaaaatacaatgaattctaaggagtccagggaaaagcataaactaagaatctaatctaaatgattgcaattagtgcttccagacattattcccacttcaaaaatacctcacgaatcattggcgaccagactgcataaactaaattggtgctcagaatatcacttagcagtatctaatatgtttttttttcttaataaaatgcatttttcttaatcattttcttcatttcaaagcaagacagactcctaaattcagtaattagaaaataaagtaaatttccccaattttctgagcaacaagaaaaatgaaatttggaatggatagagagcttacgagaactcctggaaggcgtagacgacggggtcaattttgggaacaactacgggcaacctctcgaatagtacagacgcaacgattctttcagagttagtggaaaatcgtctctgcctcaagacaggtcgaatcaacgaccttaacgttctttgcattgtaaaactaagatccccgaacgtcacaaacaaattttagtgagagaaataaaatgcatatctctcgaatacttaataaatgcctgtcaaacaaggatatgaatatgattctcaattactcactgctcagtacctttcggagtcggcaacgggggctattcaacgtcagagagaaccagagacggaggagggacgtgatctgctgtcttcggtcggcgccgtcgggagatagccgagagtgttcggggggtggggagtacgagagtgacaggattttttcctttgtttttcaatataaattgggcttttaagaaagcctaaaagcccatccccatttgtggaccaaacaaactcagcccataatgtgacattctttttcatttatggaacaatgttcttaccctggctaagttgaaaaataccacttttactaattaattaattaaatttacttctaattttatatttaattgaaatatacctctttttatatgcattgtactcaaaatattctgacataagagagtcacattggagaatatcttgaagtgatatgggcaaaattggtacaatatttaaaaaaagagataaaaataatagactttaaaaaagagggtaaacataaaagaaaataatataaaaagggtatagagtgtaattttctcatattcttattgccacacacacctaccaaaagagtcatttttataagaggaaattacaaatcttttctatgctttttgggtaaaaatatagttttttttaaaaaaaaaattattattttataaaaaaattgaagaaaaaatttaaaaatatgagaaaattaagtaagagtaattaaatagcttatgctaactagatgagtaaccaattaccataagggaataatgctaactacagaaattcgtgcctacttatcgcagcttggaagttagttttgaagtttttccatatttttaattttttttttttctaaaattttctcataaaataatttttttaaaaaaatcatatttttaacaaacttatatactttaaagccatatactttatccatttcaaaaaaaaaaaaaaaaaccatttactttataaattgcttcatgaacttattcataaatataccttctatatttatcaaataaagtttatcgaactatcaatcttgtttattattgttttcagttatcaacataatctatcaacttgaacaatcgattacattggagattattgggtaataattaatttcaatttggtcaaccaaattgtgttattttttgtacaaccttttctcttcctaaaattgatagtggaatgatgcgacatcaaaatttagaatagatggtattttcttctgatgcaattctactgtcttattatacaaagttattaacctgaaaataaccacctttttaaaaaaaaaaaaaatgacaactagctcaataattttaatattctttttttatccttacttcagatactttaataatttttaattattatgtaagttatttttttttttcctgaaatgtattagtattagtatgaaagatgagaaacaagaattgggagaaaggcacatttttattaataagaaaagaggctggggaggttacacgtggaaagtatggcaggatatgaaatgcaagtcagaacaaaggcttctttccgttaagcactcccatcaaatattcaaaaacccggctcccaggatcgtccagacccgaatgcaggtactcatttgttattaacaatcgaatccctgcaatctcagaagctgtttccatggcttgtttgaagttaacattcatatcatcataataagcagatgctgctacaggaacctgacaattaggaaagaaacaccaaagacaaacttaaatggttagatacaacaactcaactcatgtgaacattggctacctaaaaagttagatttctaagactgattaactttcatatcaaggtaaacagaccttgttgttatttagagcagcaacgttgtatagtggaggccaatccttcttctgagctagtatatcagtagcatctttcaatttctttgagatattaaactcatcaaacatccatgggaaaattgcctgtggtagcaaacaatcaagtatggtcaactgaatttttatgaatcattaaacattatgtattcccgtaggccataggtccaattatgaatagactggttgatgatcatatccaaagaattgtcactagtcagaagcatgactgttagcatgagtcaaacaaacccccgtagctacacattaacatgttcaccaacctgtgaatgcttactggtagcacaagtgaaaggacaaaaacaagactaaaatgctctagaaatattagatttaaacaagtcctgacattttcaatgccacaaaggccataccttcaaaatttaaagaaaggttagttgtttgttgtagggaaaacaaacagaatgggaacttgtagctaaaatgtttctgcttgacatctatttttttagacattttctttcaaagttccaaaaaagtcatctatcttgtagcccataacttctctgagcaacaataaatcataaccatagttgtaaagttcaaaaaaagtcatgattttgaaagacaaatttggtgaaggaaagtagctattctacatcacagaatcaaagaacattatatcataccaactaactagggaaaggataaaagagaagtgaacgctggaaagacattcataataggccatctgttgatatgtccaaaaatagatactcatatcaggatatggatatattatgaaagtcttatatgatattccattttcttaagtggtacaagcagactgctctcatccaccaagtaaacaaggtaaacaagacacaagtaaaaaacaaagggggctattcaagcaaatgtgaaagtgaaaattatgtgagaattgttttttgttgctaataaggttctgagcttagaataagctaacctctccagtaaaaaatacagagcgaccttcttctgcagccctaattgcatcaaagttgctactgaattcatcccttatcctatgagcagaccactgagacgaagcaccctaaaaggagaacaaacatccaatcaaaacaagtaaataagcatatttaatcttacaattaaataagtgattgatcagtcgggcaaagaaccaaataatagccatataattcttagttgtccagaaaaagaaagaaataaaatagagtactctacctgacagaatatggattcacttagcagaactgaaagtggatttgtcttgaaagctacaagcttttcgaactgtaaatgtcaaatagattagagatggtatgaagaatagtattcgaagtttaattcaagatagtaaggagacaatgattttcttacagtatccaagaagttataactaattgtctttggtgctcctggaaccattacaggatcccaaactctctccaatctaatggatgtaggaaaaataaatccaaactgttgttaaacttaagttcttataaactgcggcatgtataagtgaacactaaacacctacatgtagtgcaaacgctcaaaaccagcatagcatccaagaaatgagacacctagagtttgcaagccttgtggagttaagatgcccccagaagggagatcaacctacgaaaattgagattccaaagactaagacttcattaacatatttgaaaatctactaacacaataaatttcaaagtaattactttacttactcctcctccagattctgacagatagttaacaacttctcgaacagtctcaacatcctcagggtacctcttgtagtacttttcattctgaagtataacctgttcaaagcacgctctattcacagcatcagcagtgcatccatttccaattggagggattcctccagtcagaaggacttgcctcaatccctcttgtgcaaaactcaaataggttaccgcacaaaaaccaccatagctctacacagcaaaaagaacaagatgccattcaactcaatctcattcaagagagaaaagtagataacacatcgtaagagaaacatacaaaattgtacgaggagaaaatgtaagaccatggcatattataacagaaagcttaaatat

SEQ ID NO: 26083 - DNA, 2605 bp, Cannabis sativa
  modified_base (2544)..(2561): a, c, t, g, unknown or other
tctctctctctctctctaattattgtgccatatatttgttgtaccccagagttggaaccttgccatgctctcgtgaatttacatcttattctttgcatgttttacaggagaaagcttcgatgattgattcgtttaacagaatgttatgaccatccacgtttttcctagtcttgggtccataggtaatatagctcaattggcaccaattttgctaacaatattggaatagggcatatctaatgccaattctacggtagaggtaagacaacactcagaattttaaattttgtttaaacttgacttggagttcttatgtacataaatattcttttgactattctttagatatgtgtatataggaattctcaaggactcattacactatccacacgacacgagtccttgacatcttgtaacatcattatatattcatattaaagttacgaagttactcctaatacagaagactaagacattacagtacagataaataggaatatgttagtatatcattgtattgaggttttatgatgtggtagctacaagtaactaacattaaatgagtcctgtttgtctaatttgttttgcataatacattgaacttgaatggtttgtcttatttctagtgttagttcattgccactcccacaaatctaatatgctggattagtgcacctagggtgtactgctacaccccatttatactaacagttactgaataataatattataaactcaatttttttttccctaagaatatagtgcttcaatgcacccaatgggatgtactgattcaaccctatatattttggcattcaaatgaaattttttagtcaatatatatgtacatattttgtggttgttatagttatttaaggctttttataaatttttgaaaaatttggaataatttataatacagtgcggtgttcaatagtcgattttacacgtgtatcaaataaaaaaaaaagtgtacatgcggcattgtttgaaccatgtttagtctttttacttattgtgaaaattaatgtacgcaagtatacacaataatacaattaataaagtgataagtaagatcgtctctagacggattgcaaataaaataaatgtaaaactaactagttaacaacttaaggtcttttgaaagaaaaataatttgtgataatcgatgattgatgaaagtaaaacaaattggtgacaatgaaaataaactcaaaataaaataattaatacttaaaaattatctgcaacaaaatgtatctatggaaaaatagacttaaattgctaaatttaatctatccaatttttcagtattgtttcagtaaagttgtacagagttaacaatatttcttctatgtttatgagaatttttcataactcacaaattaagttatatcacttagttcattatattcctatataaaattagattgcagaacaaaaattaatcatcaattttcaagttatgtaaggtaataaaaatattcatatccatttactaagaaaaatttaaatctaggtattcacttgcatcatccaagttgtaactactagatctagcctttccagaactagatttagcttagtaaattgttactcatggccaagtaataacaatcaataaacagtaagctcacttgaatgaacaaaggcaaagttgctaaaatatacttaaaaataatcatagcaaacataggagttcatagccattcaagcttcaagaggcttagctcatgttcaaaccaaaaaataatatccaaaataaaagttgatcatccatgactgctacttgattctttacaatttaacaaacttcaagtatttaaagaaagaaagagaataaaagaaagagaatagaaattcaaacaaatgaagcttgtgttctccttctttttcgggtgagttcctcttttaggctcttcattttcggtactgtactttctgctattaattttctctaaaaatggctgcttagctcatgctgaagaagatggtggctgtacttggtaaattgctagctccttagggtacaatgtaataccctaaaaatggaagctcattccttttcaatcttggcacattaggttttgtctcctccctctataacagccaagttacgccaactggctgttacgtacgtgctgatgtggatgaatgaaatttgttttgcaacttttttccacgtcactgtccagaatgctgaatttgttgcagcaatgcttcagcaattcagcccaattttagtttccactccccgctttatcattgcatcattttcttttccctagtagtttaattcttatttcctaacaacaaacaaccaatatttaattaaataaacacaactaaaaataactatttctacaagatttagaaattagcttgctaaataaaaattgaagataaaactaattaaagttgatcaaacaaacacactttcactactcttttcatgataattttagtttaaaggcacaagaaataattctataccatggagttattgttgggatttatgtccaaaataaaactcatttcaatatnnnnnnnnnnnnnnnnnnatatagatcagaaataacatttattgttgcatggttcacatgat

SEQ ID NO: 26084 - DNA, 2185 bp, Cannabis sativa
gttgagcttggggaagccaaatcttagattgctatcaaggtggaaaatgtaaagaaggtcatcgaagatagtatcaagaaggtgatggatgataatgagactctgatgagggacctgaaggacttgaaaaggaaaaaagagttgttagaggtcaattatggccaacaaactcttctcctacaaggtatccatgtaatcagtgatcaccgcaacgagaccatatataagatgcacagggaagccctccaccaatcatctagcagcacttggagattcaaagcttgagcgactagttgaggtagtaatttccccacgtgcttctcaatcagttctctcctctttctctttttttttctttgctttaattttagtttcacgggaataattttaataatgcccttattgtgggttcgtctatgatagccttagagacatctacttcgcttatgcttactttatttccttgtttgttgattgcttcttttccctgcctttgtttatttgctataccattcaatagattgctcttcaggattttgcaaaggttttggttacaatggcaaaaacttgatatcctttgatctttataactttataactatcttgttcaacccttcaaagtatgtagaactgcaaatgctgtaggtgtcaactttggtcaaagttctcgtagtggtgatttgaaagcttttggcgaattaaccttttgcgggggcattgtaaactatgttcccggattgctacaggagtcgcggagcttactttccatctacatttttcccaattaactgccttaagtagaacattgtaggaaacttatgttatttagattagtgaggaaaagggactaagtgtgcgacaaaatcctagccaggttctttttcagggagacaaggttaggtttgtgctagcacttagatcatccttccttgatcttatatacttaagttggttcatcattagataaatttttcccaaatttgtgataagagagttgctgcaccacggagggctcccagacgtgcttcttttttctcactccttttaggaaacttgtcagtgtggttaacaaactagggtgactacaattgtattcaaatagtgttcccttttcaaggaccacgttgaaaacacattggctgtgccttccacgagaaccaagttggacatacaatagatttcaagtggttcctccttctaggaaggagggttgaagacgtacaagaatccaagcaacgactttgctcccaagactaaaggtgaaaactaaactggtcatgcaatagacttcaagcaattctcccttccaagaaggagggttgacgacatatcgaagcctaagtattattttcaaccattaatttggctattacaatatttttgaagtgaagtataattacaaaattaaatgcaaatatgaataggaaagcaataagtaaggcacttgtacgtttttgaaggcatatagctaggtatactacccccaagtgatccagaaagtttggacgtctccaaatttttgatcacttgtttaaaacatagcttgtgcgagaaataaacgtgtgaactcttgtgtaaatttcttcttttttcatttcattatacctgcacatttacattaagaaagaaatttaacaaaaaattcacgcacagctgtagaggaacgtcaaacccgaatacccctaacctattagtaataaagcaactcctcaagtcgtagtccaaagcaactcctccaaatagtccaaagccaaagtggtgttgctggcacctcatatgcatctagttcaggtgttggaggagcatccaacaaatcaacttttgctactgttacctcaagtctaggagcaacacctgctgcaggggcctctactccaccagctgcaagggcctctgctcaaccagctcccaaggcctctggtccactagcaaccatgtgtgatcacactggttctgttccaacaccaccagttgttgctccaccagccacagccagtgcagctgctccaccagcaccatctttggttacttctgataatgtattatttacttgctttttaaaatgattttcattatgcatccttaatttttatatcataattatttaatttctttttaaaataaattttgtttgtctcttgttttgtttgcaaatgaagatattaaggtgtgatatgtacgtgat

SEQ ID NO: 26085 - DNA, 1078 bp, Cannabis sativa
tcacaattaacaccaactcttgacaaattttatattggtagttttggaattggcgttctgatcatttggttcgtcattatattttcttaattatgttactttaataagggtttttggattagctgtttttgttaaaatttatatttgaaaatatatatgtattatatacattataagagcttttacaccatatattcaattttcaacttttttatatttttattgtagggtagaatttttttttaaaatactgtataaattttatactatatattgtgttaagcttttcctgttgttccaagattattttttaatttttttattgttattttaattattctgttttattgttttaccattattttattaaaagacaatacttttacataaaatctagtacttttttttgtaaaaatcttcacattgtgtatttgtggctgtctatagctattagcctattaggacaaaaaattgttgtttagcttcgttacatcactttatcttctgaggtggtaaatgtaattaatatgtatacttattttttaaatatatttttatcatacatatattataattatattaattattatctacctatatcaattctaataataaaacttaattaaaataaaatcctatttatattattaatcataatattgaacttttaataggtattattcatgcatgaatggataatattaaaaaaaaattaaatttttatgtttaattattttatttgattaaaaaaatatctcatttcacactatatataggttggggatattctatcagttgaaaaaaaaataataaaaaaagttttttggtaaaaaataagattaaaaacacttgaatttaagttacatctgttatatctagatatatttttaatatagtgtgaaaaaaggtattttttgatatattttttaattaaataactaaattaattatagaattttaaattttacttttattattcatcgtattattcgtcttaaatttaataatttaatatttatagtttaaatgtttagtaactataataacattcattgagatgtgttatatataaatataa

SEQ ID NO: 26086 - DNA, 3710 bp, Cannabis sativa
  modified_base (28)..(29): a, c, t, g, unknown or other
tcacggctgctcaaccttagccttgccnntacctacacatgcaaacaatatctatgagtcgacagactcagtaagaaatccataaacaataacttagcaataacctgaattataattaggtgcccatacacccaactataaccctatcctcctgtccaacacggtactgagtcaagaacattcatacggcagtactactgaccataatatcagcctatactcggtacgctagtcgtaccgatgtgatactgtcaagtagtacagtactatcgaccataatatcaccttatacccgatacgctagtcgcactctagtcgtatcgatgtgaaactatcgagtagtacttaagccaacatacgtttattgatatccaatataatactaaatatattgataccgctattataatgtaatctaacaagcttaactaacatgcacgctaaacatgtaagcacatatgcatatcattatactaatactaccacatttttgagtttaggtgtaccggccaacctgagtggaatggctgctcgacgatttacaggcccctaaatcacattatttgcaaaactaatgagtgacacgctaaatcactttttagggacttaaacttaaaactaaaagttttcctatcgatggataacatggaaataccctaaatatcataaaaacgtgaaaaactagggttccctaaaatgccccaaccagaattccagttctgtgggttttcttggggaccaatcggttgaccggttcctataggtccccttgaactggaaatttggtttaggtgtaggaaacacaaaactaactctaaacaattcaatttaaccacaaatgttacccaaccttccagacctactaaattcatcataataaacaaaatccatacaataaaaccaaggaatacccacacatacacaattcaccattaaagaccaaagtttgagctccaaagctcgaaccttgtctaaacaccaaaccaaaccacctaatagctcaaaatctgctcaaacaacatcaataacacctcaaacactcaaacagaacaaaacatcatctacagccaccttaaatcccaaaaacatgcataaaaccataacttgaagcctaagaattcaaaaaggaaaatataaaagggttataccagcagttgagacactacaaacttgctacaagcttgaattgaagtaacaaataccctaaccacttgctggttctagggtgcgagggagacagagagagagggagggagagtttggagagagaaagagttattttatcttgatttttcttatgaataataaaaataatatacctaggtattatttactaaatcaactaaggaaaatcataataataaacctaaatgaatctcattaaagacaaaagtgacaaaaggccaaaaagactaatttgcccttgcctaagccaaaaagcccacttgtcatttaagggtattttagccatttctaaaccttgaataattcccaacattctcaatgtctaactaagttgccccactactacaaaaatactaaaatgtgattctatttgccaaacgtcgtgttctaatgttactgggcacaaaacatgcaaaaacataaaattccatatatggcataaacaatacatcctgaatttaaataaatctctataaaatcataaatcataattaatattctactttcataattaaaccctaattctctgcaaatttcaaagttaaaattaagcggtctttttcaattatcccttgttaaaaggattttgtcatcaaaatctaacctgaataactctggatactgagccctcatgtgagatttgaactcccatgtggcttcctccaccttactgtttctctagagtaccttgattaaacctatggtcttgctccaaaaaactttatcttttttgtctaagatctgaactggttgttcttcgtgcaataggtctggttgaagctcaagattttcatagctcagcacatgagtgggatttgaaacgtatttccgtaacatagagacatgaattgtgagctgctaaaagtgctggaggcaaggctaggcgatacgctaccagtccaaccttctcaagaatctcgaaaggccctgtaaacctagggcttaacttgcccctttttccaaaacatctaatccccttcattggagacacccgtaagaacacatgatctcctacctaaaattctacatttatgtgcttcagatctacataactcttttgccaactctgagaggcatgcattctggccttaatctattctatggcttcattagtccgtcgcactgattccggacctatgtattttctttctcctgtttcatccaagtgaataggagatctacacttccttccatacaacatctcgtagggagccatccgtatagtactctggtaactattgttgaaggaaaactctatcagtggcaggtacttgctgcaggagcctttgaaatccatcacataagctcgtaacatgtcttctagtatctgaattgtcctttcaaactgtccatcactttgaggatggaaagttgtactgaatttcagtttggtacccatagcctgttgaagactgtggcagaatttcgaagtaaattttggatctctatccgatataatagactttggagtgccatgtaacctcactatctctttcggttataaatctgcataatgattcactataaagttttttttaccagtagaaaatgtgcagactgcgtaaattgatctaccacaatccaaatcaaatcgtacattcctatggttctaggtaacccaaccatgaaatccatactgacatcatcccacttctacacaggaagtgtaagtggttgcaatactcctaccggtctctaatgttcagccttgatctgttgacaagttaaacaccgggatacaaattctaccacctctttcttcatcccgcaccacgagtagtagggtcttaaatcttggcacatcttggtagtgccaaggtgcatgtatatggattggtatgagcttcctcgagattctcatttctaagttctgctttacttggaacacaaaccctggtcttatacgacaacatcatgttatctaacatcgtaaaatctttagcttgaccatttaaaacatcttctcggatcttcttaactgagcggcttcaattcgttccaacagatttgattgcaatgtcaagttatgaagtttgcttacaaccaacttaatgcctaatttgactatgtcatatgttaactgaggtgaaatcttaatcatactagttacctgcccaaaacccttcctgctcagggcatcagccaccacattggccttcccaagatggcaaaggatttgacaatcataatccttaaccaactccaatcaatgcctctgtctcatattcaaatctttttgggtaaagaagtatttgaagctcttacggttggtgtaaatctcacatttttctccgtaaagataatgttgccgaatcttcaaagcaaacactaccgcggtaagttctaaatcaggcgttgggtaccattgttcatactcctttaatggacgtgaggcataagtgatggtccgatcagcctgcatctgtacacaccccagaccctatttgtatgcatcgcagtaagctataaacgtttctctctccgatggtagggttgataccagagctgtaatcaatctctgtttc

SEQ ID NO: 26087 - DNA, 3241 bp, Cannabis sativa
tttttatgtgatggacattttgatcggtgaaagtaattcaaatattcttgtggcatgatacttcattttattttagtactatgtgaactgactattgggtaagatttttttaagctgcttttagctattagaattaatgtacttttggtagtgttcggttaagaagatttttctttggtagtgttctgtaaagacgtagccaagtgtattttttaggtcttgtatcaaatgggtttgggtgttcttaacaacctcggttttgtttagtttcaaaatgaattttgaaatattttttatataattgtttaataatagtattagatgtattaatataagcgagctatatgtataataataaatgaatgcaatttaaatttgttatagtttagttgttcggaatgttatattattataatttcagattggaaaattaaatgtaaataaagtaataattgagaggatttaatggctgaaatatatttttggaaggaatatgaatttgtatttggataggtcaattatgctatatgtagatgagctctactaactttggtgaggttgccaaggcatttggtgtcgaaaacttccatgatcatgcagcgaccatcagctgatattactcttttacatgtaacagagtgtgacagatgcagattaaaggaattacttttttacatttacgacaattaaatatagagtctgaacgactaacaatttatgtatttaatagatagaataattaatatttttgtcttttaaatttttgacacaacttacttttattttttaaaatataagttttgttaaaaatcttcctaaaatgtaatagttatataattatgcttttttttttttgttagattttgtttttttactgttaaaaattagtatttttatcatctgaattttgatcaatatgaaattttgcttatttttattaaaaaaaaaactaatttaaaagttataatgtattattaattttgaaaaaattattaagaaacttaataaaaatattaaattaattaaaaaaatattaagtttatttaaaaaaatttaaattattgttgaaaaaatattttcaaactttattatatttataaactcatattttaaaaaattaaactaaaattattaaaaacccaataaataatttaaacaaactaaatttttttttgaagaaaaaaattaaacttatttatatttataaactcatatctaaaaaaataaagaaaaataattaaaaattcaataaaagtataaaattattttgaaaaaaagttaacaattaaaataaaaaagttatgtttacttaaaaaaaatttaaatttttagagaaaaaaaatatactcaaacttgtccttgtaaaatttagattttacaaatattgaatttaaaaatattttttatatctaaatagatcttctaataacaaataaataatgttttcaatcgattagctagttttaaaattttaattcgtttttaattttcttaatcatttagaataatatgtttttaaatttcaattaatttgttaaaatttacttaaaaaatattgaatttttagtcaaagttgataattaacaaagataagtcaatattttaacaggagacctaatctaaatttttgtaaatataagagttgaggaatgatttttatattttatggccaaataaaccctaaataatgatactatactcaacaggcaattcctctcttcacagaggatttttcgaatcctccactctcaatataaataaacaattagctcgaggccatccatacataaaatacaacttattcaagaaaatattacaactttgtaaaattaaatcagaatatacaaaacaattcaatttgagtacgtaacaaataaatgaaatcaatataaaacagctttacataatcatgttcaatgctcatccacaaccgccacctccaccgccaccgccaccaccaccacctccaccaccgccaccacctccaaaatctccaccgccaccagcccaaccgccgccagcccaaccaccaccactagatataatgccaccttcgattcctccatttgtagtactcattctaccatgaaatccagttgctcctgtggcttctccattttgacctctacaacatatagaaactaaaatcgaaataataacaaagcaggagaatactacgggtattatgataaaggctgaatctaccatttttttcttttattataaaatatgtaaatatacaagccacttctcttgttttatagtactactttaagacttcggtaaaactatataataatgtttgaatattctgttttaagctagtctttgacttcaatattttaaaaacgagttgaccttatcaaagttttcataaaaatttgtatagctttcttatctccaatgtataggtgggcattatatctatggaagcttccacttctcggaaatttcaatctcaaatgattgctctctcatatttcttttgggtaattgttgttcatgttttaatgagtcaaatcaagggaaagtactgtgatagcagattattaaatgaagaagagagagacacgaaatgaaaaagaaacttggagagaaaagtcgtgacaaattaataacagcttgcttttgctgaattcatagaatatttcacgtacggttaattaattgatttaatggttactattgacttgttgcccaatttaggtttttaattaattgttaaaatattgcgataattaattgtagcaagatcccgtgtcacgacgagctctaatttaactggtcaaaagtcatactttgaccattattagaaaataacacttataaataatcctttaatgtatattacaaaataattatttaaaaataatagattaactcccacatcgataaaaaaaatattagtgataaaatcacgacaattaatataaaaaaaaaataataatatccctataagatcaccgaatgaatagatttaataagttaataaaataccaaaataatatctatcatccatcatttctcatttctaactagtacatacctaatttaagtcatctagaccatccattccaacttaaatacaaaatcaagttcattgggatagggctgtgcatgggttgggttggtcgggtgggaggtacttgttgggctttgtgcccaaaataaaattttattttaatgtaatcttttctaatattcaattatcaataaagaaatagatttattttcattactt

SEQ ID NO: 26088 - DNA, 3063 bp, Cannabis sativa
atagtccaaaccgtaaaaactgcaaaaattgcaccgcaccgcactattttttgtggagcagtttttgcggttttttagtttcgctgtgcgggtggaatttggaaaattggaaaacttgcatgtccgggttggtttgaaaaaatagtcaaaaactataccacccgcactgcgaacacccctagttgtagcgcatcctagttgattctttgggaaaccaaaaaattctgacactcaactggtggatgcactcgagataaagcattaatttccttattaccggtacccggtcaatattgaatcttaaagtcataacccaccaacttaaccatataacgttggtactatggagcaacaatgcactgttctgccaagaatttcagactctattgactagttcagacccaaaaacgtcaactaaggacataaggttgccatttttgaacaacaaaaacaatgaccatcaactctttctcataaataggctttgctcgagcttgactccccaagacatggctataatatgacattagaacaatccccataccataactcaaagcatccatttcaataataaaaggcctctcaaaatcaggaagagctaatacaggaacaaaaatcatggcgttttaaagagcttcaaaagcaagcttagttgtggcattctatccaaacttatctttctttaatttctcagtcaaggaccaagcaatttaactataaccttccacaaacttacattagtatctcgttagacctaaaaacccttggagctccttattacttttaggaactggccaatctaaaatagcttacaccttgaattgatccaccaccaccccttcaccagatataatgtgacccaagtactctaaccactttttttttgtttgtaaaagagcacttcttaaggtttgcataaaatttatgcttactaaggagttgtaagaccatagtaaggtgtgtcacatgcacattgcagctgtaaactagaatatcataaaaaagatttaacacaccacaacaaatatatgggtgaaaaacctcattcattgtagactggagtgttgcagggcattagtgagaccaaatggcatcacaagaaactcgtaatgtccatcatgtgtgcaaaaagcagttttgggatccaccagtttaacacaaatcttatggtagccagatttcaaatccagctttgtaaaaatatttggcccatgaagctcatccaaaagctcatctataaccagtattgaatatttatctggcataactttatgattcaaagcccaataatcaacacaaaacctccaactaccatctttctttggaaccaataacaccggacttgaaaatggactgacacgcatttgagaaatgcatgcagttaacatctccttcaccagttgttcaatgacattgttttggacttttggataccggtatggactaacacttattggaaatgtgccttctcgtaagacgatagaatgttcatggcctcagaatggtggaagtttctttggcatttcaaatatttttttggcctcatttaatagttctttaatttcagcaggtatttcattgttcccttcctcaatggtggcagccccaagttcagtgattaatccatgtcactctcatttaattgtttgcatcatagaatttaaggacacaagaatttcatagagtgagtctcctagtttagtcttgcccagatcaaagggaataaaatcttcaattatttccactccttgcatagtgaatggcatccccatacatatttgagcgtcagttgattatcctgtacccaatacgacatcgtagggagttgtggctatgatattcaactgcaaagtttgtattagaacttttgagataaaattatgagttgccccattatcaataagaaccaccaccgactgagaaccaacgtggccctttaatttcaaagtttttggggttgtcaaacctagaaatgaatgaagggaaacctccacaacttgatttctaaccttgtatcttcttgtttagccagctcagccaagctttctaagtcttcttcttatttctcaccatcacagattttttggacgagaatgacttatagctctacctttttgtatcgatgactaagagagaattttcatcacatttaaaaaaaagtccccgagacctcttttgttgaatctcaaatttcgtaagtcatcaaaatccaaacccagggggtcgaccttcatctctgaaattttttgaacaagcagtgaaactatttagagttgaaattggactaacctcagttgcgactccaagaaattgtgacccaagggttcacatgaaagacttaagacttctgttgggccagcatcttggattccactgtttgggccaatttcataactttctcaagcccacttgggcccaaaacttttactttgtgtcctatatctggattgagccaattagtaaaactagaatctattattttctctgagattccatctaacgatgaggcaaggagttcaaatttcttaagatactcacggactaatccttcctgcttgagagtaagaaactcacaatacatgaacccaacaagtagtggtctgaatctctgaatcagttgaatcttgagatcctcccaagtcataaatgacctacgatgatgctctcattggaaccgatcaaagcttccccatctaaactaattacaacagtttttagacatttttcatcttttagccttaacaaccaaccatttgggtttttgcaatcaaacgaagagagttcgattatatgaggtttggtgtcccaacgaggggctatttgggtatgtcaaatcccattgtggttgctgtgtgaatccccaacatgcatgggcagtcccccaaataatactagtcgcctagtcgttaatatgtgtgcactattatctgttgccattgtttttccagttgccaatgtctttttctttcttccccccttggcgcttttcgtcattcttcttggcttcgtaataaatcatcaaatcgttttccaagttctatattcctagttccaatgaagaca

SEQ ID NO: 26089 - DNA, 2530 bp, Cannabis sativa
tcactgttacttagtaaagtaacccaacactttcgatcgtccaacaaaacaacctacatatgtttactctgtattctttacacttactagagaagtttatcccacctgcacgagataatcaattctttaacaaataacaacgtatctcattttcttaataatataatcctaccatgaaataaatttaaactcagtcttcctctctaagaaaacaactttcactaataaacgttctagtaagcttatcagctttatttccattctaacggaaacttcaatactttaatacttctagctaagtctcgtatctatagaagattgtctaattcccttgtttcaatcatcgaggtaataacccttaccttactaggtatagaatggagacctctaagaatctcccaaagacttattatcattaataactagtactctgtctacctcattaatatacaactcaaccacttgagtgtatctcatttattcacaggttatgtgctcctccatgttttgagtgagccttacctttcttaggatttctatggccactccatatgcaagatttaccatctgatcagaccttaaaagtaatttccatcatcatcagaccattactagtgatatagataatcttctttatcttagcaacatcagtgttctcgtcatcctttccttataaatcataaattgaattattccttaattatcatggttcaatttatgctcttcgagatctatcctctagtgtctggacatcacttatgtagcaagaaatagcacaactcacttaatcatgatccttaattcacttcaaatctcaaacaaacacaagtatacttatttgtggttccacctctgggggttttgaaccacctttaaggcaagaagattccatctctaaatcactttaacaatcgcccttaacaatttctcatatctcaagacccacatgacatatcaaatacttatcttactttcaaaccagcttaccgctttatcaattctttaagctatctatttcgtcaactacttttctgtataacagctattacacccaaaatttggctacacttcagagagtgacacatgtcttgcagtggaatataaaccagctgatataataaaattatataatttaatgcaaaaaaagaataactcgttaataaaggattaatataacatattcataactcgctgactacatatttttaagcgagataaagataaaaggctattaaaacttatattgatgagacacaaacctacctcggagtacacaaccaaagaagataatttacttattcaaaggagtgaatacaatcgtacaaagcaacctcggattacgaataacaagataactacctcgcaattctaactaaagaaacttgacgaggcgaaccatttgctaacacttagcattttttcaacattatgatagacaaggataacaactcggagttaagcaagatacaattgtccaaatcagcattaaccatctataagaataagaacaaaagcagttaagcaattatccagtattatcccacatgcttttaaacgaaacatgagaattgtccacgtttcataaacggttacatttcaaatcgatcccaaatgtaaataactgctaacctatattcctataaataggggcagatttcacagaaaaagagatgaagattgagagagacaaagatcatcaattgtatcttatatcaattatacagaaaaatatcataataaaatagagtcgtggagtatgcagaattaactacaaaatcttgtaaaatccctcgagttatttaatagcttgttactattgttgtgatatatttattacgtgcatgctgattatttttagttaacaaaaatctgcgctaatagtttggtactttcattgagagcctaagtaataaaactcagaaaaatccctccttacaaacagaaatctatccatggctgatcacaatcaaaacaatgaaaatcgtcttgagaaaaatacacatcaccctcggaaagagccaatgggttctcaaagaccccatacttctggaacaacacgttcaagaagaaattatagcggtgataatcaaaacccaaaaggaaagaataaagaaaccaatacttctacaggatatgtacgtagaaagtgaggatgcttatgatccaactaggtatgtaccattagtggaattggaaaatagacaactccggcaacacttagccgaatctaaccgacaaaatgctaagttggaaagagaggctgcagcggctagggtgactcaagagactaatactcagatttaacctgatcatggggtaagaagaccacgagacagaccttggggttcaagaaccaggaaacaggaagcgaatcaaggaaatcccctaaacacccaagaggagcaacttgggggtactagggattttccagtggatgagcaacaaaataaccaagaataatgtcgagaagttcctcaaagatcccaaggatttatgaattaagggaatgaacataatgatgtacatgagg

SEQ ID NO: 26090 - DNA, 1968 bp, Cannabis sativa
aatgtatattttatttttatatatggggcacatcctagccctaatgagctagctttcaaaaaagaacggtggtaatgtataggacacttaaacctaactacgaatatcaatacattaattatttttaaattgcctaacagctttatatttttatttaaaataaaaaaaatagataaacaaataaatattgcataatgactaatgaagattaattaaatattacacacacattataaaaggtttatttgcctaaatgttgctctttttggggatgctcacacgtgtcatcaagtgtcccaagaatgggataatttaattaattaattaaattaaatgaatacttaattaattaattaatctctactatgcttttaataaatgatagtacgtagttttgagtgtcattatataattactttcattttttcaatgcttacttggattttttcaatggtaatttatttatttatttatttattttatgaataagaaaagtttttttttttcgaatggaaaattatattttattaattattaatttcagttaccaaaaataactaataaattagttggaacagattccatactgaaacgaaatgacaatcaaattataaaatggaagctctaataaaccactttatttactgaccgtttgataaaaataacaaaaacatttctcaaattagaaattaaagctttacattcttaaataatataatcaaataaaaaaagcataacaattaaactccgtaaagcttgaacaacacaattggtttttacagttacttggtactaatgtcgatccttgatccaatttaacgcttcccttatactcaatgcttcaactatcaatttaaggctcgacactgccattaaagaagaacgtgccccctaataagaaaagttttattgttcaaagaatatcaattacaactccaaacattatacacttccattttaatcttctttactataatttgtacaatatatacgttttggtcccacatacaaacatttctaacctcccaaatatagtacactaaaacattaacacttgccacatatttctaaaacgatggagtaattagctttaggactgagtgtttggaaatttgtgtgttgctcatgtaatcatcattttcatagtgtgtataacgtttactaatcctagctaaaagtagtgaaaaacttaacacaatcctacttgttggtattctattttgctgtgcttcgtgttgggtctggaaaaatgtttccaaaactacattttgttctgttttttggtttttgctggtagtagtttctatcctattatgcctcaagaaaagcatttgaattttgagctagtaaagaaagttccaacatgtgtttttggctcaagaaagaggagatattgatactgagaagattaagcaatcaaagctattcagcactctaaatgatcactggtattgttttccaaatgccacacaatttttatatgttgtaacaaggccctcaattctaataatcaagcaaagcaattttttaatgtttgatttcataatactctgatactcaatggaagaattctatcaatcttagttgaggtagaagcatctttgaatttatatgcttgtttctttaggtataaaacaaacacttgaaatggataatacttattttcttttctacgaaactttactttactttttgtatcaataatatgttttgtgatcttgaaccaattctacttttgtttttcaaacaggaaatggatgcaagacaaaaaagagggttatctggatcacccaatgctactgtttccctacaaagtgataacaatggtccaaggggttatggtggaagatcatatgagaattttgttccccctattaaatccaatggtggcaatggtggaaagagcgatgatactgcagatgattctacaaagagatggtaagctgtttttgaattatatgtacacac

SEQ ID NO: 26091 - DNA, 4440 bp, Cannabis sativa
attagctggtgatcgacctttctattctatcgctacatgcggtagcattcgcgagccaaaaattggtcacctcgcaccactcctacacctgtcggtgtttgaaactgtagggataggtgcttaattaaactaattccccctagtccaattaacgctgttcaacccagcagtatgttataggctgatggaaggtcgactactaaaaagccttgcattatagtggtagataaaggtgcttcacccatagttaatgggagctcgataattccttgattggcgacactgttgcctgtaaatccacacagatttatcatgcaaggttttaattttgctttttccagccccattttctctagtgtatccttataaagaatattcactgaacttccattgtccaccagcaccctttttatccttttgttggcaagttggatggtaatcactagtgggtcgacatgagggtatctcacatgctttgcatcctcctacgagaacacaattggaagttcctcagtcttatctttcttagatgattttggagcaaaaacagactgctcattcttaacttcctttacatatatcatttgggtattgttactttctctagccagatgtggccctcccgagataaccagaatgttctctccttcaagaggaggaggttgtagtccctggttacctgtgttattgggcgaattaggctggttatgtccatcgccttgtcttttcttatattgccggaagtgacctcgcgagataaggctttttatctcatctttcagctgacgacattcttttgtcgtatgcccaatgtccttgtgatacttacaaaattttgttgcatctcttttatgtctcgcatgcctcatgggcttaggtatacggaatgtgaccttgtgctcatgtgcgagataaatattttcccaagttttattaggcttggtataaatagtgtagattggtacgtacttgtcatgcttcttctacattctctaatcattagctgattccttggagtcatctttccgtttagagcctcctggattgtcagcctttatcgagacggtacttgtcgagacagtgctgggtttacttcccgagccagtctttaacaataatctctttccttgcttcctcttttcgaacaaatacctgagccctctcatttaactcactgatgtttttgactaagcgaccctgcaggtcatcccacagctcgcctctagcagttgcgagatcaggcgtgatccctgcctggagagcggtaagatgaatactgtcgttcaaatttctcactctcgcagcagttgtactaaaacgactcaagtatgccttaagtgtctcgcccggctgctgctttatgttagtaagagaagatgcttttggtcgcctgtctcttgctgcctagaactgcttcttaaagtctttagacagctgttcccaagatgtgattgaatgatgggtaaatttgttgaaccagctgctcactgtcttaagtggctcgcatgatagtattgaaattatttaagtgcgagaccagattcgtagtcctatcgtatgacgagacgtgagggtttttaaatccctgggggaattcagcactcataatgtctggatggaaaggctcgggttccttgttcgagtcgtaaccaggtagtttcccgaattccccatctctgtacctcctgaacatgtcctccaactcgatgattcacaattggataggatcctcttgtttctgattgagttgttgattatagttacttacagacctcgtccttgagtagctttcagttatatatgtacctgtactctctcgatcagtacaacaacaagttctgtcccctcctcgtgtagatcaactatgagtccttgtacatccagagctagaacttgcctcgtcacgcactgaccttctcttttgagaacgggttgatacatgccccgtgctgggatctgtatgtaccccttccctgtcaattcgagaaggatgttgatagtgtctcggtggaaacccacctgccctaggttgagtcccaagatctctctcgttaccacgagggatttcctattccctagtctgaggtttcttcctgctcgtattcttgcgagaggattttggtaaatcacgatttccattcccctgggttgcagatccccagggtctccgaggcacctcttgctgatgtacctagttattaggttgctcatctttaggggcatcctcagtttccccatgttgttcttcctgggcattttgagggtcccccctgagctattcctcctgcctcctagtttgtgagccgcgaggtttgcctcatggcctccttacttcaggatcaggttggtttcgagcattgtcttcctgagccgccctggctgcggctacctcttactccaactcagcatttcgttggtttgcctcctccagacgtcgcttgagttgacaattttccaactccaccaatggctcgtacctagcggggtcataggcatcctcctccctaggtacataagcactagcttcagcaatagtttcctcattcccagtttctgggttttggtcaccttcatgttggcttctcctcgaacgtgttaactgtgtggatcgagttgtttgtgagttgggaggcctccgtgagctcgctagctctttttgaatgcagtgagtagtctcttcaagttggatattattgttttcaccattatcagccatggagaaaagttttcttttggttaggagggatttttggagcttttttcacgtaggctctcaattaaagcaccaaattgttaacgtagatttttgttaacgatgataagcctatttcgtgacaggatcagcagagaaattagttgaaatctaagaaagaataataaagcaaaaacaacaccaagtttttacgtgcttttgcagttaactctgcatagtccacgagtcaatcttattcagattattctgatacaaaatatggttcttttctctcaagaattttcgtccctttttctgtatattctgcccctatttataatgacatagggtggcagttaattacattaagataaaaatcccataacaaaatttccccgaaattgtaggctttaactacgctccatgtaaataaatgcggttattatttgaaaatcataaaactgtgatttacaccgcttttaatgggtcaacgctgatgtggatttagatacactacaaagtgtatgtcgctagggcatctcgctaggtacttaaatacccaatagcaacaataaccctggcagcgaactggagcttttcccatgtctttccgaggttgataatgtaaatctagttatttctgcgcttgaagacataacgctccatctgacaatcgcagttcttggtgacttcttggtgacaaggtcttggtgacaaggtaatggtgacaaggtaaacttccttcagtagccaacatcatttgaatgtcagcttctttctaagagagttgacgcgacgtagcaatggagctcattgaaagatatctggagctaattagtgaaggtaccaagagtatgtcttcctatagcgagatggatgtctcgctaactgttattaggtccttcaacttagttaatttaatataatgtatattatacgctaagtattctaacaacctattagcctcgtcaactcctttttacacaaagcgaggttaatgcctcgctatgtattatctcgaaatggtttctcatcaatacatgaatcaatagtttgtatatctttgtcatgctaaagactatacagtcagcaaattatagatatgctctattaactctgcatttaatgagttattctatttaatatcttttaatataattgccattatatttgttgattcgtattctccaaggttgacatgtgtcatcctctgaagtaccagccaaatttcgggtataacagtatgtgaatgctctttgaattggtacttgttgatggttatgatgttcttgatatggatgcatattggtaggaattgaagtgaaaatgggtggtttttatgttgattaagcttgtaaatttatgagatatgcatctagattattttgtgtatatttgagattgaaattgtggtttgaaattctagaattgaagcttaatttctgggttacaattctaaaattttggggttcacaattggggttttgatgtttgagttttcaagctttggattagtgtaattttggtatggatgatttggacttggaatttcttgttcttatcttgattttaagctttgtttagcctagaattgttgttaatattacagttgtaaatagacgtgagagaaacacataggtctatattaaatagaatgtagatgcggtggcatcaatattaatttgcattgagaatatattgtttattattatttatactgtcttgctgggcttggctcacgggtgctc

SEQ ID NO: 26092 - DNA, 1638 bp, Cannabis sativa
tttggcttgttcccaattaattgcggagcattttttttttatcttgtgatataataataataataaaaaagaaaataatattattttcttttaataaaaacaataattatgaaccaaatttcaaacctataattagagacttttctattttaacaatatatatacatgtcaaattagtactatttattaaccttttaaaaattaaattaaaattaatgcagtggatatatatcatttcctttttcactaaatttctaacatgagatcccattactcttttcattttaataaaaagaactctaataattattgttctgaaattcttaacacaatagaaatagtccaaattataaatcaaatatcatcaaatattcaagggtgatcatactatgctcaatatagttaattagttcaatatttttttccaaaataattttttagacatcttcaacatgccttgttaaaaattactaagtcaataatttcaaaagaatgatattattgtaaaaaaattaatagtaatttattctacattattattttttttttcatatacaattaatttaactacattattaattgaacattttaaccataaatagatagtagtagtagtagtagtagtagtagtagtagtagtagggggtgtaatctaatgatcaatattttatggttacaatcaaatgagtcaatttaattgtatagactatataggagtggtacataatatttggaagcattattatgaaaagtctataggagtgatctaaacaattaatgcatgtgcatgcacactagcttagccctaccacttctctattaattttcctctataaaaggagcttctcataagtttaattttcaaaatacacaccaatagctatagcttgctctatctctcaaaccatggccaaaatatactcccatgcagctgccaataataataatttatccattaccatttccacaatgctcttactagggttgctaatgtcaactttagacaaaacaggtcattttctcttctccttctttaatacttaattgttatgttcatgattaccattgtattcagggacgaacgcacattgtgccacatataggtcgtgcaaccccttatctacgaattctcttttagtttctagtcgtgtcattttacgttacctctaacatggtgtatttaattgcttgtaaggtcaatcttaaaattgggtgagtcttagaaaaaaaaaaagttattgagtcattaattaacaaatatacatgtagtatttttaaaattactaacaaatatacatatagtatttttaaaattactaaaaaaatatgtatattttaagaaagagtatattatttttgggtcctaggctaggtggactctaggcgcaggcctagttcacgttagccaatctaattctaattttttgtaatcaggaagattacttgaaaataaaatctttggtactaattaaactcactatctttgaactgcatggctgcacaaagttggttggggacgtgtttgcaggtgcctaaccaaccatgtaaagtgaaattaatataaatatttgacattattttttttttaattttaaatttaaatccctaaatatttttcatcatttatggaatatagta

SEQ ID NO: 26093 - DNA, 1312 bp, Cannabis sativa
gaaaaaagaccaaagatgacatgtgattgctggccttcatggtgttgctgctgttgtggtggttcaaggaaaaagaaatcaaaaacaaagtctaagaaggggttatcaagattgcttggaggattatacaacaagaaaaagaaaatgatgggaaagacttatacgaggaaagagagcggaaacatgtttgatcttgaagagattgaagaagggcttgagggttatgaagagttagagaaatcatcactcatgtcacagaagaatttcgagaaaagattcggacaatcacctgttttcatagcctctactcttatggaagacggcggcctaccagaagggacaaatagcacaacacttattaaggaggccattcatgtcataagctgtggctatgaggagaaaactgagtggggcaaagaggtgagaatcattataatccaacatatataatctttctaatgatatcttatttactgatgatgttacttataaaattgattggcagattggatggatttatggttcagtcactgaagatattctaacaggattcaagatgcattgtagaggatggaaatcagtgtactgtatgccaaagagagatgcattcaagggatctgctcctataaatctatcagatcggttgcaccaagttctgagatgggctcttggttcagtcgaaatctttcttagtcgccattgcccattgtggtatggctggggtggaaaactaaaattgcttgaaagacttgcttacaccaacaccattgtctacccttggacttcaatccctttaattgcctactgtaccattcctgctgtttgtcttctgactggaaaattcatcatcccaacagtaagtaaccatatataaacagtaaaactaatattctattcgaaaataaaaaaaaaattaagtctcaattagaataaattgtaaattataattagttatacattttctaaattccgtattaaaaaaatatatttttatataagaataattttatatttatatatttatttatgtaaaatcaagatgtcatgtatgtataatatggtgcttactgtatattattcagcagtaaagagtaaaaatatttttttagataataggtattaaggagtttttattgtcattgttactcttttacattcgatgtaagaacacgttgatcgagtagccaccagccatttttggagttttaattattcttttacttattttatttaattataacttcgtaaaatatatctatagatggaggttttatgtataattacttagtcttgcaatcactaaccacaaaac

SEQ ID NO: 26094 - DNA, 2125 bp, Cannabis sativa
  modified_base (27)..(36): a, c, t, g, unknown or other
agaattataatcaacatacatgttagnnnnnnnnnntcctgataaaataacttccaacacaatggttttggcttcgtctctataaaatttcacgatttttttgatatatgtaggttgggattttaagagaatactaacgagtgtaagagtaaggaaaacttgttaaaatttaccctaaaaattatgagacctcctagacttgcacacttcctcacgaggaatctctaccatttgatctctagtgggtccaatatcagccataaaactcattatcaccccctcatctctccttccattttcgatgggagtcattggatggttatgaattgtattacccaaaggtctatcgagcaatgtactattatttcccaaagaggaggaaccatccatagttggtttcccaccctcctctgctccctctgtccatacccgaaagagggatttcctcccagacccctacttccatcaccaacgttattcttccttactgtcctatgtcctggactcatggaagggtaatcattgttactagaaattaccttcttgctcttaccatcttgaggtgtaattggaacactccttctcggcaagttttctggtcttcttcttctcattagaggtaagctaggatcaaatcagttcctaattgggactcccgccttcaactaagcaccatacaaaggcatctctcttccaatgagagggtaggtaaactcagtcggtttctcgcactttgtataagtcggtttctcgcactttgtataagtatgagccacatagcaagaattaaaacaaaattataggaagtttatgatatttaaactgaatccattctttcctatctctagagatattaagatggaagccatccactatttgttgatcaattcgtagatccacctggaacttaagaaaaccccttctcgcaatagtggcctgtggtgcatgatcgaagtcaatatagaccccaacttttttggccacaatatcagtattttccacgtcaggtaaggagtagggagtccgtgagcctccacccaatacctagccaccgccatgttcacatcttgccatacgccatccttcgaccaatctggtatattcagtaaggtcccatttaccaaccatggcctctttttaagaacaaacttcttgtcttccttctcatcaaagaaaagatcccctatattccttccacctctttcctttcagttttcttattccttccagcacttccttcactctaccttttgacaagcctctccttccaactacctttgctaatactccttttttaacaatatttgcacttaactcaaagtcagcttccaaggacatagacatcgagtctaggaactattgaaaaacatcctccatctcttctctttcatccatctctacttcctagtctctatctgaatcctctaacagtatttgaccctcctcttgaacattccctagtgtcatcgtcgcccttgcatctgacttctccacagtatgaggctgcaccactaacggtctgttctcactcaaattactaggctctatcgaagaagaataataatgcgtagagaaagttagtaactataaaaatttgaaaatcttcagaaccaaagtcctttaagagcactaggaaagttgaaaactcaacatctcactcgaagtaaagaataatctctggtatactattcaaatagtggtattttgataaatatttatagaattacgtatataattaataaatccccatttaagtagcccactcctcctattacaatgtttaataaacaaaataaatgagaatcaatgtcatacaattaattttcattctcattaaaaatacatgacataataacaatactacctattctgattttgattttgatttgtgtaactgtaagtcaaataaacaacttatttttattccaattcatcaattcctcagtcaatccaacaattcaattaagggtcaatctaattcttaatcctttatattaccattaagcatactacttattctaattttgattactattcctcaatcaatccaacaattcaatttggcatgtttactaaagagaatgggaatcaattgtatgtgattgattctttttttttttttttt

SEQ ID NO: 26095 - DNA, 3358 bp, Cannabis sativa
gtttttaccaactcatagcagcagaaggaatagcaaaccgaaagaactctccaaatccttgaaaaagctcgggagaaattggaactcgagtacttttacatgaagaagaaaatgtcatgtacaaaacgagtaaaatcacattcaaccaatatgatataccgatagaaattgcagctccacaatgttgtaatccacatttgaatactaaggtccaacaaagaggtacatgacaacaaatcgaaacacatgagctcactagcaagggtttgatcaagctttgtgattgaaaataccgaatgagtggttgaagtgttgcataagcgaaaagtgcagggataagccataacaagaattggcctgcttctcttgaaatatgggggtcttggccaatgagtatgagaatattttccatgtagaaccatactagagatagagggatacatactaaaatgaggcagagaattgcagtgttggtttgagtcccgagtttacgatattgctttgctccatatgcttgtccagagagagtttccaatgcaccagacattccaaactgctcaaccatgaaaattcacacatattattgtatgtaaactaatgcaatttctatattctgttttctctattgaaacataagaaataaactacatcataatattatgaataaatgagaagagaaaattacattattgtgaagggatttcttctatcgaattaaattcattgtctatcctgaaggtatagtaagtcaattcatgactgacccgagtatctcaaaattgagggattttttctatcgaactaaatttattgtctatcttaagggcatactaaatcaattcataaacactactagaaaaagatacatttggaaaattaaacaataaaacttcttcaacaaagtatctcaaaattacaacagtgtaaagggatttcttcaatcgaactaaattcattgtctatcctaaaggcatactaagtcgattcacgaccaacataaaacatgtgaaacaccatcttcaacaaagcatcacaaaattacatcattgtgtatggatttcttatatccaactaaactcgtcctctatcctaatggccatgtctattcaattcatgactaaaaacatataaagcttgtaacatctttttgtggcacttataaaaaaaactaataatcattaaattgctttagtagctaatctaaactaatgaaaatcatatcctctatttggttacaagttatgaaaaatctaaaaaaaaaaaacagactaaaatcaccaacatttcccataaatttgagataccaaactagtgaaatcattatcaattgtgtgtaataagatataacttatgataattacaatgatttaagtatctaacctaaacaataatatcatcaattaggtccaacccaaatcatgaaaaatccccaaaattacaatgaagaaaaattcagatgacttacaaggaaactgaagccagaaacagcaccaatggagatggctatggcagtacttgaaagataaagcttaccaagatgaccaaccatcataagagaaattatttgtagaaaataaagtgataaattcacagccaccataggacctgcaatgtaacctaacagcttcaattcttcaataaaatccctaaagaactcaactttctcctctcttttctcattttctaacaaacccttttccaaattttgttcttcttcttgttttctcatcaagctttctcccatggctatggcttccctctttttttctttatgtaaatatttcaaaagtttagatatatattatattttttgaatgatgggccaggtcttgatagtttgatgattcgccctatttattcaatttataagaatccaatttcgatattgatatcaaaattgttgatttcttcattagattaattttcatatctgtctttttttctacttggcatcttacatcacatgatcttggtttttctcttaaaaataaattaattaataaataaaaatgctatacatacacatatctagaatatgtgactttgagcggattatttcgagtcatgtggcactatagaattagttggaagattgttgttcaatagctttatagtcatgacgactaatttagcggtatggttatcggttcaaggactaaaggtgctcttacttttttagggtaagacgggtagagaaaatgtctcgagtaccaaggtgctatggtactgaagtaacccatgcctaccacattgctcgaaagatgcttgtattgatataagagattgcaaagttgttgattgattgctttctaaagttgttgttcgatagtttgtagtcctctcgactaattcaacaatatggatgtcggttcaaggacaaaaagtgctcttattttttcacagttagaaggggtagaaataatgtctcgagtaccaaggcgctacggcactgaagtaacccatgcctaccacattgctcgagagatgcttttgttgatatgggagagctgcaaagttgatgatcgatagctttgcagctctctcgaccaatcttacggtacaatatcacttgagagggcacttttattgatatgcataataattttttaagaaatgataaatgatacattttaaagggcctattggacaaattttatgtttttccttatacttaaaagaggtcgagcctagtagtactatatctttctttaaaaaagaaagttcaatttttttttttttttttgacttttctgttaaaaataaatatatataaatgctatatatatttaaaagatacaacttttatgggactattacgaaccacgtggcactacgaaattggttggaactaatgtagaattgatgttcaataattttgtagtcctcctgaccatttcaatagtatgattattggttgaaagacgcaaggtgttcctacttgttttttcaggataaaaaaaaataggaaaaatacatcgggccaatgttcgagcatgaagatgctacgaagttaaagtaactcatgctactacattgctagagagatgcttgtattgatatgggagagctgcaaagttgttgatcgatagctttacaactctctcgaccaatcttatggtattaaatcactcagaaggatctttatatttaaattttattttggcaatattataaactaatcaatatcttaaataattaaaacgtacatgaccataagaaataaaaatagactaataagtaggagtgttcgtggtgctggtggtgcggtttttgactattttttcaaaccaacccgcacatgcagtttttctaatttcccaaaccgcaccccagggccagccctaggcataggcgggct

SEQ ID NO: 26096 - DNA, 4211 bp, Cannabis sativa
  modified_base (4157)..(4182): a, c, t, g, unknown or other
ttgtacaaagaattaagatcactttgccatgaataaaaccgtcaacaacatattaaagttatggaatatttaatcaacgattgctagtgcgattcactgatgcatgttatttggtgcaagcaatcataatttggattgatgatgtagtatgacatctaagtgaagttgttgtatataatagagattatacatgaccagaatcgatatgtaattaagctctctatatcaaacatgtcttttactataaagacttaattcatatcataaagatgatcaatagtagatcagcccaaaacctgaaaatcatgaactcatgctcatgtcattagtttctttgattcactcgttaaaatttctcagagaagatagtcttaatggaggaaatgaagaccaaccacttactcaagtggagaaaccaattgaaggtgatgaagacaaacgacttgctcaggtggagcaacccatagaggtttttgaaatggccacacaagtggagttagataacttacgcaaattggtgaaggacctttctacttcgaggtgtcgttgacaatagtctcaacaaagacagactatcttcactctcaataagggtaatggcctttgccatcccaatcaaaatttaggatgccaaaatggagtatgtatacaagaaagggagaccctttctctcacatacatagtttcaaattgtagatcaatcggcaagatatttgagacattttttgatgccagatctttctagccatgctgcaagaaaaattcagtattggtatctcgagctttctccaagatttattgattcttgggaagtgcttgcaaaggcattttatgaccaattatcaccatcaaggcacagaccaatcgagcctaatgatttggtctacatcaagcaagaggaggatgaacatttaaagaattacctacaacaattcttagaggcatccattcagacaagggtacttaacaaagattccaaagtcatggcaatggcagcatgacttactgttataagtccattctggcaagacttgaaactcaaagaagtgtacactatttgagagtttctagatagagctaatggatttatcaagctttaagaccaccaaaaaggttggtggttttgatccacaagcaatagcatattatactacttatctgattcatgagtcttgaattgacagtggtctagaagaagaggaaggatcgacacctaggacctccactaaattacattccccccatgtctcccttgatcaccttgggtaggtggacagcgatgaagaatcaccctctacttcccaagacagctcaaagtagggggacggtatagaagatactccctctatttcccacgatgaccaaaaacaagggtagtgacaaagatgtttcctataagtcccaaggagatattgagcaaggaagcaacactgaagacttttaatgacaaaagggagaacctcatgtcatcgcaaaagtgttagtactcaaaacatgcaaagttggcaagttaattgccccaacttgattctcgtaccagtacaaatgcactgggccaaggagcatttgagacgataaataaaatcacatttttcttcaattgtggtccactttccactttacaaatggatgagaagttacctattgatttgaagagatctagtacaatctctctctatcgattgataggattcacatcattaatatgtgatagtccctacactagtgtagcatataaggttttttgaaaaaaaagacttgtgattgttgtctcattttatttttttagattatctagagacctgtgattgtcgtctcatagcacttgattgttaatataatgaataaagcactagattatctctttttggtgcttcatttttaatcaatcattttcacctcacaggccagcctggatatgtgatcttgaaataaccttggatgtctctatagtgagtttaacactgccaagtcacaagtctctgaacgagtgacattaatgttcagtatgttgacaaatgccaataaggctcatgatcggaaattcaaattgtactttggtatggcaggcaaccaaagaaaaggatttctttgatcacttagggcatgcaggcaccatcgtatatgaacatgaattttgcacaactcagtggtacttcgatggtttaatgaatgttaaaggttacccgcaattatggtaactgagttcataaatctaaagtgctagtgcatgtgttggtgagttaattgagttgatcacactgcattacagattatatctacacctagaaaattgttagaggtcaccatggctaagggaatataagccacccaaattaggtcaactaacaaaaaactatggcaagaaaattgataacaaccaagtcctaagaagctatcaactatctatgtcaaaaatgccatcgattgtagcttcagtctctcctagttctttttgcacacctgagttagcacttttatgatttcataaatacttgaggtcacttgtgattgttgtaactaagtttataaatctaaagtgctactttcttcttgattgaaggaaaccctctgggagtgggacgttgcccctattgtgatcttcctttggctactaagttcctcctaagtacaggacattgtacttacactccaatctttcttttttcctttttcctcctttagagttttttaagcctcataacgaggttctatgagttgaaatcattgagaaaggtcctccaataacctttgatttcactcttctggctagtttttcaaaactactttttagtagtgattcatcatgcttttgctatggattggacttatgcttgaatgccataggcacaagctataacacattgcacctcggcaatggtctatctcgctgctagaagatagctttagtatagaagttttagcgcttatcccccaattactaagagactaacacttgcgaaaagagcaaaagcagaccgccaggatccttgccaaccatgtctagtcagccaaaggaaggatgtttggtcgaccaaaggaaagttataggtcggttaggtcttgagaataagttggctagccaaagagtgacaattagaacaaaaaggcctatttgactaaggaagcttgacctttgcaaggaaagctatacaaagaagatagaaaggctggtaggcacataccaaggctggctggcacataaaaagctagcaggcatataccgagactacaataaaaatagctggtcagccataggagagcataggctggccagaccctaaaaatagggctggtcgaccaacttctacagacaactttgaacaactgagaaaaattgtgagatgcccaacagcccacaaaaatagggattttcccttgagatattagtcctattttctagggatttagttatccttttttttaacttaaataatagattaaaagatgtaaatatccctattttaaaaggatatcattacatactgaggctgcaagaacaatacctagccggccataggagaacatacgctagccaagccctaaaaatagggttggtcggccaacttttgcagacaactctgaacagctaagcaaatttgcgagacaggcccaacagcccatgaaaatatagattttccatcgagatattagtcctattttctaggaatttagttatccttttttgtaacttaaataatagataaaaaagatgtaaatatctctattttaaagggatatctttgcctatgtattaggatcttttgtaagccctacactatatagaaggctttagttcactctcgaagcctaagtcattccacaagcactaaagggtctctacaaagtcttctatcatgctcccttaagcctcatacacgtgtgaagcatctccctctcaagtctcatattccatctatgcctcctagagactaagtcaagtatcatcttacgtccttcacaagatcttatcagtatttatctataacacattgttctcaaaattgtagtactgaagagagccatagctagaaatcataaagttttaacttatgatttgcatagtattatctcaagaatgaatacagctaaaaggggagtatgtcattactgttggaattattttatcagcatctagatttactaccaagtatgtnnnnnnnnnnnnnnnnnnnnnnnnnnaaaagaatgaaataaacacataagagttt

SEQ ID NO: 26097 - DNA, 1201 bp, Cannabis sativa
aattaaagtaattacctgctgtggactcaagaacaacaacaacagtcataacagcccaaatggcattatcaccaattccttcaaacaaaggctccaatagatacaacaatgaaaccagagttaaagccaggccaactttgagggaatgtgtcacttttcttggatcttcttttcccatcttcaccgcggctcgccaaacccgacccggatatctgtccactttcttcatcatatttttcatattattttcctccttaacattctctaccaccttcacttgagttacttctgcatgaacttttgtgggaatcattttgtgatcaatctcaccaaactgaagaaaataataagatatatatatatgattgtggaagacaattttgcaaatcaaaataggtttgtttttgcttggtaagaaatgttcttccttgtgctactatttttctatatgttgtgaaataagaagatgacccctcatatatatagctaattatagataataaatggtaaatgactggtcttctcaactttgtttgttttttctttttctttttattaattattaaagttcattagagaagtcactatttaagttaattttacgtgtaacttgtatattacgtaccttcgatttttttttagtcatttcatatatatatatatatatatttgtgtagataaatgttgtaatattggattgtaagagatgactataacggaaaatgataaaataaaataaggaaaatttgtgattaaattctttacatattttgtacttagattagagtttttgttcccaaactatacaaattgttgtaaatatatttttttagttattgtggaaaaattacgagtaaatatgcataatcaaatcaatgaaactctaaataattaaacaattaacaatgacaagactatcaaatcgagaacaacaatcgtattaaaaacagggacaaagagagtattgaaaactagaaaatagtaaatgcagaaaataaagaaatcaacaccaagatatataattgttcaagatttatgactatactccagttttagaacaccgccataatcttcatttattgattgaacaaaaataggtacaatacagtcgagacgagattctttgttgagttaacaataagtgtttcaactctcacatttacaccaaaaaatcttcttcatctacggattttttttttta

SEQ ID NO: 26098 - DNA, 2951 bp, Cannabis sativa
ctttgttggtattttgctcagattttccacagtggttagtggtttctccttgacctccttcgcgtatcgctcttgcaccttctttgaatctccactgatgtgggatccactaatgatggtcaaaatattgcaaggagctctggaaccacttgcttattctacattagttgccccatccactcagggattggcttctccactgttcttcttgtattggccaaaatgtcctcgttagattaattcttcaattttatcctataacaaccaacattcaagtgttgtgtggccaatttctttgtgatacttacagtttttttgagtccctcttgtcacgattgccagtgattggtggcaatttcctaaatacacccttgtgttcttcaatggcatatatgtgattgcaagagacacaaatttctgtgtaattgacaaattgcagacctcccttctgctttggggaactctccttcctggctggtgactgcaaggttcgggcttcgatgccatgtagggttgcgtcttcttgggctatgccttggactatatctcttggaacttctaggccgtgggcttctagatcgtgttcttggtactggagatcgtttctccttgctcttctcgagctctacaagcgagttctctattctcttgtggggttgtgccatggcaaagaactcgaataacatttcagggcatcacacgtgtagttccttctagaagtctgttcttagtagcacacctgtgataagcatgcagacacgcggagattcgggggccttctccactttatttaccctagcgttaaaaggcttaaagtaatcctgtaaagtcgcacatgcatcttttatgtttgctaaagttgtatacgatggtttagatgtcatggttgcttaaaaatgagtcaagaacaagttcacgaacgtctcccacattgaaatggaggcttcaggtaactagctaaactagggctcatcatcggtcggtttggttaatttttttctatataaaaatctaaaattcagttttcggtctggataggtgcaatccaaaaactaaccgaccaattcagaatctaacttaaaaatgactattttgaacctcgatttggtcaatttaaactatccaaaccgaacttttttttaaaaaaaaatgatccaatttatgctataaatacattattctacattttacaactacaaacatacaaattaattgttcaaaaactaattatcttattcttttgactttattattaataaaaaaaaatatattatttttatatattattagtaactataatacatgcaaaaaaactttataaattaatatatatatatgtataacagtcgatttcaatttttttggtcggtttattatccaaaaaaaaaaacgaccgctcaatggcgattttaactgttagctgttttttcggttttcagtttcgtcagttttggttccaacggtgttcggtaggttggtttgaacagatttttcagttttttagattttatgctcacccctaagctgaactagttgtgtgcattatcctcagaagttatggcaaggatacgacacttagttagttgaggtacttgatcaacttccataatagcgttaaatttatcaagataatctataggattggtggtacctttatatttaagtgactcagaaagtctaaagcctttggggagccttgcttgtcgcacttcttcgatgaagggcgacattccatgtagcttataaatgggctttctctgcttcttgatcatcgtcaatgctcgcaaaggattttcaccccatcctggcagtaaggggctgttagcaggtgcgatctggtttcctgttggtggagaagccactactgctatattcgcgggtactaccacatcgttgggcacaattggtgcaagcggtgggttaacgccatttattgcgttgtttgtatttgcagggggataccttgatcgaccaaaaggagatcatgtgattcctcttctatattgtgattccttgaggtctaggaacgtgtgtgaaacacttcgttgagatggtcgcaggttgcctctctgtacatggtaccttccccatagtcttgtgaacaccgttcccgacctggtgtaaacactgtgggagcgactattagtcctcgaggaagaggaatgagattctacgttgtttccctctgtttgtagttgtgcacgactatgcgagttgcatcatttaggatcttcctcttcttacggtctctccaccttctaaataggctatcagtttatattaggaacaacacgacctctactgcatacggggtcgcgaataggttgattcaggtcgagtccaacatggtcattctcacctgaacattccatgcaattacgagtcacgttagaatgtttattatgatgcctagtatcattagttaccttattattagtgcaacattggtttaggactcgtgatggacgttgagcttgcatttggtctcttcatgcgatctctacttataatgcgcacatttgttcctgcatagctatgtattgtgaggttgttagttggatgattccctcgaaggcgagcacgggcgtgattggtggaaattgtcccatgatagccgctggtgtcgaggtttctccagcatgacctgagaattgagaaaataggttaaggggagtcattggtacgtcctactcctcctataacgacatcaacaagggttgttcctccaccagaaataggaacattaatagtgccagtgttgaaggtttcattgttgttgttcgtgtttgtctgacctatagccatttcaattctcctccaaaattccagaaatatttctttcccacaaataacgctaaatgttgtcgaaagaatttagacaacaccaaatattgtgaatattcaaaaaaaaaaaattgaatattcaatagtagttatgcgagtactcactt

SEQ ID NO: 26099 - DNA, 3856 bp, Cannabis sativa
cacttattgtggtgtaaattttacatcatagcaaatattatgccaaatttagcacaaaatttgttatatgccaaatttacgtcattttttggcactccattagagaacactttttgttaaatgagttatattttaacttttcaccacttatttacacctccattagagatgttctaatactttaaaatataactaaataaataaatgaaataaaatttatttcatttctattttattccgtttcattatctccaactaaaccctaccttatgacgttatcataaaatgatcatgcatcaaaagcatatagaaagtaaaattcagtgacaataatcactcttaaaacaaaaaatgtagaccaaaaaaggaggctgcaaataaaaaacgatatacagaaatggtcaatgtatatacattaacatgatatattaagtatagatttggctatattatgtgtggaaggagattctcaatacaaatagttgtactgagtaaataatcgatttctgagtcttaaataaatagccattaatttataacaaaaatatcattatataagtttcaattttggttatgaaatggtaatcacacacacttgaatgagaaaaaaaaaaggtccaatgttgggtgttacaaataggatggtaatttaacctccttaccagggtatacctgttgaattagtcttacagaaaaaaaaaatgatgcttccaatcataacataaaaataaatgaaacaaataaaacgaggcatgcctcaaacttcactattattttgcttggtaattgtatataaaaaaaaatgatgcttccaagttccaattaaattgaaagttttacaagttacagaagaacaaaatttaaagtaacttcccccatgaccctcaccagtctaacattccctcttaattctagcccatattataaaaactacactaaaaaaaatgcaatgctatgcatcacaataaaatttttggcatgatctactaatcaaaaatttattgtttccagaaacacattaataaattattatattagtaggtactcaccactaatttctctctctcggttgtcattacatatatattgacatatgaatcatagtaaatactcaatcattataatgctgtaaaacaatttttgaagaagaaagaaaaaactagcagggacaaaatctttatataaattcactcttcccctttcactggagagaatggaggggtcttacctgctcaatttatctgtgtttttacttgttcaagtttccttcaagcctgtcaattgcagcaccaacaccactctttctctctccccctatgggatgtgaaactgcattcccttcatttgctttctctatcagtttcaaatgaacccaccctgttataacattaacatgtactttctatatcagctgacctgtttcatattatgcacttcatttgatttttatgagcaaaaacttttgcaattattttcctgtgaggttctctcaacactattctaacatatatgtaataggccctcttaatataattcattcaaattagttggaaaactgatattttgatagttcagtcgttcataggatgaaaatcattaccgagtgggaagcaaatagcagcacctaggactgatcccatcgctgaattccttagacgccaagggagtgaccccggtactgatttagataataaaagaaaagaacaagcttattagaagcctgagattatagagcaagagctaaatggtgaactgtaaacaaacatgaaaagtttgaacatttggcctttcttacatatcaaaccaaatgttgcagcagtagctgaaccagctccaacaacattgaagacatcatgaacacctcttttctcagcaagtacatcttgtaaaccataaaaagcagcagtgaaaagcccgagccgaactccaccaataattgagcccttagtgattcgaagaaacctcttctccattgcatctctcattaagcggtactgctcacgcttgtctggtgtactcccaagcttcaacataacttctgcatccttactctgtcaaaaggtggtggtggtaaaatctcactaagtttcaacgaaaaaaacagaaaagggagtataatataacaatgctgaaggacaggcaaaaccaactactcaactagtccattcgaaaaattacacaagatggttctgagatccgaaaaaaaaaaaaaacatttagcaattttagcataatatcatgccaagtctcttctttgaaagttgcacaacaaacaaaaactttacatgcttattgcttatgaacctaactcctactattgggttactgtttggttggaggttatgaaatggaatgaaatacaaaacaaataatttttatttcatttctttggttgtattaaagtattgaaatgttattttaataaaatatttttatcattttggtaaaataattattctattttaaaatggaaagaaaaaccattctaatgcaagatgagtaaaaatttaataatttttttatcaaaattttatatgcattttaaatttgattcgattatatttttatttctattctcattctcattctcattccttcaaaccaaatgccatcttagtgttaaagataatcacttgtagccttttatgtctgtagcataacttacaactgaagcagaagcctccttgctacctccatataacatgcctgcaaatacagcaacgagagttgcagggccccaacccacagttcctgccagttttggagaattctaattcatggaaagggaaaaaaaaaaaggaaaattggagttaaattttgcttgttcataaattcaataaccccaaactacaaccggccatttacacacacaatgatgcattgaaaacacaagcataaaactttagcagaacccattccttatcttgaatcttgatacagtagtcttactctaagtacgtgtgtgtctataatatatatatttaaaaaaagaagaacctgtaccaaaaatctagaaatccctaatccccaatcagatatcaagtagaaatatacttacggcagagatggtttcttcgggagcttccgccatgagagtatattgaattcgaagagtggcgttgaagaccggagaagggtttagggtttaggaggtggtgagggaagcgcagatgagatttagatgaaatttgtgtgagaaagaaggggcggcgagaggagacggacgatcgtgactaaagaagaagaaggaaatctgttttcagttgaagggggcatcaaacacgatcataattcatacatggaaaaagtagctcacatttttttctttctttcttccttaaaattgaatcaaatcaaattttctaataattttaaaaaatttaaaaaaatatacaatatacaacacatttaaggcacttttggtagtagtattgtataaaataataaataatactggataaaattaggggtgagcataaaatctagaaaattgaaaaaattgttcaaactgacttaccgaacaccgttggaatcgaaatcgacaaaattgaaaaccgaaaaaactgctaacggtcggtttttttattggtaaaaaatcgaaaccgaccgttatacatatacatattaatttattaagttttttttacatgtattatagttactaataatatataaaaattcagttcaaagtgcatataagttcttgcaataatctaagggtgcttggtgccaggaggccaatactgattattggaagcggctttggtcattaaaaattcctcctaagatcagtaattttttatggcgagctgcttcaggtgtgcttccaacatgttttcaactccaaaagcattat

SEQ ID NO: 26100 - DNA, 2363 bp, Cannabis sativa
ctcacttcatctgcaaacttaacaagtctatctatggtcttaagcaggcaccgagggcctagtacaacaagcttagagcaacatttctacaatggaaattcgagaactctaaagctgattcctctttcttcaagctcaaacaaaccaattatgtcatcatggtcttggtatatgttgataacataattgtcacaggaaacaacacaaaggagatgaatgttttcattgtcagactgaacaccactttctcacttaaagatcttggtccactacattactttttgggaattgaggtgtttagagacaacacgagtttttacctatcacaaggtaaatacatcaatgagctgttgcaaaaatatcaaatggaaaacatcaaacccagtgtgaccccaattactgcaagaaaaccgatgtcaattaatgatggtgagcctctcaagcatgaaactctctacagaagtgtgattggagcacttcaatatcttagtcacacgagactagatatatcgtttactgttaacaagctaagttaatttctcaaacaaccaacggatgtacattagagtgctgaaaagagaatactcagatatctaaagggaacaatgcatcatgatcttcactttgctccaagtgacagtctttcaatggttggtttttttgatgcaaactgggcctgctgcctagacaacaaaaaatcggttgctggttactgcgttttccttggcgattctctaatttcatggtcatccaagaagtagactattgtttcccgttcaggcacggagtctgaatattgtgcattgcctcaccttgctgctgaaatttcatggctgtaaaaattcattaacagagatgaaattcaagatgccctctgtgccagttatctggtgcgataaattaactgcaagtgcacttgctgctaacccggtttatcatgccagaacgaagcacattgaactcgatgttcatttcgtgagagataaagttcaagaaaagaaactggaaattcgatacattccttcacatgaccaaatcgcaaattgcttgacaaaaggactgagtcccacaagattcaaattcttagttgacaaactcaatgtgactgcatcaccatatcgtttgaggggtggtgtaaaagaaattgattctactgatgaggtggcacaagggcatgatggacattgtgaaggaaagaatcccaaggatgattgtgtaatcatttgtaatcattgtttttactaacaaccttttcgttgagcctagatatttgtgtaacacatgtactgcctttactggctcatgtatttaccctgaattgtatttttgcctatttaatgaaaggttgtagcactcactcaatgagctgagttttccaatcaattctttctctaaaatttaactaggcttactctgagattgtactcactctgtaattcatcaaagatcaatggctatgaactgaactcagtgatcaagggagttcaggcaagggtgataggctcccaaagttatttggggaagttcaaacctctttaatttttttgtgtccagtttatgctttatgtttcttatatacttgatgtatgttcttgataaatttgtgaaagagtgtgttttttttaatgtgtgcaaattgatattgagattggtgttgggagtaagatcctaacagtggtatcagagctcaagttagagcaagttaatcttaaaggtgtagattaagaaccaagattcattaagaatctaagaactaaattgtggaaagcattgccttaaaggatcaagaagatgacttttgtcaaggtggacatagaaaagtttagtgggaagaaggacttctatttgtagagagaaaagatgagagcttatattgggaatctcgaattagatgaagcattatcaaatgatgtaatcaaaccagcaagtgtggaacaaacagattgggacaacacactcaagaaggctaggaataccataattctctatcttgaagatgaggtattgatgaatatggtgaaagagaccgcaacagttgcaatgtggtctagattggaatagatgttcacaaccaagagcctgcctagtagagtgtacttgaaacagagttctatggattcaagatgggtgagggtaagtctttagatgataacctaaatgagttttataagctggtttctaatttaaacaacttggaggtaaaccttgaggaagaagcaaggaaatttatctattaaattcattgccaaatcaatatgaacaactcaaggacactatcatctactttaaggataccgtagtgcttaaagaaataataggtgccatatagtcaagggaattgtctatcaagcaaactgctaagc

SEQ ID NO: 26101 - DNA, 1496 bp, Cannabis sativa
tttatatctcaaaactagtgctacgataattataatatattagggtttggtatcattatttaggataagaaaatgcactggcgtatacgatacttggggagacaatccaatttgtggcaatagcttctataatagtacttatataacaaagagatgcagttacagatgatgtgtagttttattcaagtatagaccacagggagggaccaaccttcatatatggccaatgttggtagatacaaactgctcagttatttgatcttgctttacacgaggaatttgtggattgataaaaataaatggccccataaaggacaattatacggtacattttaaacaccacatggtatccacagttccacaccaattatgcaccataccacattcacgtttaatttgtgatcatgtccagcttccagaaattatccctatgttatattatttgataattaaagattaaaatgtaataaatatattattatgtgaattaggtgtatgataaataaatatataatttattgttttaactaacattttgtattttaagcgttatattttggagatgagttacaattgacttgtaatcacatatttaatctaataaaagggttgttatacaatttaatttaaaaatttaaaattagatataattattacaaaatagattaatacttgtgagagaaataaaatgtgtgtgctaaaattctaagtgtgattacctatacactataaaaagagattttttgtgctcatttggaaaaattagttttctatcaacgagcacttgctagaaaatacaagacttgataattctaaaaattattttctagagagtttgttcgaaaatattctcattacaagagggaataagaggattacaaacaaaacactcaaaatacaaataaaagtattatatcaagattacaagaaagctagagaagaataacacacaagaagcttgaccaaggctcaaggatctttgtcctaaaagtcatttcctccctcatatgaacacttaaggaaactctagaaacgctcttaaaggatttatcaagccttatatgctcaatctagtgtctaaagatgagcataaaagttctaaccacaacaaattattttaactacatctctcacaagtgaacaatatatacatatatatggtctctatttatagagttttcactcccatatatatgaacatgaatgaccatcataaagttcttagatgttaccaattataaattggacgtttatggtattaattgagtgatttagaggagttttgggctgttagaaagactctcaaactttcaaaaacatttgtatgttgaaaaaaatgcaactagttactagttatattttttcaactttggtcaattcttcttcaaaatgtttcaaatcactcacttgattttaaaccatttatacaccttataaatgaataaatcaagtctccaacaactatattttaaatagctatcattcattcacattca

SEQ ID NO: 26102 - DNA, 2987 bp, Cannabis sativa
  modified_base (1162)..(1179): a, c, t, g, unknown or other
attgacctgtctcccctcccatcctcatggtcaacgtcggttgccgtctgaataactcattatttttccaatttgtctatttggctaacatatgccaaaaaaaaataataataataccaaatctcaaaaaagaaaaaatatacatatttcttaacattttttttaatatgatttcgaaaggactgaaattattttcaatttttactactatactatatataagtttcaaaaatgttacatccatcatatatataagaaaaatatttcttaatgattgttaatcactgttattaaataaatttaactaaaaatattaattttaaaatattaaactattaaattttaattcaataacgaataaataaatttaagtataaatattaattttaaaaatattaaactattagattttgattgaatgaccaataataaaaaaaatgaatttttatatttaatttaattacttaattagaatataggaattactttacaaatacacaaaaataacaatacaaaaatacaaaaatacggttgaagggaattttaaatatttttacggtttttatgattttatttgcagaaaatacggtctttttatgttatacttttgttaatttttttatctgtatgttattttttgttgttgtttcgatattatttttatgtagttttcttgttattttcgtgttgtttttatagaaaattataaaaatatataaaaaaaaaatctttaaacgtaaaaaataaaattttcttacatgtttcatgtaattattcctaaaaaatatatctttttacactatatcaaaaataagtatataaaaaatctttaagtcaagctcaactttttttatttagtattttattttgtcgaaactttttatttttttattttttttcaactaattatgtaaaaatgagatttttttttaattaaatagaaaaattaagcataaaatcttaaattttcctaatgccacccattaaaagtacacccatatatcatagtatattgaaaaaaaataaatttaaaccaaaacaccaaaatatatataatttgaattataaagtagtaattaactaaaaattattgtaaatataatatactaacacaatagggtaaatagcggcataagtacctaaagttttatgtttgtaagcnnnnnnnnnnnnnnnnnnatttttagcggcataagtaccaatgtttgtaaaactgtaatttttctctaattttgtcagtacagactctgttattgtcttaaacaaggtacatataaggctcgaattctagatcgctgggtctagatagaaatatgtagtatcagttactttcaaatgttcttttaataaattcaaaacagagtttgtactgacgaaattggaagaaaattacagttttacaaacattgggtatttatgcactaaaaataaacattgagttgatgcacttaacttaaacttttattagatacttataccgctatttacccaaacacaatataatgtacgtactactttaaacttaatgttgtatattcaattaaaaaaaccttaatgttgtattaacattaagaatattgtacctcttaatttgaacttgatgagacgataataataagacaataatattacagagtactaagaaaaaagtggcaatgtgcatgtacgtaattaaatggaatatgcttgattaagtccatatactttaatgtcagaaatatataatttaataggttagacatatttttttattaataacaaacaagatgtgtttaaaacaccgtagtagtgttttttttcttatggaaaaatagaaaaaagaaaatacaccgtcatgagtagttagcgtagaataatttgcatgatcttattaatgatctcaatgcagcaaagtctctgaaatatgaaatatatacaatgtgaatatatcatagaaagatatacgaaatgattttcccgcgttgatgcaccttttccaatattgtgttataatattttatataatataatggtcttattaaataattgagtgataaataacaagtgtgattaaatagtgattttgtcaaataattacttatagtttcaacatataaatcatagaaagaagttgtaaatctttgaaaaaagacaaaaaaaaaaaaaaaaaaattaaaggtgttaatctaatccaactcgcaatattttgtttatagtgcatttgatccgcattaagtgcggattttatattttggatcaaattcaattcgcataatagctcaaatacaatcttatccaatctacaaggattggatcagttattatagattagttacttttcaatattaaattatttaaaatcttacattaacctaagggatctaataaggacatcatctataaaagtagtatatcttaaagaatataaaaatagaggtaaaaaaacaagtaaaataaagtgggtatacaatgcaattttctcttgttttattctattttatgtttattgtttatatgttaatcttgtcgaaccatatcgccaacacttaacccatttgacaaatccaatacttccaacttatggatgtggacagaatcgtcaccatttttcttagcttatttccttccaataatcgtctcatttggcatcacactactaagggctgctatacggttaactcatatgctttcaccttgatgagaatttggtagagaaacgagagtcaagtggatcaaactctcattacacttggtggaaaactttttggagcttgaacttaccgtcaaaggttaaaatttttgcatggcgggtgatgcaaaatgctctccatgttgctactggtttgtgccgtagggaagtgattgattctgcagcttgcgctttgtgtaataatgcgtgggaatcgattggtcatgccttgtttaattgcaccaaagcaaggaaggtttggagagaaactaagtaccattgatcatacacatatccacaatatgtacaatggtgatta

SEQ ID NO: 26103 - DNA, 1242 bp, Cannabis sativa
tccctacgatatggattgatccgagtagggtcttgattggcttgctccaccagtggtggagggcccatagggggttttccacccctagtttgaggtctgtcaaactctcgtcgagggtttgcctccccattaaggggtctctcacttttggtctgaggcttattgatctcttaatgagggtttgcttcataagttggggttcactcacttctggtctgaggccttttggactctctccgagggttcacttccctagtcgggacattagtgccagctgctcgaggagcagcggtaatgctatcgagaccaatagctctaacattccttccatttaaggtttcactctgagcgttggtgcctacatggccagttggaagacgaggcacccttcctttagtggatgacactctacctagcactgtccttctatcagcttggctcttcggtacctctggtcagcttcctgagcctcaacactattccattgctattggaatcagtgtcagaactcttctcgctgcttgtccaacgactctcaaaaattcctttgaaaattagcaaaggactcatttagatgctccacctcagggttggatgcaagctcttcttggtgtttcataagatcctcttcgagttccacaggctcctctcgaggtccacacatggctcacctggtggcacagaaccataatttttgttgccaactcttatttttgtcctgtttcctagtctcgagtccaggactttcgacctaccgcctgaagctcggtcaactgaagcatcacaaccagtactagtggccctagtagtcaccacagtttttgaagtcgttagatccctgtccctacaaatcaattttaaaatgaagcatttattcgaacactaaaaacattaaggcaaccaagggtctcaagtgagctctcaatgaaagcaccaaaatattgacgatgaaaaatggtcaactcagtaccatctgataagcggtagcggacaataagtataagaatagaaagtaaattgagaacaccaaaattatagtagctcactccccttatcatgaaggtaatggagctacgtttacttagaccttttatcatcacaaaagctaatttcctcacaggaaaacataggaaaatgactaagtgtagagtgagaaagtgtgaagagagagaaactctgaccttgttgaaaaaaagtaaattgtgtaaaatgatctaggggaactcacctttcatagggaag

SEQ ID NO: 26104 - DNA, 6428 bp, Cannabis sativa
aaaatttataaataatcttaaacaattataatatatgcgataaaaaaaactaaaaaaactttaaaataccaaaactgatagaatgtgtatccaaaattttccaataagttatttgagagtgcaagaatgttccaacaaattatacactttttcgattatcaacaatatataaatatttatattaggttaatattacatgtatacttaattatattcttaatatatattttgagtatgtgtacttttaattgtataaaataacatcattatttctttattaaaaggtatttaatatgagtactatttattataaaaagaaaacataatagtatctataaatataaaataaaattattatacaaaggtttaaacaaattcaattaaatccaaaatattagcaagatgtaccgaaaataataatattttataaattctatgagatgttacaaaactatgatgtcatttacacaagtgaagaaaaaaaaaattaatgtacagatatttgcggcgaaaccctcttaacatttgtaattgctacactaataaaaaaaagtggtagcaaaaatagcttatcttacgattttgttgcagtcgtaccttaaccaaaaggtttcatttagcatatatgtttacatgtttagcgtgcatgtgttatgtttgcctaatagaaaacatatcattaagagtagtattagtgtacatagagttgcactgaatactgatggatatatatttggaaaagtacagattgacagtatgacatcggtacgactaaagtaccgagtataggctagtgttatggttaatcttattgtcgtatgagcgttctagatttagtacacattggaggcgtgataggattgtgatcaggtgtattgacgcctagttataatcaagtttatgtttacgttatgtttatgcttttcttactgattttgtcaactcatagacattgtttaaatgtgtagataaatgcaaagcaaagtctgagcaatattgagcccgggctagatgaagatagtacatattgaaacggttagccttggagtgttctgatctttagcacaactgactttattatgatagtcgataggcgacaacctttgtaactattgtattttgaaaaccaatataacttttgaaatgggatctcaatatatgtattaaattcaattatgaaagtttcagtttatttatgaacatttttaattaattacgttttcaataaactctttgattaagaaagagatgcaccatacttagagatcacaataacgtgcttaagctagtagggagttacataaatattagaagaaaagtattagattgaggtaaaaatttatatatgtgtggtaatatgatgcctttgtcattctacgaggaaaataagacactgtcctccttaggcatgcaatatataaaaatacatgcatgtcctaacaattgcatcctataccataagagctttgtggatgaaatgttttgtaccacatttcctgaacgaagcagatccaattcgttgtttaacggaagaggtaaatcaattaattaataagtaataatcacattgattgtgtctaaaccaattaactcttgtgtaatttatttcttgttttcttttatgtttcatgtgactgaaaaaatagttaacactagctcgctagatttgtaagatgaataatgagtttaagtaaataatatagagagacacacaaaatttatagtagttcactccacatgtcgcgatggtgatagagctacgtctacttcaagtttttatttctcacaagaattgcaagagaattgactaaggagagagctcttatttctagagagagaaggtaggtagagattctccaaccttgtgggggctaagaataatgtgaaaaatgagctagaggagttctccttttatagggaaggaggtcctattaaaatattaataaaataatataaaaatatgaaaaattcacaatggactgatcttggccattgatgatgatctaacaataaaaattggctcttgatgaaaatcctcaatttttggagttagaatctcgtccgttggattgttttcgggtaatttgtgaaaaaaaaatcttcgtggtgttaggcacgaatttgaatgtgaaatattcagtattacgataagggtgtgagatatgtcttgatagatctctaaaaatagaaatgcaagttgaatctcattgatcagatcaatattgagagagttatgactgtttgattgtaggctattcaacacctagcgtcctggttgacaacccaacgcccatgttgacgtccagcgcccaatttgacatcctgatgtcaaccttgacactagataagtgaataaacatcacaaacttatattttttgatgtgtaagtgatatgccaacatcacttagtcagattctttgttttgatgaagttactcatcagttctaaaagatttcgatttttggtgaaattaggtagactcaaaacatactaattttgccaatattccaccatgttcaaagggtggcttgtcacaagttgtagctcttgtttattactatggaaaaatagtcgaatgctcgagacaaaattaggttctgatgagtagaacccaacgcactaggttacatgtaacccttaccactgggtgcttcttgggtgacctctctgtgctcgtcgtgatacttttaaggcgttcaagattgaaaatgaggtctcctagcccatttttgaccaaaataagaagaatattctcataagaattcttctgagttgttgttagaaatggcccaagttgacaaactatcaacctgggaacttggtcccagttttggccaggtcaatccgtttctttcttgaaagtaattgattcttaatttttgatggaaaaaaataaaatgctcgggatacttcttcaatattatggttggaagtgccccaagttgacaatatgtaaatttgggcgctccgtgtcttaggcacctagtgccttgggagctcaaaactgaaagtgtttcgattctaattctgattctgatgcctcatatatattcgtgacaagtcttattcatatcaaagtaaaaagtttgagccatttttactaagacagacctgaaaactgaaaacctagttggaatgtcaacctggccattgggtgaaaaccctaggcgccctggttgacttctagggagttgctttgtctctttttagcttccatgccttggaatttgattcttcttatcttcttggtttagaacactaaaacatggtgatttaaaaataacttgacatgatctagacacccattcaggagttctcaaagtcaacctaagcgcaaaattagggacccttcctaggtcgactgttatgactcaagactactcaattttaagagtttttctttcttaccacatgtcaaacattgatgtccacatcacaaaagttagttttcgtttaagtatttcctaaatgattgatcatttgttttatatgtttgaacatttttatatattaaacattatcttatagtgtttgtgctttctaggttgtgttttgtgaagattgctccccaacattataactattgtaatgaatatgattagtagtaggtcaattattatttttaatggtcattgataattaccaagcttttataaaattcacttactactatcttataagtaggtgaacacaactctattcaagagagtgttgatcaatgttgaaaaaattatgagtactctttctaaagtggagttggctcatcaatcttgaggactgaattactatgatttttgtgactatttaaatatatgcatatattttttttctctttcaatacttgttgttctaagtgagtactcaatatttattcttgagtgttcaaacgacctttgaatactcgagtagattcagggttatcaaaattcctaaaaattttccaaaatatcaccattgatatatatatatatatattaataaaattttgttttgcaagagcattaattttgaatgagattacaacatatcatataccatatatagtatatgaggaagaaaatgaacactcactcataaccttgagaaaaaattaatggggatcaccatgacttgaataaagtattatcatctttgtccaaatatttgtttctcatatctctaaggattaagagaactctcatggaaatagctttgagaatatgattttctagcaaagtgctcttgttgatagaaaactaagttttacaaatgagtgttagaaatttagttatttggggtcactattgttaaaaatttttgttgggtcatcatataaatgagtcgaatttatgtggtctaaattagaataaagcttatgacttaaggcatggttgttatgattttaatatgtggatactattgagataatttcttatttgattaggggccaaattagaaatagtaaataaataattaattactatttttatagttattaataaacaagtattaacatcatattgtatctttttattctttaatccctaccatcaagaaacttaaatttcaaagaaaattttgatgcaaaaaaattagaagatcataccattaaaatatcgattctatagactttagtacgattttactaatttaaatttatcatttcattctcttgaattaattaggattaaatttaaatttaaagtattctaacattacagaatatttctaaattaattattgaagatttacagtagtattgatcttcaattaaattatttttgtatttggaatatttggtttgttgttgacgtcaagtatattttaggtttggtagtaattgttagattactgtgtatactatgtgtgtgcgatttaaaagtttagactttgattgactttgataaatataaataataaaggtttaattttactaaagttatggaaaacttctattcgattctatgtaatggaattcatgaccatgatatatatttaagatttttctataattgataatgatcatttggtttaaaagatgataacagtgcttatatatatttataaaaattggagatttcatgattggcttgtgaagaaggtgtgatgtgaatatatggaaaatgtaattgatttttatttacatttcctgttttatatacaaaatatttcacaagccattaatcttatatggattcattgagttttaaattttatgagtatacgctcatggcttcattcaggttttattgttattattttattaaaaatagataataatttcagcaactactaatattcaaattttaattttgaaatttgttaaggatatctaatattttagttaaattaattgaaataaaatataaccgaactcattacttttgagtagattaatttaattaaatattaagatattagtgtgtatgtaatttatgtgtttattaactggcccaaagataagttaatatttgactaagtttcgtacatatgtgataaatatttgatgattagaaggtatcttgtgtaaataatatgtttctccaaagatattacatattgttattatcaatgtttgagcgctgcaacacgagtaccatttacaatttatattactgtccaaagacttaatattaatagtgtgtttggtatcttgagatgtgattaaccattatttgaatttattgttttatttggattcttatattaacatgttatttatttgattgtattgttttttttagctgttgctagtgtatatgctaaccttaattcggtactagtccttaatggtaataactttaaggactggaaggtaaacatttttattattcttggctgcaaggatcttgaccttaccttaaggatggatcgacttgcttttcttatgaaaatcagtacctctaagcaaaggaggatttatgagaagtgggaccgcttaaacaacacgagtcttatgatgatcaagcgcgacatacttgaggcttttcggggtgtagtgtccgaagaggttaccgatgccataatttttcttggtaaaattgagaaacgctttgcaaaaagcaagaaggtggaaacaagtactcttttaaagaaacttatttccatgagctagggcaatgaaaacataaaggagtacatattatggaaatgttttgtcttgtttcaaagttaaagatactaaagcttgagctttcagatgacttgcttgtgcatttagtgcatacgtctctttctccataattcagccaattgaaggtcagttacaactgtcaaagggagaagtggactcttaatgagctcatttcattttgtgttcaagaaaaagaaagattgaagcaagagaagactgaaagtgctcatttggcaagcacttctaaggataagggcaagaaaaggaagaatgaggctgctaaggataacgatccatcatataagaaacaaactc

SEQ ID NO: 26105 - DNA, 1975 bp, Cannabis sativa
tcttcttatttttctccaaaaacacgatatgagagttggaatcaggagaaaatattattcgagtagcaagttagccccaagcaccagtgtgtaagcacactaggcacccaagttgacaatggcctagggctcagtgttatgtcctttaaacagcaatttcactttgagcattgaccttatttcgccccaaaaataagatttggacaattctataagtcaatatctcatgtacatgtgtcacccgcaagtccactaacacccatgtgcactagtgatcacccgggtgtcaccttggagaacatcgggaatcactcgtgtatattaagtaaaattgccaagagaaattccccacggtcaaagaatgaactaaggatagctatcacatcattcaagcatctcaaaatatacctaacgaccaagaaaccaagtcttgggcgcccatgttgacgtttatgtcaacctgggcaccccaaagtcaggttgttctcacagtttttcctagaatgcacactgcttagtaaaatgaccatgactctctcaatttttatccaaatgacacgattctagtgaaaaattaaagctattttgaaggcgcatctaagtgtctcacattgccccgcaattctgaagtttcaatcctcaaaatgaacttgtgagctatttccaagcaaattttatgcgaatttccctgttattttattgcaatttaattaatcctccttccatataaaaggagagtttccctaactcatttttcacactttactttttttttttccaatgttagagcttctctctctagaaattgtgaagcgaagctagacttagtcattttttcctgagttctatggtaagacaattaggttttagtgacaatgaaaactctaagtagatgtagcttcattaccttcgtgataaggggaataaactactataattatggtgctctcttttttactttttgttcatacattcgttggccgctaccgcttatcaaacggtacagaactgatcacttttcattgtcaacaaggtgttcttagggttaatttgttgggttatttttaataatcaaatatgtgagcttacaaattaagacaaatatttatttgagctaatattctaaattgggctaaataagtaatctaattaaatgagctcaataagatgtttattcggtatgggcttttgtaatttgtaatacgcaatagtaatcctaattagggtttaaaggctctaattagtttgctatataaagaacataagggtttagtccccaatgttaattttaactattcttcttctccattcccatcaattgagtgagaaaactcacatagaaaagattagtctgtggaagatcatatacctatcatctcatctaatgtccaatattatggaatcaggtatgtctttcatcttattgattcataaagtaatcttaataatctgacatgagtttaaaattcatgtgtatttttagatctaatctttaacataattgtgatgctgcaatttttttcatctgtttttttttttttgtctctgaaagttagacggctaattatttgacttattttaataaattttaattctaaacatatctccaatataaagatgtcccaattaaattgttgcaaactattattttacttgattgtgattaataatagaattacattattatttttctcttttgtagttatatggcatattgatcaattcattttaaatgttttttttattattattttgaatagtaacatacatatataataactagggttgtacatcggtcggtttagtcggtttatactacatattttctaactcaacgtaaagatcagtttgtaaaattctgcatacgacctacccaatttaaaaaaaaaaaatcttaacccgaccgacggtttgggcagtttggtcgggttaactcgcccaaaccgaaataagagggggtttttttttttttttt

SEQ ID NO: 26106 - DNA, 3365 bp, Cannabis sativa
atgaatatgtagacgacagaatataaatggggtaattgagagagggctctagctataggtctagctagagaagtagggtttaggaccacaaacctagagagatgagtacaaagaaagagaaagagagaagaggcaaccaaaccagtttcaccagaaagaggcatatacatatatagacatatatgaagcaaaagagagagactttggtccagttggaggtttccttcttctttgatcatcatcattatcatcatcatcataagtcctgtgtgttgggctttttgtccccatatatatatatgtggatattcatctctctttctctctctagatctcgttctctctctgaccataccatgctccataataaaatcgtttgtatatatagtactcctctcaagtgtcatcaatttcccagcaactccccacctgtatataaatatagagatctgagtttttccttattatctttcgtattagtttagttatattttgttggtttggttgctctaacaggcttgtccaataaatagtaaattcttaattacggtatatatatataagaagacatatgcatgtggcctaactaagtattttttgtttttttgaaagggagagagaaatggcctaagaatttctattggattttaaatgaattatcggtgtgtaccttttctcctttgggtataaataattaaatatgatttttttgatataaaattcgtagcctatttttatttttatttttgacgtggtgaacagagttacacaaaattaacaaaacggtagtagaacttcctcgaatcaggatagctcatcgtctaattggacatgttttgctaaccatgagttgtagaattctaattgcaagccacatagaacaaaagtgttcctggaaatttagacaataaagatataacatcttcaaacaacactctatcacattgaaaaaacaccttcccattattaaaagttgtcgccagagctaacaaaactgaaaaaatatcgcaacaccaaactaaaaatacaattatattaaaatgaccattttcaaaataaaatttaaatacaaacttaaagtttaacacccaatctatatcaatagctcagcattactaaaaacctaaaaaaccagcataattttaagaataactagcaaaaggtattaccctttggttagtaacaacaaactaacaccctaatataaaaaatgttgaaaataaatattaaacacattatatttaaaattaaatttatcaataaattctctataagtgtaggctctccacaaaataacttacaagataataaaaataaaactctattaccacataatataatgaaaacaactaaataatgtaaaatgaagatggtaaaaaaaatccattttaaatataaggacttaaaaagacttaaatatttatctattaaaagtgaaaaatcgttgaagtaaaaattatgagcacaaaatggatcaattctcttgctcattgaccataatataaaattagtctaaacaaataggaacaagccataataaatgtcacaaaagccaaacaaggtacataaattgtaaaagacatcaaatctatcaaaaatagttcaaaaacttgtgtggtcttatatatagttaaaacttctttaatacaccataaaattaaaacttagataacaatgacataaccaaaaaacttcacatcatgctttgacatccataaatatacaaactatatcttttagtataataaaatatcaatgatcaacttcagcttcaaattcagaataacactcaagcggtggaggttttgaatgaagagaaggagataaaggctaccttgaattcttgttgtaaaatgatggaaaactaccagaggcaaaaaatcaagatcatttggttgcagtttagggataaaaatacaacttatttttatgctagtatttaaaaatgcaaggaaatggaattttttggaagagcttctgaagtttgacccttttttgtcagattcattaattggatcatgacgtgcttaagggggtctacttactctttagtcttagatggtcgtgtgtaggggaaattttcaaggaaaaagggttaaggcaaggagatcccatctctcctttgctatttgtgttggtgatagaatatcttactcggttactactctttactgctcttaattcagatttcaggcatcattcaatgtgtaaatttttaaagataatcagtctatgcttcactgatgatctagttctgttttataaagggacgaaaaaatatgttcatataatccaagaagtttttactacctttagtagttgttcaggtcttcatgctaacctaaactcatatttattttggtggggttgatgatacaattaatctggccattctgcatctagttccttttgaagagggtcatttccctatcttggtgtgacaatgtcaccaacaaaaatggaaggcagttaattgtaattattttcttaagaaaattcaattgaaactacatagttgggcaagtcagcaccactcttttgcaggaagtgcaattgattcattcagttttattggatatttgttgctattagatgagtatctttatgctactgcaaaaagttgtcaaggatgttgataaactctgtaggaactttttgtggggtgcgaggtaattccagtaagttgcactgagcctcgtgggaccttgtctgcaaccctaagaattatggagggttgggtttccaaaatgaagctaaatagaacaaagcttccattgctcgatatatttgagatctttcaacaaagcaagatgttctttcggttaaatgggtcaatgcaatctacttaaaataacaagatttttgggtgggtgataagaaaagggatgtgagttggtattagcgcaaactactcaaccttaggaatattttcacacgggacacaatcctagatgttggtaagggggaaattttcgagttagtaaactttacaactcctttcttgctccttttgctaaagttgataattgtaaaatgatttggcaaaacatagatttatcctttggcaagtctctcataataacttgttgacaagagatcacttgttgacaagaggtataactatttcctctactctttgcccaatgagtgatgttggtgacgattgccatactcatcttttctttgagtgcccatgcattttccaagtaacttctgtaggtaattaagtcttgacttagtaatgctatttggccagagtcttacctagatttgctggtgtggttaaatacttgttaggttatttttaatactaattttagattaagtttaatgtatttttaatttagttctactcttgtttgaag

SEQ ID NO: 26107 - DNA, 2327 bp, Cannabis sativa
  modified_base (1743)..(1750): a, c, t, g, unknown or other
  modified_base (1781)..(1782): a, c, t, g, unknown or other
aaaaaaaatgttaaaaaaaatattgaaattgattttttttttttgtttttaaaattttaataataataatattaagttatgtttaattttttttatttttgaaaatagttatgtttaatttttaattgatcaacatcattaatttttttgtatttaatagtgagtacctacgttattttagaaatataatttagcaataattaaatttaagtatttatttataagtgtgaattaaactaaaaaatttacgtggtaaattatttttatttaaatatcgtttttattaaatgatttttttattattttagtggaataattattatattttaaaacaaaaccaaaaacattctaattttaatgtaggatgagataagttttaataatttttttatatattttaaatttaatttcatttgggaggaaattatgtaaccacattgaatatagactaaatatatggtcacttattttgctaataaaattattttgtacaaagagctttaaaatggctctcaatccacctacatagtattagtttaataatttgactgttatcaaaattcacttgattagatctcagccattgatggaatcaagaaagaacagagaaagataagggaagaaaatatagtaagagagctgaaagaatctaaagaaaaatctattaaaccagcatgaatagatgccatatatacagatgaatgaagcttagtcaagcttccagactaaccgaagttagtgacacaagaacactcagtagtaactaataactatctgtcttcacacacacttaacgtacagctataataatatgctttgtattcagctccttgatccaattatttaggcatttaaacggttttaacatgttttgattaatgattattgactgattttgttggaggtttatacttctggagaccatagcttggaaatcaacaaggttattttgtggattggattggactagattggttcgtaccatttgactcaatgtttgattgattaaaatcctatttacatgtgtaatcatcaactgtcgttttttattgtttttctagttcaagttacagtttagtggcgtgaacattattaagattactttacctgaggtgttgaaaacaatgagacatacgttaaattcagttggagcttctgattctggacgttattacaaatactataatgttattactgttgaaaatgggagcaactcgtttcttatttcttcaactttgatataatttaatcctttgcaaagccaaatacctaagctagaaagaaaataaatttggaattgttatttacgacataattaaagtttaattttcgattgtaaataaatactatgtttaatttttggcagtaataatacttaagttagctacatgtgaaattattatttatgtgttatttttttttagtatatttaaattaattttttccaaaaaaataaaaattcatgacttgttccaatcagggatcgtcacatgataatttacttaacacttaacaatgagataagaataattacataagacgcaattttttgtaaaatatttatatttttacgttcaaataatattttttttcacatttttacgttttttcaaaaaataacgcgaaaataacataaaatcaacaagaaacctacataaaagtaacatgaaaataacaacaaaaaatagcatacaaataacaaaaaatcaaaaattaataagattacaacataaaaagaccgtnnnnnnnntaaataaaataaaaaaaaaaatcgtaaaaanntttaaaattctgtgaaaccgtaatttttttgttgtttttatatttttgtgaaataatcccaatgagatacttacagagttttagaaatgtaataggtattattgccgccaaaaattaaattaaagtatttatttacaccaagagttaaagtatttatgctacaaattaatcttatatatatactgaaaattcatttcttcaaacaaataaccagatattttcaaacaaataaataaatatataaccagtcaaaattattttcattttcaattatacccctattttcaaagtgaattacttgaatttgggccaccgcccagcccacaatgaaatctaataatgaacaaaactagtaatgggccaattataatcgacttttaggagcattttgttggttcccttttggtcttagtttttacaaaaaatactaaattttaaataatagtttataattttattgaccacatatatttttataaaaatattatctttttataaaaataactataacattaaacattatcctagcgcacttcgtcatctcc

SEQ ID NO: 26108 - DNA, 1918 bp, Cannabis sativa
gtgcttagtactttctaaatgtgttgcgattggttagtgatactctttaaaagttattacattaaactatatgggacttgatacttagttagaccaatagcgatattgacacgtaagagttaaatatgcattagaagtataaatttatataaataaattttaatagttataataaatatacaattgtgattattagatttatttttaattgttggattattattaaacaagtgcaagtgattaacatagaaattaattaaaaataattaaaaaattaagtgtaatatgatattgtcctaattttatttcatttccacaaaatgcatttgccaggaaaattgatttctgacaattttatgttctccattgagattatgcattatttgaagcaaaaggtaaattgatttatggcttcaaagctagatatgagtaagacttatgatcgtctagagtgaccttttttacaagcaattttacaaaggataggctttagtggtacatggattgagctaataatgacttgtgtgttgtcagtctcttacaagtttgtacatggcgaaagggtgatgggtcctttgatcccttcttggggcatttgctaaggtgattatttatcgccttatttgtttattatttgtgcggaggagttttcttcccttttacataggtatgagatgaatgactctatttagggttggtggttaggggagctccactggtttctcacatgttatttgtaaacgacacttatgtgtattgtaaagctacttaatcttcttcgagtgtttgaaagtgcctctagtcagaaaattaactttgcaaagtcctttgctttttttagttctaatacggcggttagtctgcaaaccaggatttgtggtttattggggattcaggaggttggtttggatattacttatttgggtcttcccaatactatgggtcgtaagaatactgctatttcgggttttcttagtgatcgtttgaagaagcagatccaagggtgggagggaaagctactttcttgggttggtaaagaagttcttctaaagacggttgcccaatctcttccaaattatgctatgagtatttttctcttaccacttgatacttgcaaagaattggaacgtctcatggcaaggttttggtgttggtggcaatccgattcttctcaaagtaaaggcattcattggatgagttggtctcgcttgagtcttcataaacatgttagaggtttgggctctcgtaatctacatgattttaatttgactcttttaagcaaacaaggttggcatttattgactcaaggtgactctctagctgctaaggtttttaaggttagatattatccacatggttcttttctttcaactacaattggtgataattcaagtttcgtttggaggagcatttttaagtcccaacaacttattcgagttggtgttcgtagatccattagtgggggtaatgaaactttcattttgaataagtcttggttaccagataatgaccacccgtatgtgctttctaatcacccaggtttgacaaaaaaaggttgtatcaagcttatttcaattgaatgagagagtttgggatattgatatacttcatgatttgtttgatgcccgtgatcgtgagctgattctagacattcaattgagttctactcctgtacatgatgggtggtattagaagaaggaaacttcaggtatctattcagttaggagtgcctaccattttcttcaggatttaaaaggttcgtggtctttagacaataatgcaagcttttggcgcaaactgtggaatttgaaaattcccctagaagttcgaaactttctttggcatgccatttctaattgccttcctactcgagctcaactgagaactaaacatatggagctagttaattttgtccaat

SEQ ID NO: 26109 - DNA, 2668 bp, Cannabis sativa
atccctcataaagtagccgtcactagccttattaatcgtagcgtaatagcaggaaaagaggggttacgccgtcagacatattgcttatggaagttccaatatgttttcttccatgcagcattaaatgagaggtgactgttcaaatagggtctagtacctcccggagataccttagcgttcccttggtctccgagagtatgtggagccttcacctctccttcgagaggtatcttcttgttgacactcctgatgcaaaaaagacttagtcgattcatctaatagccgtgcctcttagatccacgtgtcgttgtcatattggtcaacgtattttgggcaaaattaagggcaacataattaattagttataatatttttttaataaaatttttttgtttctattattctaatttttaaagagtatcatattagtattctaaaatatatgattatttactaagttttatttttgtattaatcacacattaattagaattgataaaattagtcttactcaattaattagttataatatttttcaaaaataaatttatttaatttataatctataataatttatattatattatttatatgtttacataaagttaaatatatatttgtcattctattttttaaattttgtgtgagaactttataatattttcacataattttttttatctttaaaaatacactataaatacataatttgttttattgttttatttgtcccaaaatttatgtatcgatattcatctatctatatatctatacaaaagaaaacactaatcaaatgaggtgtcatcctattattatggtactctttatatatttaatttaagttttgatgagattctattttttgattagttttataatttaattaattttttttgtaatttttgtaattttttttaattattttcaatatacattttaattagtatgtatatacatcttaatagagaagagacaaaattatttattaattaagataataataatattagtttatcttattagtttataaaaaaaaaaagcattttttttttgagataaaaatgtctttatattaaaacaaatagtcaaaatacaaagggcattaaaggctgaggcatttcctccaaccaagaacatttagtatccatcgagagagcaaatttagccaataaatgggcaacagtgttagcagatctataaacatgagagacctgtgctccagggaaattggaaactaaacgattaatattatttaacaagcaatgaaaatcagaagtaagctcttgtgaagagagtactcctttaactactaggagagagtctgtctcaataagatgcacaggtagttggagttctcttagccattggagactatgcataagagccaacgcttccattacttgaggagagaaacagccacggtaaggagtagccataacagccacagcatcaccattactatttcgtagtacagctccaaaaccagaggtcttcgaaataggatcaacggctgcatcagtattcaacttcagtcagcctgaaggaggattgagcacatggacatttttggttgcagcagtggaggagacagattctacaacagagtgaacagcagggccttttgctcgagcacctttgaattcttctagatacgaaagagaaaaatagagaataacatcatgtggtttaggtttggtaccatggcgctctttattcctctccgtccaaatgctccgaagaactgttgcgaactgttcaaatctaattgaaggccatgatgaggacatatgaagtaaaaattctttgagagttatggtatccgtgagaagatcttgaacaccaaagtcagaggcatcccacacttttttagctcttttacaaaaaaaaaaagagcatgactaactgtttcaggccttctgctacataaggaacaggtagtcgagtttgcaatatgccgagtatggagggtgtttgccactgggagacaatcatggatagcacgccacaagaagatacgaaccttggaaggtatttccaaagaccaaaaatttttccaccacaattgcgattgcatgtcactggctgtgggctgtttttcttcaagagcagtagctaaattataaccggattttactaagtagaggccatttgattcatgatgccatatcaatttgtcttgttcatcaaagatagttaaaggaagactttgaatcttaatgacatccgattctaaaaacatgatctgaagtaaattatatcccattgcctgttatttaaaatctgatttgaaactgtcatggattgatcttgacctctaaacagcaggggtttaaaataagtggaacctggaaaccaagggtccgtagcacagagaatattggtgccattaccaactttccaacgaaggccttttaacatcaattctttcccccatataattcccctccaagttaatgaagggtaggagcctaagcccgcatccaaaaaagaagagtgtttgaaataccttggcttaaggattcggctaaggagagaatttggattagagaaaatcatccaagcttgctttgccaacaacgcttgattgaagtgaacaaagcttttaaaacccattcctccttcaactttagaatgagtgagtgcattccatgttttccaattgatacca

SEQ ID NO: 26110 - DNA, 2875 bp, Cannabis sativa
ctatatgtaaaaaaaactacctaatgtaattttcttttgtaaagatttgtattattgtatagattcaaatacaatatcattgagtgctctcatcttcttccctccacatatcgacccaattcttctgcgcttcttcaaagccaagcagagaccctttactctctgcatcccaactggtagacaaagctccataagcaatcccaaaagaagaaaccccaaaagtcaaaaatgtagtcaacaacgctacccaaaccggtacaatcagaaacccctgctccttccctatttcaaaaatcttcaacaaacccaaacccgtcgccatcggaacccccaccgacaccaaaatccttacaatcattctgttgaaaacaacttgtgggatttcctcctccggttccacattttgggttgccggagtttctttcgcagatggcaccggtgtactggaaaagcctttgggattggctaaacctgttctttgagctcctcccctgttttggtttgggctttttgaggccattattgggaggaagagctttgttgggttcttgggtttccatggtgaagaagaagaagaagcgtttggtggaaagtaaagagaggaggttggtgaggttgaaagtaaagatttcatggcttctgtaatactctaattttttagttccatcatttactattaactgtatcattacattcttctccttgcaaaaaaaaaaaaactgatcatacatttgtatggctctgtaaatcttatccaaaatcttatccataatgcatatatatgtatcataagatgtatattatacagttttcaagttttttctaaacaaataaatagataaataaaaataatatttttatcaaaaataaatattagtaaattctttgaatatggttatattgttttgcctttatgaatgaatataggtgtcctaggtgcaccaatagtgtggagtcttctttccatgaatatggttatattgtgccatgctactctctttctttaggaatactttcactctccaaaggaatgaactttttgtttgctagtagttacaaaccttcttcttgctttctttgttttgacttctcctcttattttctgaaataaaggcttgagactccatacctctcgtcttgttttgtttttcaaacgaaaccaagacctctgcaatgattacatgattaatggaggacgtgttgccattatcaatatcaacacaacctctttctaattgcaaaacttcacttcaaactttattttgattctatattttgcaagacactatctaaaaaattagacgaattgtactagttgtgatctcgtctatctcattccaatcctcgtctttcatcgtactaggctttttctctatgcttagtaacaccttgtggaccttcacctaaataataaggagatccttcatcctcagctagagagaaattatcgttgcctctgaacttctcaaattctagttttttggctcttcatttttcttcagtatcaccaacctttgtactagctaggtgattctcaagaaagactgtgtttatatatcgcaatcctttcaagaaaggatagacctggatagtctcctagacaaaattactcttataagtgagttcccaagaaagacatgaagagtcacatgcggaatagagttccgacctcgatcaatatttgtgggaatatacaacagagactctaaaatttttttatgatgtgaaagatcagtcacagctgcagtcacatagcatattcaaaattttcgaatattttccaacataaatagtcctttaagaataataattaaaaaactaaatgcacgccaaaaaattctcttgtggcaaataaaaactacagtaaatcttccactataacaatattaaggggcacacaatccaacactcttaagttttgataaatgcttaaggaatacactcaaaactcttactcactagtatgacaatctcatcatctctacaaatatttctcacaattttgtaagaattatctttttcttttatatttctctcactaagagatattttctttctattttttttctcaagagctccactcttcacttttggaatagattgtgatggggtgagcaaaggaaagggatgtagttcttttagtataagctttcttggatgtttgaacaagacacaaaaaatcaactctacatgcataatcaaatatgtccatatgcttcaagtcaaaaattaccgtcacagttttcacttcattcgtattaacaataatgttctgggactggggtttaggatttgggtctaggtttgagtccgaaactgaagttggagttaggattgaagttgaatttatggtaaaataattaattttagacaaccaattaatacaggtcaagtcaatactaaaagtaatattatattaaataatacaattcaataaacctaatataatacaatgcaatatactaaacaagcccttaaaaagtagtgaaagaaaaaaccaaagtcccttgtaatgcaaaatgggcgatcataaacatcagctaaataataaaaagtggacttagaacccgatgatgaaatcagtctaaacatatatataaaatggtaattacatcattacttgaaaaataagatcaccacaaattaggtataaattaaccaacgaaaacgttttgtttacattatcaaatgttgactagacatatatgatttaagtctttaaggttaatggatgaacttgaaattaagtattaaagaattaacattaatagtactgaggttataaattcaatacgcattaattaattgattaaaaataaagaagaaaaatataagtggatcggtttatatagatatcttgaatatcttgctatac

SEQ ID NO: 26111 - DNA, 2732 bp, Cannabis sativa
  modified_base (2511)..(2519): a, c, t, g, unknown or other
ttgactaaaaaattatttcagatgctaaaacagataaaggtacatcaatgtatacattttaagaagatgcattgtagaattttccaatactattatacgaaattttaaatatttttacggtttttaagattatatttacataaaatatgattttttgatgtattattatgttatactcttgttattttgttgttgattttttgtattttttttacatttatagttgatgttgttttcttgttgtttttatatgggtttcttgttgtttttctgttatttttataaatactataaaaatgtaaaaaaaaaaaaaaatctttaagcgtaaaagtgtaaagttttgataaaaaaatagtaatttatgtaaatttttcaaaatattatcgagggttaatactattttcaactttgtattttgtaaaaattattcattggaccatctattttgttaaatgataaaatagacctatattttataaatagtacaaatacgaccctgagctcaattttcgataatattttttgatacaaccaacttgaagacaatttctagcacgaacagatgtagaaaatgtaaccaattttgtcataatactttcatatcgaattagcattgagttttatttaaaaaaaaaataaaaaaatcagttcaagacaatatttagtaatatttagaaaattctgtatttaatttttcatttaacaaaacagagattacagagaatttaatcaataatttttataaaataggatccaaaatagtatctaccttattatctaccttattatctactatcttatagaaaagaaagttttctaccatctctttttcctttctccaaatctaaacaattaagttttttatttacatatttttatttattttgtaagaacaactaaagtttattataaaaatacgtatatatatattttgaaaaataaaaagtttgaggagttatatggttaaaatgtcagcaaccaaataaaatccagttggaatactagatagatatagtagagaatataaatataatagctcattactgtattatatttggacattatattattaacttgttcatatatatatatgggtataacttttaatgggtattacctataaatcagctatatcatgagtaatgattatttaaaagaatgaaaatgatgaagaagagataataaagattcagaactaaaagaaaaaatccaaatgaaagtagcttgaatatttatcgtatggagtgtatttcttctttttttttttaaagagaaacctaatttatagtaaataaaaaagggtgtgcttataaaaaataatatttaaataaataaaacggggtgtatttataatttattggggtgtaaatataagcatctattattattttatgatgtgtaaatataattttccatatatatatatatagaatgaggagaaaataaaaagaatagataaaaaataatttccatgtcatcacgtaataagttaaaataagaaatattaaatttaaaaatttaattaataattataaatatcaactattagatcaaatctaatggctaataattgaatacctatttataagtaataccattaagaatatacccatatatatatttatacataaacagtgaatactcccttgagttatggaaaaaataaaataaaaggctttaccctttaagtttaagaatgatacacacataaatgacaaacataagtaccaaaaaaatctatatgtccttgtttacaaatataaacgcattagttaatgggattgggggtagtggaaattatctaaatccacttgataaaatgacaaaggtttggtgaaataatatatattaacagacagtactgcccacttgaacaaaaccccaccattacatactcatgccaataacaatgtaatgtatcaacacattttttttagttggcatacacataatatatattataggattcatcatctcagtaaggaaaagtgcctttttattatatattttaactattttcttataagggtttttcttaggggaaaaacaaaaggaagaaaaggaaaaaacactttctaattaattagtgaaggataacttgttatactcattgccaaattgagattgtgtttgagggaaatacgtcagcagtgactaaacttgagcaataaaatataattaagaagaaaaatacatgtttgctatgtactttttctcatttggatagcggaaaataatttatatatatagaggagaagtatgagccggtgacatgatattattatttttttcttctctgtttaattctctcaattttaatgttttattaaaacataaatttataaattaatattttactattattttaataatctgtctgtttctaaaaattaaataataaattttaaattattaaataatttgtagtgccctaatgctaaggcatgatacagtgcttttgcaattatagtgctatatttagtaatcaaagatttttctcgaaaaacgtgnnnnnnnnnaacttttataataaatattaaactttatattttacataataatttgcaaacaccaggatcccgattctaaacttttatacaaaatatgccaaaatacaatattcaggtcgcacggtgactacaaaataaaatccacagatgacccgagactgaacactccaggtcacgctggcatgacatgtacaatctcatcctagctcaggctcactcctg

SEQ ID NO: 26112 - DNA, 6612 bp, Cannabis sativa
ccagaaaggttaccatttttttgtgtgtttgtttatgtttctttcgagattatcgaataaaagtttatctatatagatttgagtaaagttattgtttgtttggttaaaaaattgagaattttttagagggtttgagtttgaaatacgttagctacagttatgaatattgtattgtctgcaatggtttttgtttatgaaatttaacaaaattgtgtgaatttgattgggtcatttccagagtccacattgcatttggttctgaggctccgtggtggaatcattgagccatctcttatggcattggccaggaaatacaaccaggaaaagatgatttgccgcaagtaagtcataatcttaatatatcaatgttatatatgtttggtttatagaatatgttatgttctctgctcaagtcatttgtgtttgtttcttaattaacaaatgttggatttagggattccactcttgtatggttgttaacaatatatattgttcctttgttttcattatcctcacctgttatgcttatgtagtttttcatatttgcatttaagctatggtgttcttgtaatgtcttgtgtcgatactagttcagttttttgtgtctttatgtgtcaatatcgatatgctttatttgaaacttctttgattgatgctcatagcgtttgttacttgcttaggtgctatgcccgtctccaccctcgtgctgttaattgcagaaagaagaagtgtggacacagcaaccaggtaaacaaacttttgtttgattatttcttttccgagtttcaattaataattattaaaaacttgtttatttacttgtttgtttcgtaacttgaattgcagttgaggccaaagaagaagatcaagtagattttcattcctaccgtaaggtgctgcttctgcagttttctattagaacattaattttgtttatgctgttttggacaacattgctctactgggaaaacttatttcctgtatttctttgtgctttggaattttggttattaagatgttgagttcgacctattatttggttttacttataactattctctaatacatttatacggttatgttcttgctagattgtgtcttgccttcaagcatttttcttaaaaatatttagaaaaaagtttttagattttgtgatacatcaatgagtaatctttaaaaataaactaaaatgtccaaggtaacaattctaagatcaaatgggatttccattaatgagttggaaaacattcaatcgaatgcaattatgtatttagattcaaacaagtaacagccctttttctcttgttatttagtcaaaacttagaaccctaaatcaacataaacaaagacgcttatgcaaacaaaaaaatgcaagatcccaatctcgattccaacacacctccttaccggcacctaagagatgacggaacctccttaccatctaagagatgacgggaacagaatgcctacatggacgctctgcacattcgacactgttctattgccctcggggccgatggaaagcaatgatacatgaaagtttttttattattgttgattatggtgagatagcttgattcaacactggcaaactaattttaaatgtttttagcttataaacatgacaatggagatattggttgacaaattttgggatgtagcttatttagaaccaaatttggcactaaacataacataccaagtttgatagaaattagaaaagagcattacctttgttgtgctaactataagattagtacaataatttagctaaagatattaaagcttaaactcattgcctttacaaagatgtgtcatgaattaaaaaatgggatttatgagacaaattattagtgcatgcaatatgtcattcccacttaatatacaataatgtaattttacaagaaacaagttattaaactgacatcttttcaaaatgaacttgtacacaatttgtcttcatcttttctttactttgtgcttttacacaattcaagtgagtcaaatattcttgtgcttggtctcagcttgtcacttaaaactgtcatctgttcaaagtgaaataagctacaatatattaagagaaaaatactagacaaaattaaagataataggaaaatgcaggcatacactaatgtggcactttctaattggttggcaacctccaaagccttttgaaggctatcgaccaattgagaaaccccacatagatgatgtatagtgactcataacacttattctcagctacccttttatggaaaacaagcaatgagaaaattaaccttgtttgaaagacattctgaaccatctttttgggagcttcactggctgcatattctaacttgagtacctcttctgaactcaagcgccagccaagagctcccaaattctcttctgcctgtttcacactcttaacacctggtattggaatggttcccttacatatgcaccagtttatagcaacctgccaactagatctcattttgttaagttgctgtgatcattgtgataattcaagtgtttgtaaattgcatagttcaatcacctgtggcacagttttgcgcctctttcgtgctatttcatttagtgtactcagtaagggctccaacccgggaagaatttgtctgaataggaatgaactacataaagagaaagagcaaagtttagaagatcagtttctgttattaaagactaactttaatgcatggacaatttcaatgaagaaaccagtttaccgaggccctcgtggtagtttatctggagtatatttcccggtaagcattccaagtcctaagggactataagcaataactcggatgccaagagaatcacatatgttttttatttccaactgatcttctcccatgcttagcaaagagaattgcacctataatgattgttaaaattcagttcccatacaaaatttcttgaagttccacttgatgaaccttctaggttaacccaaaacagtgaagaataaatggtactctcaggataggatatgtaccttaatgtatttctattcttaagaaagacaatatacaaaataagtttatatgctataatgtttaatcaaagtgtgttatacatttgaggacatgtttaatgagtgtgtatcaaactatttctagtaatgcaacaaacatctcagattccaatttggagttgaatctctatggctcggttttcgtctttactttttgttttgattttgtttttctggtttgtttcttgttcttagtttgggtgagttcttgtatttgcaggtgatgaagttggtgtcggaataggagtgaaatccctacaaagattttcacctttggaagcattgttgtcaatttgtcattggtatcatattgtgccaagagctgaatttgttgagttgtgtttaacatgaatagagatttggagaagtagaacaatacctgagctgaaaccaagggaactccacgagctttgaggtaatcatatatctttagaagttgctttggtccatagttgctgaccccaactgctcgaacaagaccctgcatcaaaccatctctgaatatgtgaattggtaacagtaatcttgatacctacttaagatttacaagatttatttgatgttgaacactctgatacggtgttggctcttttcgagcacctatgataaagtagacctctaacggttctttttgactcactattatttgagctactgaaaactaattaacaatgaatggtcttacgacatgtgtttttcagtaaaactttcgagtcagaaaactcaaaaatgtgatttagaaacaagtaatcaagtactcattattgaaatcacaatgttaacagaaaattaaagcaaaaatatgatatgggaagaagaagaagaaaacatgttagcaaacaatgagaattcaaagtatttctaccatttataaatctatgcataaagtgtcatataaccttttcgtacattgccactaaaccatcccaaagggccatctcctgcaaaggagcataatttgcagttgaccagtggagctgccctattccaatttgctcaacttgaatacgttctagtgaccccctgaaaaaccatgctacatcaaaattatatcataagaccaatcaatacacagggaagattttcaaagctctctctagccgatttcgacaacagataagcatgaaaaaggggctattacctgcaagcatttacaaactgccctggtgtcagtcgccatggatatgcagcaaacttggtggctatcacaatgtcatcctgaagcccttttccccctgcatatgaagttgtccaagaacttggattaattgaaaaaattgaccacattctatgtaacaaatttatgtttttatccaatctcttattgcatatacatagcaactttcattttctgccataacaaaaagaccccatgtttcgttacattgaaaccattttctgcaagcggtttagagataatagtatgatgaatattggaaacctcaatcaactagattgtaattcagtcaataaaatgttctataatagtaggtagatagcaatatacaaaatagcattttctttatattatttttcaaataggtttctgtagtgaaaagtgacaaaatctcaatgtcatatcaatgttctgcaagaacaattactgactagagtaactataatttgctaataatgttaacatgtaagtactgagtacacataaggtctttcatttttgttttgggaaaaaaaaaaactctgaagaacaaacttatcagaattgggaacaaacatatttacctcataaccattcactagaacacatggtgagcaaaacaacaaatacagtacagtccaaacaaactaagaagataccttgaaactccctgatgaattttccaagtaatttttcactttgaccattcaatcttccagtcccataagaatcagcagtatcaaagaggttaattccattgtccacagcaagattaaaagtcctctgaagttcatcatccatggcttcttgataaccccaaagaagctggtttccccaagcccatgtaccaaatcccattggagacacacttaggggccccactttcacctggttttacattcattatttacacaccattatcaatttcaaaacacctcaaataaaaagaaagagagaaaagaatagataccttctgccatggccagaagagagggagcttaagagggttggaggatgaagaaggaagagaaagcccagatgaaggagtgaatgagttgatgaagtatggtgtggtgggagttgttgagcttgaaaagaaagccataaccggaaaagaagaaagctttctggcaatggcaagtgaagtgagacagttattatgattatgtcagtgtgtggtgccagtttctttgacaaaaacaaaagtcaactaatgacattttaggacaaaaacgacagtgatattttaaacaaacgacattaaaattacaacaacgacagaaaaaaaaagaaaaacatattattattgttttaaggataaatagaggcataaactaaaataatatttttagtggcgaaattttcaatatttttaaaattataatattattggtttttgttcaattataatttaaaagacatattttaaattattaggtttgaacgaaaacatgtagtatcaattacttttattaattttttcataaattcaaaacaaaattgaagaaatcggataaaagttatagtgttattaacattatacactcacgctgctaaaaaaattcattaaatttatgccgataattaatttaaaactttagtactgcgattatcattattgattttgtgagattaagggtaaatagtggcataaactaaaataatttttttaatgacaaaagttcctaattattctatattgtaattttcgttcagtttcacttgtatatattctattagtgtcttaaacatcacacattttaaattaccgaatttgaatagaaacatacaatatcaattactttaatttttttttaataaatttaaaacaaaattaaggaaactaaatgaaaattataatattaaggaacaaggttgtttggaaaaagaaacattcctctattaatgacgtgcttacttctgcacaagtagctcttgatcactggaataaagcttaagataaaatttcgttgtcatcaatgtgtttggaaagcatcggtgatggcgctgagtcatggactagacccacaaaaaacacaatcaagattaatgtagatgcagcactctttgatagcgacaacaagtatggtttcaaaattgttgcccgaaaccatcttggtcaccttgttgcaacatgggccggttgccatagcggaagatatgcagctgaagtcattgaagccatggggattaaagaagctctcaattgagtaaagaccaataattggcaacatgtttaaattgagacggacagtcttgtttcagtacaagctattcgaagcaaccaaacaatgaggtccactttcggcattttaatcaaagactgccaacttttgttatctaccctcctaaatattaatttatttttcattagacgatcagcaaaccgagtagcacattatgttgctag

SEQ ID NO: 26113 - DNA, 1875 bp, Cannabis sativa
attccaaacgagccctaatagtataatataaatatgagaaattctaaaaaagaatacgtgtgaatatcgattgttaaccaacgcaagggatatggctctataccataaggagtggagtagcgcatgttcttatatatggctcaattctctaccatttattccatgtgggacattgtccacaatacatatagtttaatataacttttaaagagtatcgttaactaatcgtaaaacaacatgtcttaagggtgctagacatcacagttgcccaataacaatgctatataaatatatacgtgtatatatataaagtaattaattaatagataatagaggtaggcagaagaagcagagaaaatgcggtacctgatctagaacataggatggttgattaacggtgtcaggcataaacgccgttaagaaaacggcaactgaaattttgtgagggaaattctccatagccatggctatattgagtcctccaaggctatggccgacgaggacgaccttttcttccggatcaagagaagccattaggtccaaaagtggctgagaatagtccaacattgagtgaacatctttaatactcttcatgttgatgcctgaagccgccagatcaagtgccgtaacgcggtggccggccgccttcagcagcggcttcagcttgtaccagctccatgccccatggcacgccccgtgaaccagaacgaagtgatgatgaggcttataataatcaacttcattgctttcttccattttcttttaaatttctaatactttaattaacaattattgatcactcaacaccaactatatatatatataggatacttctgtactgcttatcctaaataaatgcgtatggtccaccagtacctagcattccaacaaaatttttagtttattttttatacgaaatactttttaatggtattacttattaatgaaaactatataaatttaagtataaaaattaattttaaaaatattataccattagattttgatccaataacaaataataaaagagaaaatttaatttctatacttaatttagatacttaatttaaaaaatatttctttttacattatcaaaaatatatttatatacaaaatacttaagtcatatcaacattttttttatttattttttttttgctaaaaaactattttcttaatttttttttcggctgattaaataatctcaacccatataatatataaatgagagatttttttttaaataaataaaaaaattaagtataaaaacttaaatttttctaatactatccattcatgggtaatacccattaaaagtgcacccatatatacgttatagttatttaaaatatttcttaaaattttgagaaattcaaaaagatttaacacattcaaaataaggtttaaagaaagtattgcaagtgaaattctttcatttatacacgtgtgaagtaggtgtttgaactttattttgttaaatttttttgaatttcttaaaattttgtaagatgtcctaaaaaactataacatatagacgactatacaaaaattaaactaaaaattctctcaaatatcaaaacaaatgaaaagtgcattggtaaactttttttaagaagtatattgtaaaatttttctccataatttatatgtaataaaagaagtagttgccaaataaataattaatgtactatatatatgtactcctcttttaaagagtacattgtaaaatttctctcaataatttatgtagtaaaagaagtagttgttgaataaataattaattaaggaaaatttgattttttatacttaaaaaatcttaatattttattcttaaaccaatacatttcaaattaagaaaaatatgacacttttatc

SEQ ID NO: 26114 - DNA, 2090 bp, Cannabis sativa
atttataggataaagtttttttttttgattaatatttataggataaagttttacaagtagtattgatgtaatagaaaaataaaggtcccatttaaataaatattatcctgatttttcatttttttaatgaaaaattagtattttattaactataaaactcaattattaagagaggtaataactaataagtcagttgggacattttctaaactaaaatgacaatcatgataaaatattgaagctctagcaaaagagtaagccaccgtaattgattgttttacaaagtaaaaagacacatttctcaacgaacataacaaagccttacaatcattaaccacttaccaaacatggaaatcatgacaatggaactacgaatggcttgtactacagaaagacattcagattccaagatcacatgtggccaatgattatcttttatccaactcaaagcttcgttaatcccaattgcctcagcaacttcaggtgccaccgagccttgaaacatccttgtgcaaccctccagaaatacattgcttgctcctctagccacaaacccaacaccgtagctctaggtctcgtgaaacactgccgcatcaatattaatcttaatgctattatcatttggtgctacccactgcttcgctccgtcccttggtaaaaaaatagtaaacaagagctcattacttgagcgttgagcaagtagtcattgattaagatagtttttcaccgatgagacaatgctatccgcacccaccactttgttttgccaaactttgtcattcattgcattccaaatagcccaacacaaggccacaagtaacttgatacggtcaatatcaagcttcaagaactgtccgatgcaccaatcaataaaagaaaaaccaggttgcacatttgtaccaatgccacccgattccaacacaattgagtagttggagaggtgacaagcgcatgcgggatggttttctcctctaatgaacaaacagagcaaagaatactaacctcgacatgctttgattgaagttgagacatagttgagagacaatttataccagctctccacaacaaattcttcatttttagtggaatttttaattgccaaagcttcttccaaaatcgattcacatccgaatcgtcaaaactagtttcaccatttgtttcttaaagaattttgtaggcactcttcacagtatacaaccctgaaatttccttgtgccaaatcaaggtgtccctggttggttgagtttggactggaatctacaacaccaaatcacgatcttgttgtgtccaacaggtctgttaagacttcggcatcccattccgcaccattaacattcatgaggttacacactctagcatggaggagacttgggtgagaagaaataatcattgggttctcagtatcaggaagccacgactcaccaaggatagggatattgttgtcgttccccgcaacccacctagtgcctttcattaataggattgtgcttttaagatgcttcgccagacaaagctcgggtttgagctaataactgttgtgagaaacgaaccattgggataatatcttgctttgaagatacgagccacaagagaatcaggtttgacaaggagccgccaaccttgcttacccaagagtgccaaattaaagtcacgtagattgtagaagcccattccgcctttagttttgtctttgcaaatgtgcttctatgacatccaatggatacccaagtgagtattaccagattattgctaccaaaacttagccattaagctcttcatttctttagtaatctcaagtggtaataaaaagatgctcatatcataactaggaagtgcttgagctaccatcttaattaagattttcttgcctactcgtgagttgaaattttcatcttaaatgcctttttatttagtatttttctttttgtgaagaaaaatgtaattcgatgtccacttagtatggatgttcacggattggtttgatcctgatttttaattttgtcaaaccaaactagtattacagttttttaaaaattcaaaaccaaacccaacgaattaaatgatcaaaccaaaccaaaccactcaaaaac

SEQ ID NO: 26115 - DNA, 1211 bp, Cannabis sativa
agacactttttttaggaataactttccagagatgatattggagaccttttcatttagagaaattataccacaagagaattgaaattgagtgtaattgaagtaattatacagttttacgtatttatctgactatgtaattacattgtaactgcataagtatagaattaagagcctgtttggcaagatttttaaaaaagttaaaagctacttttaacaaagttgtgataaaaatgtaacaatttaaaaataatttattggagaagaagttacaattacaaattaaagttgatacaacccaactttaagaaaaagttgttttgattaaaatactaactgaactttttttttttcacagttctgctatacacttattttttttttcacagcacaattacaattgtttttcccataagacagatgtgccaaactggccctaagaagtttcaattatactcttcaattctcaaaactttttatttcaaatattaaatactaatttttttttgtatgattactaactatgaaattattatattttaaaatatagtgtaattgctactctaataattacactagtaattacacaattacttacaaacacaataacaattacacctatatgtattccatattaagtgttgatgcaaaagacaatttacaaactattaggggtgttcgcggtgtaggtggtgcgagttgtaactattttttaaaactaaactgcatatgcggttttataatttctcaaactgcagccgcatcgcgagatcttaaaactgcaaaaactacaccatgaaaatgcggtgtagtgcggtacgatttgagcggtttacactattattattatcaaacattataataaaaatttaaaaattaaactaataaagctttaataatacaaaacaaaaaaaaatcttattaaagttttaatattataacatgtataattattatcaagtcattatattaaattgtctttaaaaaataaaataatatacacatattatatatatttgttctaaaaaaaagaataaatatcatattataaaaaccagtgactttgtaatatacaatgcggtgcagtttgaactacaattattattaaattcaaaactgtaaaccgcaccgtactgtgcggtttggtaaaaatacaaaccgcaacaacactacaaaagattttaaacaacatttttatgcagtagggtacggta

SEQ ID NO: 26116 - DNA, 2572 bp, Cannabis sativa
  modified_base (1464)..(1500): a, c, t, g, unknown or other
tgaaaaaatatcatacaaatatctgaagatatttttcaatattaatgcaacctaatatctccttaaaactttaactattgaaatatctcatatgtttatgttctgtccaaaactattgatgtgtcaaagaagaaataccaagcaaaaaatattaattgaaaaacaaaactctcttctctttttttccctcaaaatttgactaattagactcaaattgactcaaataactaaatataatcaaataacattttggggctctgtataaatatgattttggtcactcaatgttaaatgtggtgacttggtgtttttttttaaacaaagaatgcttttaaagaaagagaagagcagcaagaatacaagggtcatctacgatttaaattgaaacttcatctaacctcaaagccaatcttgcaggcttgtgagcaaaaatgttaacagagcacttaacatgagagattggaacattgataaaatgagataagaccaacttaatttgcttgatgagatctccaaatagagagagtaataagtggtcaaaaattcaaaactcatggttttaaactaaatttaaaattatgacattatttgtaatgggaaaagacaagttatttctataacaagagatatttataattatatattttgttatgttaaagactataatattcatcataattttagaaacttacgaaaaaatagagatttaatttgccttaatttatagtaagtaggagtagacctatatagaggcgaggagagacagtcgctttttctaaaaaaaaaaatcaaaaagaatatatacatacattttaactagttataacatatatttttaaataaaaataatatttatgaacataatacaagttttggtataatagtaaactatttcatgatgggagaggtcatgagtttgaattctaataaatgcttgtttactctatatttaaattttagtttttaaacctctatgaataacacttctattaataacacttgtatttagtgtttcaattatttgaatacaatttttttattgttacttttttttactttatactaaaatacaaatttaaaatcttaaaacccaccttattaattaaggtaccgagtattacagttattaattttccaaataaaatatgtagcagtgaatgaagaaactatccacaccacaaacaaaaatctttcatgctattgctatatcaacaaaatatattttatattcagagccaaaatatatgtcagcaatagcaacagatgttatagttatatttttggtattttgagaaaaaggcataaccacataaaataaagaaagaaaataaataaataaacaatgtgtagatatgtagttgtgtgtggggttagatatgaacaagtctcagtaatggagaacactattaacaaaaaaataggaagaaaagtttttttagggtgtattattattattattattannnnnnnnnnnnnnnnnnnnnnnnnnnnnnnnnnnnntattattattattattttgttattgtttttctacatagtgtgaaatgcattgctgctttggatgctttttgtggggaagcggcagcgtgctgtttggttatttctgctgctttggattttgatgccaagtttgtcatcgtggaaagcaactcgagggtagtcatcaatgctctcaatgggaaggagtctcattgggttattggaaactatgtctctttttgtaatagtcactcttctttatttttgagttgtattttctctcatattagcaggatttaaaattttgttgcccataatgtggctaaatgggcatttacccacaaattatttggtgatatcccactatctaccatcccgttaaacttattatgtaatgaccgtgaggtctaacttattctattaatgaaatacgtttttcttcaaaaaaaaaaaaaaaaccattcatatatgtatatctctttctttttttttttccctttattttttgtttaattttttgtatagtcagtcaattattttttacaataataattttttttttgcacattattagaaaaataagaaaatacattttgataagcttgaaatttattttaaaaatttattagttgtcatataataggataatttaccatattctattttgtttactatagtaacatttttttttaaaattaatacatattttcagtcatttatagtatttatatatgaattgttataagtatttgattgaccaagataaaaaaaacataaaaattacttttaaattataactaaaaatgtttatttaaatagttagtatactattgaataacttttaagtgtaaaatcgtaaaataatttataataacacataaagtttgtttgtaattaaattttgtttaatttatagttcaattgctttttgataatagaatataaataaaaaattaaaatgttgctttttaatttcaatcatttttttcattgatgataaaaaataggggaattaccccatatactattcttttaactttttttttttttttttttcaaatttactgtttggttgcagcgctagttgcagtag

SEQ ID NO: 26117 - DNA, 2534 bp, Cannabis sativa
  modified_base (2260)..(2260): a, c, t, g, unknown or other
atccatttcttaattccgggtattacaacacgtgtcatccattctcattgccacatcaaggtgcaaaaaataggatagcattttcccctcaagtttgtgcgggaccttcctagtcgcacgtggacttcactcggtcaatagtcttgtcaatatgagtgacgtgtgtctttgatgatggatgctgatctgatgtgaccctaactagaggtctcttcgatatcttaccatttaatgcctattgaaagctatagcttgaatcacagttcgatgtttgagcacactttgacgattatacttttggcaatgagtacttaacgtctgcttttgaagggaaacccaaatattcaaattttgaaatgattaatttccttttctgattgcttataaatagagattgaaacctttggtgatccttttagccatttcaactcttaaagaattaaagcaaaaattcctacacaagtttgctctcaatttccttgaagaaattacaagaaaactcctgacaataccatccgagcagagcaagaaagctttgaatcagtgagtgagtctttcattcctttcttttatataatttcaatgaaatgcatgcattatttctgaattctttgctgtggattttttttgttcttgaactgttctaggttaaccgtagaataactaggtttagggtttggaaatttaactgatgtttaaccataacacctaattatctgactaagcttcgattttaaccttaaatcgttcattcccattcgtccataaggttctgacaaaaatcaggttccaatcaaagttttgaacttctagaaattccatttctagaaattccatttctagaagttccaatcaggcctagttggcacatacaatttgttttcattcgttatcctgaccaactcttattctcttgtctcccaccttttgtagatgaaccctagtgatttctaaggaggcaagcatcatattgaccaagacttgctccaaattctgtatgaagatcatcctcgtgctagtccatcttcgtccagtgacaatctttcaaattctagtttcgatgattggaaagtaaccagtgaacacacatcttccctagaacccgaggtgcaacatcattcgtaatcccgaccaaatctgtggcgaaggatacagttgtttcatctgggaacttaagaatggttggagacgctatcttcctgccagctagacgtatagggtccatccgagcatagttgacactttgcccaagggctgcccaatcctagctactatagaaaattctattgttgaatttattgtgactattgcaaggcactcttctgataaaacttcgtccagtcctaaaatgatggcacgaactaagcagattttcaaaaaacctttatctgctgaccctcatatcgcctgtcctgtaattgaggaggaggagactactggagatgttgaagtccaggaggtggaggaccagggcgaggttcatcccacaaacttttccgaggtcaaaggtgatgaggcagagggggtccaaggggagctcgatggatttctctaccatccctcttgaccatgaagagattgactgatctttttcaaagatggtctcctggggaaggtcgaatgcttccttccctttcccagtcaactggctaccaaccctggagagggttattgtgcttggttggggccttatgccaaacaggggcaatgatgcctttacatccgtacttcaaggagatggccaactcttaccacatcagtccgacccaattcacacccaagggccttaagtacctatctgccttgttcgtgttgtacgcctcttaaggatagggtcagctatctgtccatgacactaactagttgttcgacctgaagtcgagccctaagcaaaacatgtttgtgtatttctacttctcttagatagaggagtcgtggctcactggtaccacaaacaccgaggtgaccaagatctgtggctttgtagaggactactactttgtcaagggagtggacaccaattataccagtttccaacatattccctcttacctgtcgacctccgttcacgctggaactcaggaagagggctcaagaaattctttaacttcctttaaatgattgaaatatctctcttcgggccactgaagccaattttatcaattacaagctttatctgtttgactatgtacaaaggaccgagtagacagtagggggttgtaatcgaatgagaggctccgagcaagaagaagaagaaganaaggctcctccaagtgaccaagtacctattgagcgagccattaggattagagatggtctcaagaaggttgctcaatcttctgccccagtggttggaaagggaaaagccattgtaatagagttggaagagggggattcttcagattaggatgccccttctttgcttgttcgagaggggcactgtaattgtgaataactatatgttctaaatttaatagaatttatacattaaacatataatcattaaagtgatcatgtaacataaaatgatttct

SEQ ID NO: 26118 - DNA, 1599 bp, Cannabis sativa
atgatcatcatgatcatcatcatcaccggggggtggagcattaaggtcaatcctaagaagcattgctcttctttcttcttcatcttcttcttgaagattattattgttaacattaattgaaactcgacctgttcttttaccagtcatagaccaattcaacgataccatatcagtttcaatattaacatttacatcgcgataattattattattattatcgagatgtagaactattttattattacctgacgatgaagtagctatattttcagtaatattaactacttcatcgtggttattatcttttctaatagcatgctttttcgctggtggcataacgcctttccagtctctatcgttgtgaactctcatgtgtccgtgaagtcccttctcttgagaaaaagatcggttacaaacgtaacacttataagatgatgatgaagatgaagatgatgaaggtaccgacgatgacaatgttgatgtcatcgtcgtcggttggttatgtattctcatatgacctccgagtcctttaccacaattgaaagttttatcacatataggacacttgaacaacttaccttcttcttgatccattctcaaaaccctcactgtgaaataatgttgttggccgtgtgagaggactatataaaatatttaaattgattctcaaaaccctattatgtaaaataatgttgttggcctatatatatatttatagaattttcaaatcgattgatattgtattatatatatataaggaataaggattcaaaaatttaatttctcaaaaaaaaaaaagattaaaaaatttaaaatgagttgatttttattgaaataaaatcaagaagtatttaaatttcaaataatttgataatgaaataataatattatatatgtttatgctaagttaacaactttaattatttaattcggaagcaaaaatatagcgtacgaaaaaaatctgcttatttatataatataaaatattattaaaaagttaattattatatgatttttttttttatttcaattatcatatatcattttttttatatataaattatcatatatatgatttaattcacatacatttattattttttcttttttttttcttttatttaactttctttgaaacaaaaataataataatgatatactcaataaaaataagtcaatttcgttgttgataggctacaattttaacttgagcttgatttcgtttttcttccaacaagtttagactgagaggctgtttggaataggttaatgctagtaaggtaatggtaatgtgaaacattaccttgtttgttttgaggatttagctttggaatgttattcccctagtaatataactacccttaaggagggtaatgtccatactttaaaaaagggtaagattgaattattaccttccattatattaatttgaatagcatttttgaattaataaacaaatttaattactaataagattatcatttattataaataaaatattacaatatatatatttactctgtgagatcgattttttttaactgagttatttttatattattagcaataacatatatatatttattatacataaatttt

SEQ ID NO: 26119 - DNA, 4395 bp, Cannabis sativa
tggaggcttgaagcggggacgttacactttcccagccaaactctgcacatccttgtgtttcgtcgaggatggcatgcctaataaggcctgtatcattctaggattttcctctatcccccgttgattgacaataaagcccagaaacttacttgatatgacaccaaatatgcatttttttgggttaagcttcatcccgtatgttcatactaccacaaagcacttcttgagaccatttgaatggtctttaccaattttcaatttgaccaacatattatccacataaacttccatgttttttcgcccaacaagtttcaaaacatgtagtttattaactgttggtaggttgcttcttcattctttaatctgaatggcatgaccattaacaatacactttgttctcagtttagaagcttgtgtattcttggtctgccacgtgcattttaatttggttatattcggagtaagcatccatgatggataataactcatgtttagaggtggcgtagaccatcttgtcaattcttggcaaggaaaaacaatctttgggttgggacaggcattatttaaatcagtgaagtctatgtagacccaccaggtcccgttgggcttcaggaccaggagaagattagctaaccatttcagaaaatacacgttgtagatgaagatgtttgttagaattttctcagctcctttctttaatgcctctacctttattgggtctaagggacacctcttttgtatcattgcgcgcgtgtctttattcacatttaacacatgacaaatttcctttggatctatcacagtcgtatccccgtggcaccatgcgaagacatcagacgactccttgatggtgcttatgatttttttttactccaggatgaaggcctttctcgatgcgcacaattttagatggatcttggtcataaatttgaattttttctatttcttccattggatgtagcaccttttttgcccctactcgagggtctaactcgtcttcttcgcattattgatccttatttccttctccattgaccactaggattggctgcttgatggcgacattataacatttcttgaccttcttttgatctcctcatactgtcccaacccccgcagagtgagtaaagaacttgaggcataggtgttatatcgaagttatagccccaaaatacacgaatgatggtcatcctaagataacattataagttgtagggtagtctacaacaacaaaggtagatcacttgaaattactttggagagtgtcaggatgaaattactttggagagtgtcaggacacaatgtgatagaaagccacacttttcccatggcgatgagagaatccctactaaagtcagtgagttatgagttgctaggtgctaaatcctggtatgtgagaccaatggaaaggaatgaattcttgaataaaatgttcaacgaactcttgttatcaactagaatatggaccgccaccttgttggctatgggtatctctatgaccaatgaatcatggtaggggaagtgcacagttttaacatcctcttcagtgaatgttataggctgatccatgagcttgggcctctgagtaagcaattgaattacgggaaatttacatgcacacacatattttataattaaattgcaaaaataactttgttcattattaataccgtaatttaccttttaatttgatcatgagcttgtgtttttttgttagtttgactctattgcagcagcatatgtgttgcatacctattattttttaattttttttttctcttttgtctctttctctctctatctttatctttatcaattttactctttttttctataactttaaaaataatttttggttacatcattaatttgttgagctcaaaaatagtatcattgccacctactttttaatataatcattttaaaatgtgaaaagtatatattttttcacctttttcaaaattaaaataattatttagttgctaaccatatcaattatatactcattagttacatgtcaccatataattataaaatcaaaaaactgataaactagtaaccaattagtattatgttaatttaaatatcattagtcacgactaaaaactccgatatcacgatatttttttatcagcatcattagtaattgaaattttttatatcaataaaaatgcatattaataaaagaatgaatcatttacatgctgtgtgggaagtgtgacgtcggttcgattctcgtttcttattaatggggagattactggaagtgtggttccacaaaggggattgcgtcaaggggatcctctttcaccatttttgttcttattttgtgctgaagctttttctaatttgattaagcaagaggaaagcaatggtaggctaacggggttgaggtttgggagatcgggtgtggctgtgtcccatttattcttttcgaatgatagcttggtttttttttgaggctactagacaggagtgttcttgttttaaagggattttggctaagtatactgctgcctctggtcaacttgtcgatttccaaaagtcagaaatgtgttttggccgaaaggtagggatgaatacgcggcgtcggctggcctcattgatgggtgtgaaggttgtggctaattatggtaagtatctcggtttgtcgtcatttgtgggtagaacaaaaaaacatctttttgaggtgatcaagaaccgggtttggaataagattcgagggtggaaggcgtccatgttctctgtggctggcaaggaagtgttggttaaagctattttgcaggccatcccggcttatacgatgacttgttttaggttgtctaaagacactattaagagtttgcatcgtatggctgctcggttttggtggggatcgtcagagcataataagaaaacccattggtgtaagtgggcatatttgtgtaagcctaaagagaagggtggtttggggtttagggatttggaactgcacaaccaagcgcttcttgctaagcaaatatggcggtgtattcgttatccggattctttatgtagtcggggtgttacaagctagttatttccctgatggagatgttttggatgcgaagtgtgggtcgaaagcgtcctttgtttggcgtagtttggtatgggggaagaagatcattcagaggggctaccgatggagagttggtcagggagataaggtgggggtgcttgaggacccttggttgcctaggccagtctcctttcgggtttatgataaaccggttatgcctgatcaaatgcgggttatggaattaaagaatttggatggtacttggaatatggactttatccgtggtctgtttaattcggttgatgcagatatgattctgagtattcctagtggtgagtgggagatggaggatactgttttgtggcattatagtcggaatggtgaatattctgttgaaagcagatacagagttgcagctgctttaagggaggagattcatcagtcaaatgtggtggatgcagaaaaatggtggactgagatgtggagattgaaaatacccccaaagatcaagaattttgtgtggaaggtatgccatacttggctcccgacttatgccgttctttctcaacgcaaggtggctattagtccattgtgtcaacgctactcttcgggtaagagtgaggatgtaagtcatatgttgtgggggtgttctgcgagtattcaagtttggaagagatgtggattatggtcagatatcaagaagtatgttgtgggtgataatatttcctttcttcagaagttgtttcatgtgtggacaaatgaaacatttaatctatttcttgtcatctgttggtatttatggttcatttgtaatagtgtcaatcatgggggttgtcaacctacggatggggacatagtggagtggagccataattttttgggagaataccaagcaggtaatagcactgaaggcgcagttaagcaggatctgggcattcataggtggcaacgacctgctgctggctgtttttcaattagtgtatatgcgacattatcaacagtgaagggaaattgtggtcgaggcttggtgctaagggatgagaatgggcagtgtatttttgctaaagcttcatcataggttggggcggtctctccttttgcggctgagcttgaagcgatcttggagggtatttcaattggtgtacagggaaggttggtgcggttcacggttgagtccgactgtcttcaagccattaactaaattaggagtgttccagatgggtgtagggatgttgatggcttggtctatgcgatacgacagttactaaactccaatgatgttgctggtcagaggtttatttatagggagggaaattagccaattatgcattgtgtaacgatgttagtgctatgtggat

SEQ ID NO: 26120 - DNA, 1541 bp, Cannabis sativa
aaaaaaaatgtaaaatttattctggaactttatctttttatcgaaaaaaaaaaaactatcattaattaatcttcttcctagtgaaatttctatagccaccgtcaatctcagctattcatatgataatttacagcaattcacttgccgaaaacttgatgagtgagatttataagcaatgacataggcagtgaagtcggtggcgatatcatgaaagtagattcaccatggagaagatggaaaaagtggatccataatctgtattacagaattttttagaaaatagaatttattaaacggggatttattttattattgattttcagctgctagcatctaatcaagcattcatttatatatatacataatattttggatgtttcactatcaaattttgaaaaattttctttgctctattattgttatatttttttttttttcatatatatagtaagtaataattaggaattataaaacatttaattatactttcccacaataaataaatagtcttagctactatatcgtgaattgtgaaagtgaaacagtgaaagattgattaattgctagattatagactaatttttcctcttaaatgaaacattacattaagtagtcatggtacatttagcacccaagtttatccaaaaaaaaaagtaattaatgtaatatttactattaagcaagtgaatcaagggcatgtttacgtttactatctttatccttcagatcgattcaatgaaaaagattaagttgagaattgatcttaaggttttattttgtcggtggattattccagtaagttcagcatggagaaagtggaatttccaatgactaggccaatttaaaagctaaatttatttcagataaagtggtgtttaacttttattaattagttccttcaaaaaaaaaaaaaaaacttttattaatcagttttctgatttttaaattagaaaactaaaaatatttttcaaaaatatattttctaaaaatattttctcttttttattttttaattgagaataaaattttaaaagaaaaaaaaaattactttcaatatttttttaaacagtttttcttaatcaatattttgcggattccaaccaaatctgacatctgacccgaacccgaattctatcctggacttacacccgacttaaataaaatcaaaaaataaaaataaacttttggaacacacttttatttttttaaaaaaaaaaaattaaaaaaacaaaagtagttaaagaatacatttttatttttcaaaaataaaatttttaaaaacaaaaaattttatttttattttgtgattaaaaaattaaaaaacaaaagttttaccaaactataactagatttattttagataaagtaaaatatcaaaaataaaaataatttcatgtattggggttaacggaataaattgggtaaatttcacaaacatattattatttgttgctaaatccactcaattatcatattacgtgtacttctcaaattttagtgataaacttcaccaaattataaaactgttagcaaatttaagg

SEQ ID NO: 26121 - DNA, 2051 bp, Cannabis sativa
taaaataatttccaacacaaagtgtcataaatattacaccataatctaaacaatcacataaaaattgaaacttctggttctcgagatatgtttttattatgaattgcaaactcaccgtttaacgtgactcttaagcctaaaaaaaaaacaaatcactaattagtaaaggaaacaattataacataactcaatatctcaaattatgatatacataactcaatattaacattcactaagtcattacagaataaaaaaaaattaatattacataataactttttacaaaattaatccaattaaacattccgaaattgatcaaaatagctcaaattagaaatcataacacaaaaaaaaaatgatcaaaataacttaaattagaaataataacacacaaaaaaaaaaaaaaaaatataacaatttagtatttataatagactaaaaaataagaatagagaaaaaagattatagagtttgtatacattttttaaatcatacataaataaattaatattttagtttaatgtattttttatataatttcttttaatatatgaataattttattaacaatatatacgtatcatatataattttaatatatattatagaattaaaatttaattatataaaaatatatactataccaaacccatttttaaaaataaattcttttgattttgttataagatagttacgactaaaaattaaaagtataaataatttaaaaaatatttattattataataattatttaattaattaattatcataattaaaatccaatcaaatttaaatttaaatttataattgttctttatcttttttactcaaattatcttaacaacttcacaacatttataatttttgaaaaatatcttaacaacttgcattttaattttttttttctaaagtgcagctcaaattttgaatctcaacaacttccctaaatctacactatttaatatttcatatttcgcagacaaaataaaataaagacctttaacttcttttttccttctttttgaactttgttgctaaactttaaatgaagaatctaactaaaattgcatttaagtttcttttttttaaaaaaaaataaaatttacacgttcaaaatctacctataaaaaaatgaaagtaaaagcttgtgtggttttatccataaaatctattgttttaatctagtgaaaaaaaaatcaattaagaaatatactctatcttgcataaaaaaaattaatttgttatgtgctagggtcgaatccacccttacatatactagaaggatttgctaagagagtttggagggataaaatcgacagggtgaagctgctattttacgggattttcataattcgtttcaattcgatgaaggatagggatgaagtgcttattgggggatatatcttctttaatagaagacttgtgataataaaatcgtgggattccaatgtgaatttcaagaaagaagatgtaaaatgtgtcccaattcagatccaactggaagagctagatctgaaatacttgggggaaagatcattgttcaagattgtgggacaaataggtaacccggttatggtggattcggtgacaaaggagagagatagattgaattatcgtagaatcctaattgaggtcaggatggaccaacagttcccaggtttcattgattttgagaatgaacatggatttaatgttcaggtgggagtaaaatacgaatggaaacctgtggtctgcaatcattgttcggggttaggccatataacagaggaatgtaggaagaatgccaagggaaagcaggaatgggttgtgaaggaagacaaaaggcagaaacagatgattgtagatgaggatggcttcatggaagtgataaaggggtgcaaagctgcatatagaaatgttactacagaagctctaaaagttgataatgcatttagattctggatcaacatgatggacaacaagatagtgaatctgggatgttaggggaccagccaaaatagagcaatacaagagggggggggggagaaccttctctttctaatggataagct

SEQ ID NO: 26122 - DNA, 3685 bp, Cannabis sativa
gttcattcccttggttattaaatccatgggaagtttgtcgaacatctcgtcgatgttcctaatttcttatattattaggatttgtttgattatccattgggacatcccttgtatccccaagctattctttctgggaattttggggattcccttggtttgtttcttgtctccttattctggagcctcgaggtcttcctcgtggcctccttaccgcaggatctggttgattttgaggaacagtcccatgtgtagtcctggctgcatcggcttctctttccaactcagcattttgtcggttagatttggccaaacattatcaaagttgcctattctctagctccaccaatggtacgtatctagttgggtcataagcatcctcacttctaaacacgtatctagcagagttattggcatcttcgttccttcattctggaatttgatcactatcaccattgttccttcttgaacgtggtgtttcagaggtgttaggcctttgagatcccatgggatctttcccaggatgatgggttgtttcctcaggttggttgttggttgttgttgcgttgatcatcactagccattgaatatgattagatcaagtttataaggagggatttttctgaatttttatcaccaaggctctcaatgaaagtaccaaactgttaacgtagattttcgttaacccaattaaatagcctttttgtaataaaaaatattacaagaataaataagtattaaatgataagataacaccagatatttttacgtggttttataggtaaaatctacatactctataagtccttcttattagggatatttattgagtacataatacaatattagaatttgaataatagtattctctttctcaatcttgtcgtgctttttcccatggaatctacccctatttataggaatataggttggcagttaccctttttgggattgatttaaatataacggttcatgaaacatggacaattcccacgttacatttaattacatgtgggataatattcaataatttcccaactactctttgtttttatcctttagatggttactactgatttggaaggttgcatcttatttgatacgaattatcctactcatctgtcttaataagaaagaatgatgtgttgggaagtaattcgtctcgtcctactcctttattggcgttcatagtgcaagatgatcttttcgccatgtataatgtaaggcagttatgttgttacatttattctgctagagtggatgaatattcccttcttgtctgtatattatgaggcatgcatatgtctcgttaatattagcttaatagttattatccttgtctcgcttaagacttatatactcagggagttttgaatattatctatccagcctttatttaataataacgagttatttaatatgcattcattattatatcctttcagttgattcatattccttttttaagacacgtgtcagcttcaagagtatagctaaattttgggtataacagtaactttttagccaaagggcaaagatctatttgtttatgttggatctattcaggggtctcgaatcttgattatttcagttttaagggctaaggatttactgcacagtagatgtgtaggatttttggcagttgtaattgactccagcagacctgaaacatttgggcttgaggatttcagagttgtaaaagaatttcttaatgtttttcctgaggagttaccgggattgccgccatagcaagagatatattttgtaattgatttggcacctggggcagtatctattttgaagacaccatacagaatggctctagcaaaacttaaggagctaaaaatacaacttcaagggatgctggatttagggtttacccgacccagtttatcgccctagggagctccaattttagttgtgaaaaagaaggatggatccctccaaatctgtattgattaccggtaattgaataaactgacgatcaagaacaagtatccattgcccaggattgatgatttgtttgatcagcttcatggtaagactgtgttttcaaagattgacttgcatttcgcttatcatcagctgagaattcgagaggaagatattctaaagaatgcaatttggacgaggtatggtcattacgagtgtttagagatgttgttcggattgacaaatgctccagcgcctttatggatctcatgaacagagtattcaaggatttcctcgataactgtgtcatagtgtttatcgatgacatccttggggtactctcagacagaagaggagcatgagcaacatctccaaatggtattacaaaagtttaaaaagtatgaattctggttgtcgaaagtgtccttccctgggcatattttcgagaaagatggaattatggttgatccgagaaagatcgagtcaattaaaaattagctgagaccaagaatagttactgaggtacgaagttttcttgggttggcagggtattatcggtgttttttcaaaggattctctaagattacaatgccactgacggagttgactaagaagaaccaacagtttgtatggtccgacaagtgtgaagcgagtttttaagaattgaagcaacgactgatcacagcaccggtgttagctttgccattagaccaagaaaatttcattgtttactgtgatgcatccagacagggtctgggacgcattctgatgcaagttgacagggttatagcctatgcctcccgtcaactgaaggaatacgaacaatattatccaacacatgatttagagcttgctgttgttgtgtttgctttgaagatatggcaacattatcagtatggagaaaaatgtgagatctatacggaccacaagagccttaaatatttcttcactcagaaggatttgaatatgagacagaggcagtggctggaattagccaaggattatgattgtgagaatatgtatcatcccgagaaagccaatgtagtggcagatgctttgagcaaaaaaggtcccggacagatctttaatactataatgatagctcctcaattagcctcagaatggttaaagctaaaattgaatttgcagttggaaagttacttaacctaacacttcaatcagatttgttggaaaggattagaaagacacaactggaagatgctaagctagttaaaatttgagatgaggtattggccgatcagcctaaggactttttgatcttgaataacggaatgctactttacaaagcttgagtttgtgttccagatagtgttgagctcaggaaaaaatacttgatgaagctcatactacaccttattctttgcacccgagaactaccaaaatgtatcaagatctgaaatcctattattggtggtgtgaaatgaagaaagatgtagtggattacgtgtctaaatgtctaacatgtcagaaaatcaaagctgaacactagacgtcggtagggttactacaaccattaacacttcttgagtggaagtgggaggatattacaatgatctttgtggttggtttgcccagaaccacgggaatgtatgactcagtatgggtcatagtggagcgtttcacgaagtcagcacattttttgacggtaaaaacaacctatacagtggatcagtatgcatagttgtatgtgaaggagatagttcgcctccaagaagctccaaaatccattgtttca

SEQ ID NO: 26123 - DNA, 1540 bp, Cannabis sativa
catgcatttttctactgtagtcatgctaaagctgtatggatacaattcaactttccaattgatttcaagaaggcacgttgtatggttagtggtgattatatttttcatcttgcaacgctactcagccaacatgaattagaaatgttgatttgcattatgtgggtgatttgggctaactaaaaaaataattcatggtgaaacaaagcatgatggttatgctctaactgcttatgctaggaactacatggagaattatcaaaaagttaaagaccattccaatcttgttattgaacctactacttcttcggccaatataaatctaccaactgaagagattccctggaaaccacccgatttgtatggtttgaaactaaatgttgatgcagcggtaaatcctacatcaaaggtcttgggagttggtgccattgtccggaactataatggccaagtcattgcggctatgtcaaaacttgtttaaggctgtttcatatcatatgaaatggaggcgaaagctcttttccatgcacttaattggatctctcaagtctcattgcagattactcatgcggaaacagatgcctttcatgtctcaacttttttaaattatgaatctttggacttatctagtttctctgatttaatctttgaaattcattgtctttcatcctctttccctgctattgttatttctcatgtaaagagaaatgataaccaagcttttcatggtttagcaaaatatgttcttggattgaaggttgacacttattggatgggagaaatttattatcttattttctctgttgttgtaaatgattgttaattatagtaacagtgaatctttctaaaaaaaaaaaaagcataatatttttttttttgaaagaaatataaaagacataattagtgaatgtaaatcctgtattcctatacccgacccattcaaggcccaaaaggagcccaaaacactgtaaaaccctagctggtttcataacatgctttctcgaccccaaccacatactctgagtctgagatcttgatcaagtttagggttcagcagcgaacatggtaagctttcttcacacaatttcatctttattcaatcaaagactattattcatatctctctgttttttctcagactttcaagcgaaggaatggtggaagaaacaaacatggtcgtggccatgtgaaatttatccgctgttccaactgtggtaaatgttgccctaaggtaatcgcatctctctctagaattcttctttttggttagatactctggtaccctggttagattttgtatgtaaattagagtattttttgggtctaatgttataggacaaggccatcaagagattcttggtgaggaacattgtcgaacaagcggctgtgagggatgttcaggaagcttgtgtctacgatggtactttttgttttttttttaatttcctggtctagggctataattcatgtttttctttcagaatgatgatttttattgtcattatatttgcttcattaaatgttcaacttgatttgtgccatt

SEQ ID NO: 26124 - DNA, 2015 bp, Cannabis sativa
gagaaataaaagaaagaaagagaagaaatgatcgtgactgactgagataggctatgatatagctaaaacggtgtaaccatgtaatacacgcataaaatatgaagaataacaaaaaaactaaaaatattatgtggcaataaaactttaaattataaacggtataaaaccgtatcaattaaagtgagaccaaaatcgtaaataaaaacaaaagaaagttctttagtgcaatttcttcttaattttaatctttaccaccactaaaggtgaaccgacgactgaaataggcccagagcaaaaaatgaaaccaaaccctacagtatgttccaatgttctctaaaaagagagaagttctctttttgcttgaaagtttatatttaatatctttgatctagttacaattttaaatacatcaaaccaaattaaaaatatatttaattttaattaaaatatacaatataaaaaaatctcctataatatttgtccttataaaaaaaactattataatatttatttctcccctaaatagtgtttattggaattgttaaaaaaaaaatagtgttcattggaagatttgtcattagttttgtagtagtattactgtttttcgctataggtagtagtatttagtttagtttttaaaattttctatgaacattttttttctcttatcaataatttgatatatttgaaatgaaaaaggctatagataatttgataggtaccgtgaatgttaagagtaatcaaattcttcttgttgtggcactttacatgattaattagtgtttttgataaggagcatatcaacataatgatgtttttgctaaccattcttgaccagagagaaagaaaacaataatgcatatgtttctactttatagagattaatgaattattcattagcataccaaaaaagttaataaaatcttgtaccccaaaggagtgaagaatccataatcttttcaaaaaggaaatggagagcaataaagttacacttaaaatacaaaatatattggaacaacaaaagatggctatcccaaatatcataattaataatcacttaatgtttgggtcaactattgtatttgtggagaatcatatgattttggctataatgtgtggggcctaaatttatgccatgaaattactataagctttattagaggaggtattattattaaagtttactataataataataatattaataatgtacccgtatatgttgattttaagtgtcataagtgagagacttttctttaaattattacaaggagcaaagtttcactattcatcaaaatgtagctaatttatttgtcactaaaatctattctattcccaaaggtatgcatatgggacaaaatatacaaacaaaatgaagcagaaaaagctaaattggaaggaagcggcccttcctttccaacccaaaagaaagaataaaaacatataaagtaattgaagaaacaagttataagaaaatcacttttgaacttcactaggctttaaaattgtacttgagttgcaaatttaagccagcaattcaactctcttttatttaaaaaaagttcatcaaccaaccaacctacctcctaagccattacaacgaaactttccttcatttgtagagcctctactgcgaagttggtaactacaacatgcctgaaaacttcaccatttgttgcaaaccaatttatgagttcattatccattcaaaaataataataaaaaatttgaaaaaaaaaaaaattgagttcattgtagatttagatttagtacgattccccctattcctaattttggcatagtagtcattaaaaattaaacaaataaggctagccaaggcagatatatatttatatatataaatatttataatttataactactataaaagtgacaatcttgttttaggcttccacatattaaatcactagaaagtccccacttctcacctttaatctattatgtcgaggttaatcatatacaaaatatggggtgattaattgtttttttttttt

SEQ ID NO: 26125 - DNA, 3274 bp, Cannabis sativa
agtgaaggagtggatttgagtttctagggccgtgaggttaagagaggcagtgaatgtgttggacaagtcgtccattctgagaacaggggtgaggatttgtctatgaactaaaacagaaaggctagtgtttgtgcagaagtgaacaatgaaattatgcagaaaaggacatagtgcagcgtgaatcaaggaagtaactggtatatataacctgaaatggtcgagtatatgctctggccaaaggatctcagtgggaagtaacttctccatgtcaggagaataatcgattatacctgcatagatgacagtggctcctagaatttgggtagtgtcctctacaacaatagggctaatcattgcccagggtggttcgggagggatggtttccataaatgcaaaatcaaaataggggtttcctttataagaaagttttgaagaaattgaaattggatgcagagcagaatttatcacagatgggacagcagcagaggagttatggtggattagaaagttacctgtaatggagatgacaagggagagtaatggtgggttccgtctgatggcagctaacggaatctgggtgggatgggttgaaccgtcactcatctgggtgggcggaggacggacagtaacgccgatgaacggcgacgatgacaagagcagcttcgacggcactacgcttcgagccctaggttgcattcttcttcagatgtgctttccagaaaatcttatcttttaatatatattgaaagtttcctttaaaaatcatttttgtgaagtctataaaaagtgccttttttttttttaaaaaaaaaaaagaaaattcttattaagaaaataattatttaccaaattcttcccatatgtatataaatttcaaggtaaatatgagcccctacatcatcataaaataatatataatatattataaagacgaaagtgattcgtgaacacgaataacgtcgattaatttaaaatgatagaatgaactcaattctataatgtcttcataggttttgaaatttacatgttctgatacctaaatgatcaaaggatgttttctctctattgaaatttaagctaccaaataccttttcatcacagtttttttaaaaagtaacttttaactcttctaaaagctattccaaactgacccttaatcattagattttacgctcatgatgtgagatacaaataaagcatatatatatacttttaattataacaaaatttatgattaaaagtaaagaaattatgactacaaaatatttattatatacatgtcagtacaaaaaaaaatatgtgaacgaaaataatggaagaagtcttaggggttaatcccatagagttcttgaagatgagggtagcatcaaggatgctgaagatgaatctgctattcctaagaagactgttacgttgacttcgttgaaataggaggagctgtataataacatcgcaagctttttgcagactactcactaatgtgcagatgctttactgaaaggtaattctaaaaccactcctcccgtactgagatttgctaatgttaaggagagcctagctaattcctttgagaagcaaagagcaaaggttaaggtcaccttcgaggatatacaagatgaggttttcttttggactccttcgattgttagctatgtcattgcagttaacctgcctcttgtgattttagaaggattttctaggaggatttggagggataaggtagataaggtgggaatgttagtatataggatcttcctgattcgttttgagtcaatcgaaattcgagatgggtgctgaatggagtttacatcttcttcaacaaaaggtctgttattatgcaggcatgggatccaaatacgaattttaagaaggaagatataaaaacaatccctatttgggttcacttggataacttggagttgaagtattagggtgaaaagtcattgtttaagataattggccaggttggggattcttttggattcagataccaaaattagggaaaagttgagttttccttgagtgttgatagcaagaactacttgggatgatttggttggaggatgaaaatagagttgatgtttctatttcgatctcgtatgaatagaagccaattgtttgtgataattgctctagaatgggccatgccacaagcgattgtaggaagaaaggagataggaagaaggaatgggtagttaagtatgaggtaaagaagaaacaagttaaggctatcgcatatggagaaggttttataccaacagaaaaaaaaaggtatgaaaactaaaggaaaaagaataggagaggaatgtggctatgacaaatgcttttcaagcccttgctgggagagctgaagatactgcaatttctagtagtaaaggggaatttgaagttaatgttactgtggtaaagcaacctagttcgagtactgctgcacaaaccagtagggtaaaaaacaatgaaacaagattattttattgcaacaacaatggagattgtaagtggaatagaggccagtgataggatagaaaatgcttccagtactaagatgattgaaatggggaatactagaggagggggagtacctcctctacccaatggatagaatcttaagttggaacgtccgagggatcaaccaacaacaaaagtagactttagttaagtaatttattgctcaacaataggtgggttcggttggtctcctcgagacgagagtcaaggctcataaacttggagcctaatacattagtatgtttgtagaatggtgttttacgtcaaatagtacttggcaaaaaaaaaaaaaagaaaggattggcaatagagctcaatttaatcactccatgaaatttttacggtgttgatcattgtcaattagaagatgtcaagtttagtgggagtttctttacctagaataacaaccagcaaggagaagatagaatttatttcaaaatagatcgagttcttgccaaccaataatggctgtctaaatttgatcatgctaaatttattttccataatgaaggtttgttcgaccataccccagctgtgttacagtttatcaaggtacataaatagggtgcaaacctttttaatattttaaaatatggagaaaatttccccaataccaatagatggtgaataaagcatggaagtaggaagtttaggggacaaacatgtactaactaaataggaatttggtgacatagtaggagctaacactgaaatgaccacatttcataatatggattaggaaaggcaattagcactaattattatt

SEQ ID NO: 26126 - DNA, 1787 bp, Cannabis sativa
acactcaatattgatccaattgataggattcaacttgtgttttgaaactatttcaaaaatctatcatgtatcacacccacattgcaattttgaatattttaggtcaaaaattaatcctaaagaaagttacaattttttagcagataacccaaaaatgatcaaacacatgagattcaaagtttaaaaattgatgattttaccaagagtcaattttaacaattggatcatcatgaatcatcatcaatggccaagcttagcccaaaataagttttttcatattttttgtattttttaattattattttaataggacatcattccctataaaaggaaagatcctctagctcatttttcatattttaatttcccataaggttagagtatctctctctactgtctctctctataatttttagccccacacttagccaatgggaaataaaaactcaaaatagatgtagatccattaccttcgcatcaaggggagtgaactactataaatttattgtgtctctcttacttatacttaactctcaatacattctcaccaatctagcaagggggtgtgaccagatatttgtatctagatttctacgtcaacaagagggcttagtgtttcaacatgctactcattttaactttagaaagttactttgatctagactaggcttcatgtgcttatgacaagcattcaatagggggtaatgctgtctttttaggtggcattatcatctcatggtatgctaaaaagcagcacatggttgcttgttcaaaaactaaaagtgaattcacagccttgccaatacaattgttgaacttaggaggattacttctctttttggttgatcttcaagttcccttcagtcactgtcctatcatttatgttgattaaccaacgtactgctacacttgctactaacactgtgtttcatgctaaaacaaaacccattgagactggtctatattttgtgagggattaaattatggccaaacagatatttgtttgttatttgcctaccatagaccaagtagaagatgcacttactaatcccttgtccatagaaagatttaattacctcaaatccaaattgaaaatggctactactcgaagaaattttgttgagagtatcatgaataataatggcaattgggttacaaccagaagtgagattgagaaagaatttgcaaaatttcttggtggtatcttctcaacttcaacgcttggccctttggagagttttttacaatctcatatatgatcgcatctcccccttgaataatttgaaatggtgagaatcacgagccataaggagatcagacaaacgcttttactatgggcagctttaaagccccaagcccaaatggagtttcagttctcctctttaaaaattactagaatacaatatgttctaatttttgtgaagctatggtggatttcttccagtctgggatgatgcataagggtataaatgcaactaacgtggttctcattctgatggttccctatccaaagaaagtctcccaattcatgcctaattctatttgtaataaggtctacaaggttatctagataattattgtaaatagaattagataaatcctccctagattaatctaccctattcaagctgctttcgtccctggtaggaacaaacaagataacaacgttttattcaaagaaattatccacttttttaaattgaaaaaagggaaggaatgcctttttgcgattaaaattaatctcataaaggcctatgataaattgagttggcaatttattgatcatg

SEQ ID NO: 26127 - DNA, 1764 bp, Cannabis sativa
ttctttcaaaaaaaataataataaggaaatatttaataaaactgagaatattactaaatcccctgtttgtaatgctcctacttcaaaatattagttggaattcaaagttctacaataatcaaaatgctaccagtaacacaataatacatcagttgcataatggagtgactccaatgaaatgcaaagagcgaaacttacggtatttttattgcaaaggagaaggatgttggatttttatgctctaaataaaacttattttaatataatttaatttactaattaataaaaaatcagaaatcatttatgttaactggttcacatgttactttcataattatatgtttagtatataaattcagttaaatccagaccatattattcatgattatagaattgtctacacaataaaaaataatcattataatgaaattattttatctcatgatttatgagtatgctggatttatattgatatgataatgaataatataaattgcttacacttaattaggtaagtggaatatcttttccagagtattagcaaagtaaacatgtactagatgtatagactatacatcagactggaccaatattgtacagtataaatagaaaagatatattatttaccgttatatctttttctaagtcaatatcacttagttgatattatgccaattgattaatcctgagatggttaagttctaattatactatacaggttctttgagttgttctatttgcccaaaaaatgtgggtcaaaaaaatatagattggtttgctttaatgcgaagaaaaggaaagattatatatttagttgatgtttttccaggtcttctttggaagatgttgtaggttgtaaattggtttttggagtaatgaaaaatcttgcttatatctcaacaaaaaaaaaatgttattaaataactcttgtgttgtagtgcaataatatttgtgattcatggccacataagtaaattaattaaaaaaaatgagctaaatgtaaaaggagggggatatttgcaaatgatttacttagtgtggggggaatttttgcaatattggtaaaagtcacttttgtgagcgcagttcgatattgtgctggcaaaagttacttttactagcagtaaaactgtgacatttttaccagcacaactcgcaaaatgtgctgcttaaagggatttttggtagcacaaaagcgaactgcggtgacaaaagtgacatttcttatagtgatttaagaattttgagaagaatgaacattaaaaggagaaaatagaagtaatggaaaaagattggcatttacatttatatgtagatttatataatcttttcaaatgtgatagttgaaataaataattagtttagttttttaaatattatattaataattaattttctaaattaaaatttgaaaaacatttaaagtaagaaaatagttaccgtccacataagtttgaatgaaatcttattaaaaagaattaatttatatacatactatgtaaaaaaaaatatgcacagaattagctaactaaattagttggtatatataaaccattaataataaatgtaagtataaattttttaggactaatattttagtcattgaaactctttaacatttaccgaccaaacattttgtcacaaattgagaatttttagacgtgactaaataattttagtcaccaaaatttagtgctcccaccacaactattaatttggcgctaaagtttcagtgactaagtacaaatttagtcactaaaaata
